United States Patent Application Publication US 2011/0182862 A1 - sequence listing, part 16

SEQ ID NO: 22665 - protein, 680 aa, Muscodor strobelii
  misc_feature: SGI Peptide ID NO. 567698
MSKIGDNCVEAENSTDCLLRELLQVVGDQATEYNWDPVTFAFTLILGIAALLFAVLTIFQAITASDSTRRKCNERAIGAWSANNKKEWRMRDMTRVYTVETPVLKYAKFTDWTPWNGTPSPFEAFQENEWHPIDHASIDPVATWVVFLKAIGFGDPNMTADSLRRAEANYFPADLVTAPAYGEIGFIVTMAAAAGAHTFSVTNGDRYPLIIADNFVFDFRSHPTLGVVGCFTKFASSGLERFKFVPNEWRRYVVQQHINGYIEVGSFCDKRYFDDITLLDDKDEKGFIKVETQWSLLKGRARSSDPSHHTTKCMCFHESFDNAGFVELHWADTPSYIPALFPQREMAKRATGLKALACCSQFWSGITHSAFGLRFGREVNSFALFDPNSGDHVVMRELQAVEDLTRPEKSRQLKAEDHDRLLGGVRYGESSENEFTAIGGLLGPSKQFLNDYKGFEGWFSALDMGRKRIFRATTLLQLQSIDRHLDICVSVAQRICVNRFLYHVISCLAPIFTATRLPDWPEGHESRWASLPSTSSQILHTLIRYARFLENLVNVTIDDFQPFFTAHKDTIAEILANWPGLKFCEDSFLAEDYKGTKNSHFLYGPIHREITRITKALDQCYDILNNNDASGQISEGDQVWYEAIDIMIWRSILIHMLFCTAENSEELRRKIAWNQVVPIN

SEQ ID NO: 22666 - DNA, 2686 bp, Muscodor strobelii
  misc_feature: SGI EST ID NO. CUFF.53198.0
  misc_feature: Variant of the nucleotide sequence at SEQ ID NO 22664
tgtgtccgtcaagaattctatttgattcgtttcattcattgccattttctaactgccacaacatccgccatgtccaagatcggggacaactgcgtcgaagcggagaactcaacggactgcttacttcgagaactcctccaagtcgtgggcgatcaagccactgaatacaactgggacccagtgactttcgcttttaccctcattcttggtattgcagctctcttatttgcggtgctcaccatcttccaagccatcacagcgagtgactctacgcgaagaaagtgtaatgagcgtgctattggagcctggtccgcgaataacaagaaagaatggagaatgcgggacatgacccgagtatacactgtcgaaacaccggttctgaagtacgcaaaattcaccgactggacaccctggaacggcacacctagtccattcgaagcattccaagaaaatgagtggcacccgattgaccacgcgtcaatagacccagttgcaacttgggtggtatttcttaaagccataggcttcggggaccctaatatgacggcagacagtctgcgacgagccgaagcaaactactttcccgctgacctcgtcactgccccggcatatggcgaaatcggtttcatcgtcactatggcagctgcagcgggagctcatactttcagcgtcaccaacggtgaccgttaccctctaatcattgccgacaactttgtatttgattttagatcccaccctactctgggagtagtaggttgcttcacaaagttcgcgtcatccggtttggaaagattcaagtttgtaccgaatgagtggcggcgatatgtcgtacaacagcacataaatggctatattgaggttggatctttctgtgataaacgttatttcgatgatataacattactggatgacaaagacgaaaagggatttatcaaagtcgagacacaatggtcactgctcaagggacgagcacggtcgtcagacccgtctcaccatacaacaaaatgcatgtgttttcacgagagctttgataatgcagggtttgttgaacttcattgggctgatacgccatcctacattcctgcactttttccacaaagggaaatggccaagagggctacggggctcaaggccttggcctgctgcagccagttttggtctgggatcacacacagtgcgttcggactccggttcgggagggaggtaaatagttttgctttattcgatccgaattcaggggatcacgtggttatgagagaactccaagccgttgaggatctcactagacccgagaaaagcagacaacttaaggcggaagaccacgatcgactattgggtggagttcgctacggtgagtcatctgagaatgagttcacggcgattggaggacttttgggcccttccaaacagtttttaaatgattataagggttttgaaggatggttttcggcccttgacatggggcgaaagcgaattttcagggccacaacactccttcagctccagagtattgaccggcacctagatatttgcgtgagcgtcgctcaacgtatatgtgtgaacagattcttgtaccacgtcatttcctgtctggcgccgatatttacagccacccggctccctgactggccagagggacatgagtctcgttgggcaagtttgcccagcacttcatctcagattcttcacacgttgattagatatgcgagattcctcgaaaatcttgtcaacgtcacgattgatgattttcagccgttcttcaccgctcataaagacacaatcgccgaaatccttgccaactggcccggcctcaagttttgtgaggactctttcttagcggaagattataagggaacgaagaattcacactttctttatgggccgattcacagggagattactagaattacgaaggctctggatcagtgttacgacatactgaataataatgatgcctctggccagatatcggagggtgatcaagtatggtatgaggcgatcgacatcatgatatggcgttcaatcctcatacacatgctgttttgtacagccgagaacagcgaagagctccggcgtaagattgcatggaatcaagtggtccctattaattaaagcagaaactcgagcagccctaattttcggattttcacgctgttgtgaactctgccaatgacccgatagcgatatcgaagcaagcgacaagcaacggcttgaaatcgagagacttgatgcaatggtatcagattcactatgcatggtgggcaccgcggaagcgatcatctcgcatgctacgattcccgcgggttcctgaaaaaagaggttaagaaagtgcatgcagactctatccaagcacccgacttggaatgcaaattcttaggagtggaacagtactagtacagcatggttgaaatatctggatgggatgacgttcagaactggctctggcaatcggacagaataggtcggtagacccgttgtttgcttggagtcattggcattggcgatcgataatatcactgtctcggggaagcatgtggacttgtattgtcatatcattgttttgcactcactcaagcagcaatgaatcaaactttgcccactgcaagactacttgctcgtggccattgttgaagtaattccacgaatagtagcaagtacattattcatgagaataaatggatagcct

SEQ ID NO: 22667 - DNA, 2376 bp, Muscodor strobelii
  misc_feature: SGI cDNA ID NO. 567699
  misc_feature: Reduced expression when VOC is produced
  misc_feature: Encodes the peptide sequence at SEQ ID NO 22668
atgggttcggtacctgcacgccgggcgctgctgctcggacagcgcggcgttcccggcgcaaagtcgactgcgcgctcttcaatgccaacgctcaacgactcctttctcctccatccaacctctcggaacaatgcatcgactatccgcactttctcgggtgctgctaaccgacgcggaactgctcagacttctctccttgcgcccataacgaaccgaacacgaagatttcctcaacccgcatctaattacaatctcccctctcacagtataatcgcaaaatcaaacttcacaactgtcgcttcgaggcagttcttcaacaccagcatcaatcagaaagagattgtagacaaaaacgccacggctgtccagaatgctggccaagcgggcgagcttgcggctacaggagacaaacctaagggtcccaaactgaatctgagagctcgtcttaccaaggagaaagatgacacgagaaaattctcgtctctgcttgagatatggcgtttgctccggattgctagacctgaggctctaccgatcttgggcgcttgcggattgctgcttacttcgtcagctgtggctatcagtgtaccgtacactattggaaaagtcatgaatattgtcacgagtgctcccggatcagaggaaacaatctttggcctgactatgtaccaatttttcccggtactgggtgtcgtcttcacccttggtgctgccgctaacttcgggcgtatcgtgctcctgagagttatcggtgaacgggtagtctcccgcatgcgaacccagctgtaccgtaaaacgcttggacaagaggccgagttcttcgatgcgaacaaggtcggagatctgacgtcgcgtttcatcgccgacaccactatcgtcggaaagagcatcacgcagaatctgtctgatgggttaagagccatcattagttgtgttgctggtttcacggccatggcatggatcagccccagtctcgtgctgactatcttacttgctgcgcccttcataggaggaggagctctcgtgtatagtcgagttgcccgaaggctggccgtgcagtcacaaaggggtcttggtgctctaaacagaataggaaacgagcgtttggagaacatccgcacaatccagggctttgttggcgaggcacaagaagtcggacgatacaatgttgcggtccgaaggttgttccagatcggcaagcagcaggctatcaccgacgcacggttcttctccttcaatggctggatcggaaacatgatcgtcattggcctcctctggcatggcggcggtttggtacagcagggtattttgacgcttggtgacttgacgactttcatgatgtacgctgtgtatgctggaacgagtgttataggaatcactggtttcctctcggagctgatgaaaggcgttggagccgcgagccgtctgttcgaacttgaggatcgcaagcctgcaattgcagctacaaagggcacacccgtcacatctgctaaaggcatgattgaattcagtgacgttggctttgcctaccccactcgcccggataatcagatcttcagtgatttatcttttgccattccatccggaagcaatgtctgcattgttgggccttccggaggtggcaagtctactgtcgcttcacttctacttcgattctatgacattgacagcggcaccattaagctgaatggtgtcgacatctccactcttaacgcaaagtccctccggcgatacatcggcgtggtctcgcaagagcccgtcttattctcaggcacaatcgccgagaacatagcatatagcaatccccgagcaggccgcgctgccattgttcaagccgctgcccgcgcgaactgtacgtttatcagcaaactacagaagggccttgacacagaagtcgggtcacgtggcacacaattatctggcggccagaaacagcgcatcgccatcgcccgcgcccttcttaagaaccctgatatcctcatccttgacgaagcaacatccgctctcgacgcagagtcagaactcgctgtcaacgcagcagtagcacagctcatgagcggcaacatgacgaccatttctatcgcccatcgcttatccaccatcaagcgctctgacaagatcatcgtcctcaacgacaaaggcggtgtagctgaaatcggatctttcgccgaactgtctgcagatgagaatagcgcgtttacgaaactcatggagtggcagttgactggcggcgagaaccctaatccgcctgctcctgcgccttctcatcgccacgaagtcatggaaggagaggaagctgaggaagctgaagagtttgatgaggttgaggagttggaggaggagattattgagaaagaagagaataagaaaaactaa

SEQ ID NO: 22668 - protein, 791 aa, Muscodor strobelii
  misc_feature: SGI Peptide ID NO. 567699
  misc_feature (179)..(456): Pfam Id: PF00664 Pfam Desc: ABC transporter transmembrane region
  misc_feature (529)..(713): Pfam Id: PF00005 Pfam Desc: ABC transporter
  misc_feature (139)..(754): NCBI GI: 145605762 Blast Desc: conserved [Magnaporthe grisea 70-15] gi|145013557|gb|EDJ98198.1| conserved [Magnaporthe grisea 70-15]
  misc_feature (142)..(752): NCBI GI: 171693699 Blast Desc: protein product [Podospora anserina] gi|170946798|emb|CAP73602.1| protein product [Podospora anserina]
  misc_feature (139)..(754): NCBI GI: 164426552 Blast Desc: ATP-dependent permease MDL2 [Neurospora crassa OR74A] gi|21622336|emb|CAD36977.1| multidrug resistance protein 2 [Neurospora crassa] gi|157071382|gb|EAA32037.2| ATP-dependent
  misc_feature (124)..(789): NCBI GI: 156033071 Blast Desc: conserved [Sclerotinia sclerotiorum 1980] gi|154699014|gb|EDN98752.1| conserved [Sclerotinia sclerotiorum 1980]
  misc_feature (130)..(747): NCBI GI: 256728483 Blast Desc: NECHADRAFT_72407 [Nectria haematococca mpVI 77-13-4]
  misc_feature (107)..(750): NCBI GI: 242807156 Blast Desc: ABC multidrug transporter Mdr2 [Talaromyces stipitatus ATCC 10500] gi|218715520|gb|EED14942.1| ABC multidrug transporter Mdr2 [Talaromyces stipitatus ATCC 10500]
  misc_feature (100)..(754): NCBI GI: 115492399 Blast Desc: ATP-dependent permease MDL1 [Aspergillus terreus NIH2624] gi|114197687|gb|EAU39387.1| ATP-dependent permease MDL1 [Aspergillus terreus NIH2624]
  misc_feature (142)..(750): NCBI GI: 212538231 Blast Desc: ABC multidrug transporter Mdr2 [Penicillium marneffei ATCC 18224] gi|210069013|gb|EEA23104.1| ABC multidrug transporter Mdr2 [Penicillium marneffei ATCC 18224]
  misc_feature (55)..(754): NCBI GI: 169771675 Blast Desc: [Aspergillus oryzae RIB40] gi|83768166|dbj|BAE58305.1| protein product [Aspergillus oryzae]
  misc_feature (111)..(786): NCBI GI: 30519701 Blast Desc: ATP-binding cassette transporter protein [Paracoccidioides brasiliensis]
  misc_feature (253)..(745): SWISSPROT Homolog: EC 3.6.3.44 Xenobiotic-transporting ATPase
  misc_feature: Useful for introducing or modulating the production of volatile compounds
MGSVPARRALLLGQRGVPGAKSTARSSMPTLNDSFLLHPTSRNNASTIRTFSGAANRRGTAQTSLLAPITNRTRRFPQPASNYNLPSHSIIAKSNFTTVASRQFFNTSINQKEIVDKNATAVQNAGQAGELAATGDKPKGPKLNLRARLTKEKDDTRKFSSLLEIWRLLRIARPEALPILGACGLLLTSSAVAISVPYTIGKVMNIVTSAPGSEETIFGLTMYQFFPVLGVVFTLGAAANFGRIVLLRVIGERVVSRMRTQLYRKTLGQEAEFFDANKVGDLTSRFIADTTIVGKSITQNLSDGLRAIISCVAGFTAMAWISPSLVLTILLAAPFIGGGALVYSRVARRLAVQSQRGLGALNRIGNERLENIRTIQGFVGEAQEVGRYNVAVRRLFQIGKQQAITDARFFSFNGWIGNMIVIGLLWHGGGLVQQGILTLGDLTTFMMYAVYAGTSVIGITGFLSELMKGVGAASRLFELEDRKPAIAATKGTPVTSAKGMIEFSDVGFAYPTRPDNQIFSDLSFAIPSGSNVCIVGPSGGGKSTVASLLLRFYDIDSGTIKLNGVDISTLNAKSLRRYIGVVSQEPVLFSGTIAENIAYSNPRAGRAAIVQAAARANCTFISKLQKGLDTEVGSRGTQLSGGQKQRIAIARALLKNPDILILDEATSALDAESELAVNAAVAQLMSGNMTTISIAHRLSTIKRSDKIIVLNDKGGVAEIGSFAELSADENSAFTKLMEWQLTGGENPNPPAPAPSHRHEVMEGEEAEEAEEFDEVEELEEEIIEKEENKKN

SEQ ID NO: 22669 - DNA, 2859 bp, Muscodor strobelii
  misc_feature: SGI EST ID NO. CUFF.53266.0
  misc_feature: Variant of the nucleotide sequence at SEQ ID NO 22667
gttgacatccatcagcattaagaccgagcgctcggcccggaagagatcggagcttgagacgactagcaacatttgcatgacggcattgcatacccacttaagtttttgcttattactgctcactgctgagaaatcgacccttgttctttgcgcgctaaagcatagcaacttcctaacatccgacccgcggacattgaaggaggcgcaacctctgcaaacagcgccgtttgctccatgctgccaatggctgtcgcggcgagcttccgaatgacgactacgccctgatagtcacgcctcaaccatgggttcggtacctgcacgccgggcgctgctgctcggacagcgcggcgttcccggcgcaaagtcgactgcgcgctcttcaatgccaacgctcaacgactcctttctcctccatccaacctctcggaacaatgcatcgactatccgcactttctcgggtgctgctaaccgacgcggaactgctcagacttctctccttgcgcccataacgaaccgaacacgaagatttcctcaacccgcatctaattacaatctcccctctcacagtataatcgcaaaatcaaacttcacaactgtcgcttcgaggcagttcttcaacaccagcatcaatcagaaagagattgtagacaaaaacgccacggctgtccagaatgctggccaagcgggcgagcttgcggctacaggagacaaacctaagggtcccaaactgaatctgagagctcgtcttaccaaggagaaagatgacacgagaaaattctcgtctctgcttgagatatggcgtttgctccggattgctagacctgaggctctaccgatcttgggcgcttgcggattgctgcttacttcgtcagctgtggctatcagtgtaccgtacactattggaaaagtcatgaatattgtcacgagtgctcccggatcagaggaaacaatctttggcctgactatgtaccaatttttcccggtactgggtgtcgtcttcacccttggtgctgccgctaacttcgggcgtatcgtgctcctgagagttatcggtgaacgggtagtctcccgcatgcgaacccagctgtaccgtaaaacgcttggacaagaggccgagttcttcgatgcgaacaaggtcggagatctgacgtcgcgtttcatcgccgacaccactatcgtcggaaagagcatcacgcagaatctgtctgatgggttaagagccatcattagttgtgttgctggtttcacggccatggcatggatcagccccagtctcgtgctgactatcttacttgctgcgcccttcataggaggaggagctctcgtgtatagtcgagttgcccgaaggctggccgtgcagtcacaaaggggtcttggtgctctaaacagaataggaaacgagcgtttggagaacatccgcacaatccagggctttgttggcgaggcacaagaagtcggacgatacaatgttgcggtccgaaggttgttccagatcggcaagcagcaggctatcaccgacgcacggttcttctccttcaatggctggatcggaaacatgatcgtcattggcctcctctggcatggcggcggtttggtacagcagggtattttgacgcttggtgacttgacgactttcatgatgtacgctgtgtatgctggaacgagtgttataggaatcactggtttcctctcggagctgatgaaaggcgttggagccgcgagccgtctgttcgaacttgaggatcgcaagcctgcaattgcagctacaaagggcacacccgtcacatctgctaaaggcatgattgaattcagtgacgttggctttgcctaccccactcgcccggataatcagatcttcagtgatttatcttttgccattccatccggaagcaatgtctgcattgttgggccttccggaggtggcaagtctactgtcgcttcacttctacttcgattctatgacattgacagcggcaccattaagctgaatggtgtcgacatctccactcttaacgcaaagtccctccggcgatacatcggcgtggtctcgcaagagcccgtcttattctcaggcacaatcgccgagaacatagcatatagcaatccccgagcaggccgcgctgccattgttcaagccgctgcccgcgcgaactgtacgtttatcagcaaactacagaagggccttgacacagaagtcgggtcacgtggcacacaattatctggcggccagaaacagcgcatcgccatcgcccgcgcccttcttaagaaccctgatatcctcatccttgacgaagcaacatccgctctcgacgcagagtcagaactcgctgtcaacgcagcagtagcacagctcatgagcggcaacatgacgaccatttctatcgcccatcgcttatccaccatcaagcgctctgacaagatcatcgtcctcaacgacaaaggcggtgtagctgaaatcggatctttcgccgaactgtctgcagatgagaatagcgcgtttacgaaactcatggagtggcagttgactggcggcgagaaccctaatccgcctgctcctgcgccttctcatcgccacgaagtcatggaaggagaggaagctgaggaagctgaagagtttgatgaggttgaggagttggaggaggagattattgagaaagaagagaataagaaaaactaaaaatttggcggttggtgctgtattataggttgggacgatgactattgcatttgaagataccatagacggggctgcgttgtatgtacaatgtatgttgttgaataaatgaataaatagcctgaggctctccactaatgggtttttgttgtgttttattcctgaactcgaaatgcgtaaggaat

SEQ ID NO: 22670 - DNA, 3027 bp, Muscodor strobelii
  misc_feature: SGI cDNA ID NO. 567700
  misc_feature: Encodes the peptide sequence at SEQ ID NO 22671
atggcagaaaacgcgcaatcccctcggcttacacccatagagctcaaaagctccctaaatagggttatagaagactccgcgagatcaagcgcatttgcctgcagcgagtcgaatgcctcgtttccctacccaggcctctctatagacgactacggagatgttcgcttacctcttgtggatcgcgatgccaaagccatcattgccaactgccataagagtgcctttggtaaaggtgccgagactcttattgacgacaacgtgcgtcgcagttgggagctgaacgtagatcaattcacactgcgcaaccctgtttggtctgcagccgtgaacaacgtcttgcctaagattcatgaacgactcggattgcgttgcccacttcacgatgtccgagctgaaccttataaacttctcctgtacgaggaaggtgcttttttcaaatcacatcaaggcaagtttgcacaagaacataaaaagacgcctggcatgtttggcactcttgtcatcgcgttacccacgttacacgatggaggagacctcttcataatcacgaagaggccacgatcaagacatcaacggcatcaaaattcggctattcttgggcttcgtgctaatatgaatgaaaggtattcagatgtgttccacgaagtaaaaccagtcacgcaaggctatcgcctcatgttgacatataatctggtcatcaacgctgcctcaggcaatgaagtaatgacaatacctcccacgctaaccacatccgtatcagaaatcaaacagctcttgcaagcctgggactcccactcagaatacaaggcatacccgtcttacctgatatacaagttcgagcaccaatataccttggctaccttgtctcttagtcgactcaacggcagcgatagagtcagagcagagtgtctgaagacggcggctgaggagactggggcctccatcttcttcgctacggctgaactcgagatcgtcaaggatgatggagacgattattatggcgatggcgacagcgacagcgatgaggagattgataggacatcacgactcactgatgtaaagacgctggatggtacaacaatctttgattctttgggatacgatgatgaaaaattcatcaataaagaagagatcgatgaggatgatcctgatgacgaagaacatagtgggtttactggaaatgaaggcgcgactggtacgtactggtaccgtgataccgtttgtatcgtggtccctccgtctgctctcgacaagtttcgattccagggtgatgctaagtggcgatgggcccgcgaccgattacaggaacttagacaggagccgcctacacacagcttagtgctgctgtgccggtctttattggaagcgcaccccgtgccaagcatagggggagaatatatgtcagactacattggctatggatctagcggtccggaagcggctgctaaggaagcctgcatcaaagatattgcttgcatagctttggaagcgagggaccttgcgatgtttgaaatggcattccggggacagaaaggaccgctacccaccgaaattctctaccacttaggccgatgtgtcacgcagatacggcctagtgacgccgatagagtgttgtaccgggtgtttcagagatgtgagggtctagcatcgaaataccaggcatttgagcagctggtagaaggcaccgagtcatctcttcgtacgatggatccagaagagatagacggttggcgatattggcttgggacggtcttgactgcccatgtccttgttgttgaagctggtgaactcacaagagcagatggcgtcgctttatcgacaatctattccaaggtttcgaatgacgaccataaaacttacatacaagaggagatctctcgggaatcggtgggaagtaagattgggttctgcatcaatttggcagctctggtacgtggacagcaactggatgataccattgtacgcccagtcattcgagaacttctcagtggtatttggtcagacttccatcttgacaacacgtatatcgcgccgaatgttgagccaatcccgctacccgagagcacccaagggaaattcgcaacgggtgaagatatcgttgagcttgtccggctcgtcgaaatatatcgagatccgccttcttcgaagctgaatgagcacggtgctgagatgaccgtctcaaaggattgtctgagatattcccaagctgactgcgtagctaaaatcctctccgcatgtgagaccgccgatgctatagatatagtcggcacttggctaccgtttgtcaaacttattacctctaacaaagtcccgttcttgttgtcacccgacgacaaccagctatcagaagtcgcaaagaatatcgtccgaaccatcatccagcgtttcgcgaaactcgtgatcggcaacaaacccgagccgcctaagacatgggcacagctacccataggagactgtccgtgcacagactgcaggcgggttaacgcgcttctgcgttcaccaacggaacgcattggtcgcttccccatgggcaaggcaagacgtcaccacctagataaaatgttcaacaatcaaataggcggtttcataacttctacgggcgatatcatacgagactatactatcgacacgatccgccaaggtagcccacatacatggcaaataaccaagacaacgaatgcatacgacgcgcaggtcagacactggaagagcggaacgaatgaggcctggcctttcctctcgaagctgtttccgaaggacaaacctaatagcaacttcttggagacactaatgggttcgaacctatacacagccatcagaaccagggatatcaccgcgctattggccattagcgagctttcgggagaaagagcaccgcttctgactctggctgatacgaatgcctttgggaagagagctcgtcctgatgatggatttggagcgcctgtggcctctgctaagagggtggatcgtggggaggctggaacacatcatgattccgaagtcattgatttgacggaggattga

SEQ ID NO: 22671 - protein, 1008 aa, Muscodor strobelii
  misc_feature: SGI Peptide ID NO. 567700
  misc_feature (12)..(411): NCBI GI: 238487718 Blast Desc: conserved [Aspergillus flavus NRRL3357] gi|220699976|gb|EED56315.1| conserved [Aspergillus flavus NRRL3357]
  misc_feature (12)..(411): NCBI GI: 169769949 Blast Desc: [Aspergillus oryzae RIB40] gi|83767303|dbj|BAE57442.1| protein product [Aspergillus oryzae]
  misc_feature (13)..(406): NCBI GI: 238837471 Blast Desc: conserved [Microsporum canis CBS 113480]
  misc_feature (13)..(857): NCBI GI: 145254402 Blast Desc: An18g01550 [Aspergillus niger] gi|134084195|emb|CAK47228.1| protein product [Aspergillus niger]
  misc_feature (14)..(425): NCBI GI: 242801803 Blast Desc: conserved [Talaromyces stipitatus ATCC 10500] gi|218717189|gb|EED16610.1| conserved [Talaromyces stipitatus ATCC 10500]
  misc_feature (13)..(409): NCBI GI: 85091137 Blast Desc: NCU09412 [Neurospora crassa OR74A] gi|28920138|gb|EAA29519.1| [Neurospora crassa OR74A]
  misc_feature (12)..(511): NCBI GI: 256730925 Blast Desc: NECHADRAFT_84641 [Nectria haematococca mpVI 77-13-4]
  misc_feature (5)..(441): NCBI GI: 169866364 Blast Desc: CC1G_09674 [Coprinopsis cinerea okayama7#130] gi|116499177|gb|EAU82072.1| CC1G_09674 [Coprinopsis cinerea okayama7#130]
  misc_feature (14)..(433): NCBI GI: 212540430 Blast Desc: conserved [Penicillium marneffei ATCC 18224] gi|210067669|gb|EEA21761.1| conserved [Penicillium marneffei ATCC 18224]
  misc_feature (31)..(462): NCBI GI: 169866328 Blast Desc: CC1G_09656 [Coprinopsis cinerea okayama7#130] gi|116499159|gb|EAU82054.1| CC1G_09656 [Coprinopsis cinerea okayama7#130]
MAENAQSPRLTPIELKSSLNRVIEDSARSSAFACSESNASFPYPGLSIDDYGDVRLPLVDRDAKAIIANCHKSAFGKGAETLIDDNVRRSWELNVDQFTLRNPVWSAAVNNVLPKIHERLGLRCPLHDVRAEPYKLLLYEEGAFFKSHQGKFAQEHKKTPGMFGTLVIALPTLHDGGDLFIITKRPRSRHQRHQNSAILGLRANMNERYSDVFHEVKPVTQGYRLMLTYNLVINAASGNEVMTIPPTLTTSVSEIKQLLQAWDSHSEYKAYPSYLIYKFEHQYTLATLSLSRLNGSDRVRAECLKTAAEETGASIFFATAELEIVKDDGDDYYGDGDSDSDEEIDRTSRLTDVKTLDGTTIFDSLGYDDEKFINKEEIDEDDPDDEEHSGFTGNEGATGTYWYRDTVCIVVPPSALDKFRFQGDAKWRWARDRLQELRQEPPTHSLVLLCRSLLEAHPVPSIGGEYMSDYIGYGSSGPEAAAKEACIKDIACIALEARDLAMFEMAFRGQKGPLPTEILYHLGRCVTQIRPSDADRVLYRVFQRCEGLASKYQAFEQLVEGTESSLRTMDPEEIDGWRYWLGTVLTAHVLVVEAGELTRADGVALSTIYSKVSNDDHKTYIQEEISRESVGSKIGFCINLAALVRGQQLDDTIVRPVIRELLSGIWSDFHLDNTYIAPNVEPIPLPESTQGKFATGEDIVELVRLVEIYRDPPSSKLNEHGAEMTVSKDCLRYSQADCVAKILSACETADAIDIVGTWLPFVKLITSNKVPFLLSPDDNQLSEVAKNIVRTIIQRFAKLVIGNKPEPPKTWAQLPIGDCPCTDCRRVNALLRSPTERIGRFPMGKARRHHLDKMFNNQIGGFITSTGDIIRDYTIDTIRQGSPHTWQITKTTNAYDAQVRHWKSGTNEAWPFLSKLFPKDKPNSNFLETLMGSNLYTAIRTRDITALLAISELSGERAPLLTLADTNAFGKRARPDDGFGAPVASAKRVDRGEAGTHHDSEVIDLTED

SEQ ID NO: 22672 - DNA, 532 bp, Muscodor strobelii
  misc_feature: SGI EST ID NO. CUFF.53211.0
  misc_feature: Variant of the nucleotide sequence at SEQ ID NO 22670
gacaagtttcgattccagggtgatgctaagtggcgatgggcccgcgaccgattacaggaacttagacaggagccgcctacacacagcttagtgctgctgtgccggtctttattggaagcgcaccccgtgccaagcatagggggagaatatatgtcagactacattggctatggatctagcggtccggaagcggctgctaaggaagcctgcatcaaagatattgcttgcatagctttggaagcgagggaccttgcgatgtttgaaatggcattccggggacagaaaggaccgctacccaccgaaattctctaccacttaggccgatgtgtcacgcagatacggcctagtgacgccgatagagtgttgtaccgggtgtttcagagatgtgagggtctagcatcgaaataccaggcatttgagcagctggtagaaggcaccgagtcatctcttcgtacgatggatccagaagagatagacggttggcgatattggcttgggacggtcttgactgcccatgtccttgttgttgaag

SEQ ID NO: 22673 - DNA, 450 bp, Muscodor strobelii
  misc_feature: SGI cDNA ID NO. 567701
  misc_feature: Elevated expression when VOC is produced
  misc_feature: Encodes the peptide sequence at SEQ ID NO 22674
atggccgactctcttaccgaagaccaagtctctgagttcaaggaggccttctccctctttgacaaagatggcgatggacaaatcaccacgaaggagctgggtactgtcatgcgatccttaggccagaacccctccgagtctgagctgcaggacatgatcaacgaggtcgatgccgacaacaacggaaccattgacttccctgagttcttgaccatgatggcccgcaagatgaaggacaccgactccgaggaggagatccgagaggccttcaaggtcttcgaccgtgacaacaatggcttcatctccgccgctgagctgcgccacgtcatgacctctattggagagaagcttaccgatgatgaggttgacgagatgatccgcgaggctgaccaggatggcgatggccgcatcgactacaacgagttcgtccaactcatgatgcagaagtaa

SEQ ID NO: 22674 - protein, 149 aa, Muscodor strobelii
  misc_feature: SGI Peptide ID NO. 567701
  misc_feature (121)..(149): Pfam Id: PF00036 Pfam Desc: EF hand
  misc_feature (12)..(40): Pfam Id: PF00036 Pfam Desc: EF hand
  misc_feature (85)..(113): Pfam Id: PF00036 Pfam Desc: EF hand
  misc_feature (48)..(76): Pfam Id: PF00036 Pfam Desc: EF hand
  misc_feature (1)..(149): NCBI GI: 119500504 Blast Desc: calmodulin [Neosartorya fischeri NRRL 181] gi|119415174|gb|EAW25112.1| calmodulin [Neosartorya fischeri NRRL 181]
  misc_feature (1)..(149): NCBI GI: 46110018 Blast Desc: CALM_NEUCR Calmodulin (CaM) [Gibberella zeae PH-1] gi|116198243|ref|XP_001224933.1| calmodulin [Chaetomium globosum CBS 148.51] gi|145605748|ref|XP_370387.2| calmodulin [Magnaporthe
  misc_feature (1)..(149): NCBI GI: 119196077 Blast Desc: calmodulin (CaM) [Coccidioides immitis RS] gi|121707585|ref|XP_001271881.1| calmodulin [Aspergillus clavatus NRRL 1] gi|145258474|ref|XP_001402062.1| An04g07010 [Aspergillus
  misc_feature (1)..(149): NCBI GI: 242807179 Blast Desc: calmodulin [Talaromyces stipitatus ATCC 10500] gi|218715525|gb|EED14947.1| calmodulin [Talaromyces stipitatus ATCC 10500]
  misc_feature (2)..(149): NCBI GI: 261192998 Blast Desc: calmodulin A [Ajellomyces dermatitidis SLH14081] gi|239589040|gb|EEQ71683.1| calmodulin A [Ajellomyces dermatitidis SLH14081]
  misc_feature (1)..(149): NCBI GI: 166714376 Blast Desc: [Stachybotrys elegans]
  misc_feature (1)..(149): NCBI GI: 4028590 Blast Desc: calmodulin [Magnaporthe grisea]
  misc_feature (1)..(149): NCBI GI: 9836694 Blast Desc: AF089808_1 calmodulin [Magnaporthe grisea] gi|4585219|gb|AAD25331.1| calmodulin [Magnaporthe grisea]
  misc_feature (1)..(149): NCBI GI: 154303432 Blast Desc: calmodulin [Botryotinia fuckeliana B05.10] gi|156044963|ref|XP_001589037.1| calmodulin [Sclerotinia sclerotiorum 1980] gi|117938080|gb|ABK58108.1| calmodulin B05.10]
  misc_feature (1)..(149): NCBI GI: 168777 Blast Desc: calmodulin [Neurospora crassa]
  misc_feature (1)..(149): SWISSPROT Homolog: EC 2.7.11.1 Non-specific serine/threonine protein kinase
  misc_feature: Useful for introducing or modulating the production of volatile compounds
MADSLTEDQVSEFKEAFSLFDKDGDGQITTKELGTVMRSLGQNPSESELQDMINEVDADNNGTIDFPEFLTMMARKMKDTDSEEEIREAFKVFDRDNNGFISAAELRHVMTSIGEKLTDDEVDEMIREADQDGDGRIDYNEFVQLMMQK

SEQ ID NO: 22675 - DNA, 1105 bp, Muscodor strobelii
  misc_feature: SGI EST ID NO. CUFF.53288.0
  misc_feature: Variant of the nucleotide sequence at SEQ ID NO 22673
gcccccctctgtaagccgaatagtgtcatgtctcagatctgcccatcccgcctttatcaagtattttatgacgacgtaggctagaccacacctctttcgacatccctcctctcttttacccacctctgctattttagatagctggcatcctcctttccgattcttcgcaaacccgttgtcacaagcatttttattccacactcgctctcgcacatcacacaactcgcaacatggccgactctcttaccgaagaccaagtctctgagttcaaggaggccttctccctctttgacaaagatggcgatggacaaatcaccacgaaggagctgggtactgtcatgcgatccttaggccagaacccctccgagtctgagctgcaggacatgatcaacgaggtcgatgccgacaacaacggaaccattgacttccctgagttcttgaccatgatggcccgcaagatgaaggacaccgactccgaggaggagatccgagaggccttcaaggtcttcgaccgtgacaacaatggcttcatctccgccgctgagctgcgccacgtcatgacctctattggagagaagcttaccgatgatgaggttgacgagatgatccgcgaggctgaccaggatggcgatggccgcatcgactacaacgagttcgtccaactcatgatgcagaagtaaagggggtagaaaaggaaaaggctcttttcggtcttgtagcgcagagccacgatttcaatagccgtgacatacccatgtaactgcatcacgatgcacttgtctgtgcatcttgcgtccttatcatgtctattttctcctttgcacacagggaaatatggtccgggggcccggaataatcaatttcttgtgatagctgagtttccattccaaatggcaatgtctatgatgctcccttcttctccaaatggggcgatgacgacttgaggttcccacgagttctatcgtaaattaaagtaagatcatagttctcgactatatctcaatcactgcccgaatcacataaccaccaattctgtacaagaggcggctcggatgtgcacccatttcgaattaaggaagaaaacacaatgaactcccagcatgct

SEQ ID NO: 22676 - DNA, 1182 bp, Muscodor strobelii
  misc_feature: SGI cDNA ID NO. 567702
  misc_feature: Encodes the peptide sequence at SEQ ID NO 22677
atgtggcgagaccgcaccaacctctacatctcctaccgccaatcctacgcccaccacccggccaagaagacacgatacgggcctggaccaggcggcaatgctttctctagcgccatatccggctctggagccgaggacacgcagggactgctgtcgggggccgactacatggatgatggcgatgccgtgattgagatggatctgctcccgccgcgatgggccgacatcaacgacgaagttacagacatcctcgccgaagtagccaccaagtcacaaaccctcgagcggctgcaccagaaacatgtgttaccaggcttcaacgacgaagacgccaagcgcaaggaggaagccgagatagagcgcctcacccaggccatcactaagggcttccatgacagtcatagatgcatcaagcgcgtcgagcacatggtccgcgagggccagcaggccggtaccatgacacgagcagaggaggtcatggccaagaatatacagatcaaccttgcaagccgcatccaggaagcgagtgctgggttccggaagaaacagagtgcttatctaaagaaactccgcggcatgtccgggctcgccccctcaccctccggtgaacgttcatccacaccccagccctacggacaggttagctccgccgcctacgccgccgatccctccctcctcgagtccgatgccgatcgctcatactcacaagttgcattgcaacaaaccatggtccagcgcgcgacacacagcaacgacgccgtcatcttacaacgcgagcgagaaatcgaagagatagcgcaaggcatcatcgagctctccgatcttttcagggacctacagactatggtcatagaccaggggacgatgctcgatcgcatcgattacaacgtcgagtccatggcgacggatgtcaaagccgcggagaaggaactcggtgtagcggagggataccagaagaagacgacgaagcggaaggcgatattactgctgattattgtgattgtgggggtgataatattaattgttcttaaaccgaggaagagcggcggcggaggaggtggaggtaatagtgatggtgataacagtggtggtggggatgtcggcgagacggtaaagccgcaggggagatcagaagatatgttgcttgctctcttgcccagaataagtcacagtgtgaggtga

SEQ ID NO: 22677 - protein, 393 aa, Muscodor strobelii
  misc_feature: SGI Peptide ID NO. 567702
  misc_feature (69)..(177): Pfam Id: PF00804 Pfam Desc: Syntaxin
  misc_feature (257)..(319): Pfam Id: PF05739 Pfam Desc: SNARE domain
  misc_feature (1)..(356): NCBI GI: 261360814 Blast Desc: SNARE domain-containing protein [Verticillium albo-atrum VaMs.102]
  misc_feature (1)..(349): NCBI GI: 256728480 Blast Desc: [Nectria haematococca mpVI 77-13-4]
  misc_feature (1)..(347): NCBI GI: 46110016 Blast Desc: FG01890.1 [Gibberella zeae PH-1]
  misc_feature (1)..(350): NCBI GI: 164426550 Blast Desc: NCU04119 [Neurospora crassa OR74A] gi|157071381|gb|EAA32039.2| NCU04119 [Neurospora crassa OR74A]
  misc_feature (1)..(353): NCBI GI: 39977997 Blast Desc: MGG_06883 [Magnaporthe grisea 70-15] gi|145013549|gb|EDJ98190.1| MGG_06883 [Magnaporthe grisea 70-15]
  misc_feature (1)..(351): NCBI GI: 116198241 Blast Desc: CHGG_07276 [Chaetomium globosum CBS 148.51] gi|88178555|gb|EAQ86023.1| CHGG_07276 [Chaetomium globosum CBS 148.51]
  misc_feature (1)..(352): NCBI GI: 226290386 Blast Desc: conserved [Paracoccidioides brasiliensis Pb18]
  misc_feature (1)..(316): NCBI GI: 21622338 Blast Desc: related to the member of the syntaxin family of t-SNAREs TLG2 [Neurospora crassa]
  misc_feature (1)..(368): NCBI GI: 240110621 Blast Desc: SNARE domain containing protein [Coccidioides posadasii C735 delta SOWgp]
  misc_feature (1)..(350): NCBI GI: 226282957 Blast Desc: conserved [Paracoccidioides brasiliensis Pb01]
MWRDRTNLYISYRQSYAHHPAKKTRYGPGPGGNAFSSAISGSGAEDTQGLLSGADYMDDGDAVIEMDLLPPRWADINDEVTDILAEVATKSQTLERLHQKHVLPGFNDEDAKRKEEAEIERLTQAITKGFHDSHRCIKRVEHMVREGQQAGTMTRAEEVMAKNIQINLASRIQEASAGFRKKQSAYLKKLRGMSGLAPSPSGERSSTPQPYGQVSSAAYAADPSLLESDADRSYSQVALQQTMVQRATHSNDAVILQREREIEEIAQGIIELSDLFRDLQTMVIDQGTMLDRIDYNVESMATDVKAAEKELGVAEGYQKKTTKRKAILLLIIVIVGVIILIVLKPRKSGGGGGGGNSDGDNSGGGDVGETVKPQGRSEDMLLALLPRISHSVR

SEQ ID NO: 22678 - DNA, 1847 bp, Muscodor strobelii
  misc_feature: SGI EST ID NO. CUFF.53220.0
  misc_feature: Variant of the nucleotide sequence at SEQ ID NO 22676
tggagcactagcatgactgatgggagtggcctgtgcgagatagcttcgactctgttttcgcagatgaaacgacggattgatgcctcacgcctcaggcatcacgacttaacaatcaatccttgtcatttcagctgcatgtgccatgcgacgggcgaatctgggccgtttcccggggccctatcgcagccttcaagctacgtcagctttaacttcaaacaatcgtgccttagctctattctcagcatccgattcgataattgagcgctgtcttgtgtcgccgtgtcttgatagttgtgattgtacacttatctgtctttgtctttgtaaatcactgtcccatattatcgctccattccgtcgtacactgcctcggcgaagctccgtattctctctttgttagtgctcatcaaactcatcgatatttcaagctaccacatcagtcttgagcgcggcatcgcgccctacctgcgtccgccatgtggcgagaccgcaccaacctctacatctcctaccgccaatcctacgcccaccacccggccaagaagacacgatacgggcctggaccaggcggcaatgctttctctagcgccatatccggctctggagccgaggacacgcagggactgctgtcgggggccgactacatggatgatggcgatgccgtgattgagatggatctgctcccgccgcgatgggccgacatcaacgacgaagttacagacatcctcgccgaagtagccaccaagtcacaaaccctcgagcggctgcaccagaaacatgtgttaccaggcttcaacgacgaagacgccaagcgcaaggaggaagccgagatagagcgcctcacccaggccatcactaagggcttccatgacagtcatagatgcatcaagcgcgtcgagcacatggtccgcgagggccagcaggccggtaccatgacacgagcagaggaggtcatggccaagaatatacagatcaaccttgcaagccgcatccaggaagcgagtgctgggttccggaagaaacagagtgcttatctaaagaaactccgcggcatgtccgggctcgccccctcaccctccggtgaacgttcatccacaccccagccctacggacaggttagctccgccgcctacgccgccgatccctccctcctcgagtccgatgccgatcgctcatactcacaagttgcattgcaacaaaccatggtccagcgcgcgacacacagcaacgacgccgtcatcttacaacgcgagcgagaaatcgaagagatagcgcaaggcatcatcgagctctccgatcttttcagggacctacagactatggtcatagaccaggggacgatgctcgatcgcatcgattacaacgtcgagtccatggcgacggatgtcaaagccgcggagaaggaactcggtgtagcggagggataccagaagaagacgacgaagcggaaggcgatattactgctgattattgtgattgtgggggtgataatattaattgttcttaaaccgaggaagagcggcggcggaggaggtggaggtaatagtgatggtgataacagtggtggtggggatgtcggcgagacggtaaagccgcaggggagatcagaagatatgttgcttgctctcttgcccagaataagtcacagtgtgaggtgacgtgttgagttgcatataaggaggtaggtacgaaagatacctcagtattcgcaatactacgcgctgtatcaatacaacctgacgatatgacaagaacctatcttcagattcataagcatgaggtagccttgaaaaagcgtcggtagccatgattttggttttacaaattctcatcgaccttgtttcgag

SEQ ID NO: 22679 - DNA, 1533 bp, Muscodor strobelii
  misc_feature: SGI cDNA ID NO. 567703
  misc_feature: Encodes the peptide sequence at SEQ ID NO 22680
atgcccctcacaatcattctgtcgtggttatcatggcccattatcgccagtgccatcttctggtatgctacaacactagcaatctatcgattatacttgcaccctttggccggaattcctggtcctaaactagcagccatcacgcgatggtatgaggcctattacgatgtcgtccaagatggccagtacacatttaagatagccgaactacataagctttacggcccaatcctacgtatcagtcctcatgagctccacgtcaatgatccctcgtacttcaacactctatactgccaagagggccgttgggataggtctgctttcgcctgggatgcttggggcgccgagggcccgacgattcataccgtcaatcacgaacgacacagagctcgccgtcaaccgctcgcgcctttcttttctagggcgaaagtgctgagtcaacaaggaatgataagaagacatgtgcaaaagctttgcagccgcctgtccagtatcgcttcgacagaaacaacggtcaacctcggcgctgccctttccgcgttggcgcgtgatgtttcctttgaattcactttggccaaagactaccaaagtcttgccactgacgactttgctctcggatcttttcattctgcccgagggacagggccactgtggcgcgtcactaagcatgttggattcgtcttccctattatacagtccataccgttagattgggcaatgaaaatgtcggacgacacaatgaagtcattgttcgttcacatgaaggctacgaaggaagataccaagaccatcatggctgccgcaacgacgtcctctccaaaaaccagtgcccagcagactatagttgatgtggtgcttaattccaagctcccacccaaagacaaaacattccagcgtattttcgaagacgtcacctctgttagcggagcaggactcgaaagcgtcgccggtgcccttcgcattatttgttttcatgtttttactaaccctagaattcggcgacgtctccgagcagagctccgcgacgcgcagtcccgacatgccgacgtcatggatcttaaggtgctagagcagcaaccattcgtcacggccaccatcatggaaggtttacgactaagtcccggagtcgcaacacgaatggcgcgaatagccccagatcgagacttgttctacaaggaaacgcgaatacctgcagggacacccgtaggtatgaccttgattttaatgcacaccgatgagagcctatatccctaccccggattgttccagccagagcggtggattgatgaggggaaattgaagacttcagagaagggctatgccccattttcgagaggcactcggatgtgtctcggtatgcatttggcatgggccgagctttatctcgtgctcgctgctcttgttcaaatttttgatttcgactttatcgatgcaaaggcagaggactttgaatgtgctagtgaccagttcgtcattggcacccgaggtgtttgtctcatggaggcgtatgttagactgcatgagacgacttga

SEQ ID NO: 22680 - protein, 510 aa, Muscodor strobelii
  misc_feature: SGI Peptide ID NO. 567703
  misc_feature (40)..(499): Pfam Id: PF00067 Pfam Desc: Cytochrome P450
  misc_feature (309)..(474): Pfam Id: PF00067 Pfam Desc: Cytochrome P450
  misc_feature (10)..(508): NCBI GI: 238841488 Blast Desc: cytochrome P450 [Microsporum canis CBS 113480]
  misc_feature (8)..(454): NCBI GI: 116206024 Blast Desc: CHGG_02305 [Chaetomium globosum CBS 148.51] gi|88182902|gb|EAQ90370.1| CHGG_02305 [Chaetomium globosum CBS 148.51]
  misc_feature (3)..(508): NCBI GI: 171683471 Blast Desc: protein product [Podospora anserina] gi|170941695|emb|CAP67349.1| protein product [Podospora anserina]
  misc_feature (10)..(508): NCBI GI: 238839890 Blast Desc: cytochrome P450 [Microsporum canis CBS 113480]
  misc_feature (14)..(497): NCBI GI: 169765436 Blast Desc: [Aspergillus oryzae RIB40] gi|83765044|dbj|BAE55187.1| protein product [Aspergillus oryzae]
  misc_feature (17)..(504): NCBI GI: 261199007 Blast Desc: cytochrome P450 [Ajellomyces dermatitidis SLH14081] gi|239595057|gb|EEQ77638.1| cytochrome P450 [Ajellomyces dermatitidis SLH14081]
  misc_feature (17)..(504): NCBI GI: 239609831 Blast Desc: cytochrome P450 [Ajellomyces dermatitidis ER-3]
  misc_feature (13)..(490): NCBI GI: 255938474 Blast Desc: Pc14g00120 [Penicillium chrysogenum Wisconsin 54-1255] gi|211584628|emb|CAP74153.1| Pc14g00120 [Penicillium chrysogenum Wisconsin 54-1255]
  misc_feature (13)..(497): NCBI GI: 258572987 Blast Desc: conserved [Uncinocarpus reesii 1704] gi|237900941|gb|EEP75342.1| conserved [Uncinocarpus reesii 1704]
  misc_feature (17)..(500): NCBI GI: 240106487 Blast Desc: Cytochrome P450 family protein [Coccidioides posadasii C735 delta SOWgp]
  misc_feature (1)..(473): SWISSPROT Homolog: EC 1.14.14.1 Unspecific monooxygenase
MPLTIILSWLSWPIIASAIFWYATTLAIYRLYLHPLAGIPGPKLAAITRWYEAYYDVVQDGQYTFKIAELHKLYGPILRISPHELHVNDPSYFNTLYCQEGRWDRSAFAWDAWGAEGPTIHTVNHERHRARRQPLAPFFSRAKVLSQQGMIRRHVQKLCSRLSSIASTETTVNLGAALSALARDVSFEFTLAKDYQSLATDDFALGSFHSARGTGPLWRVTKHVGFVFPIIQSIPLDWAMKMSDDTMKSLFVHMKATKEDTKTIMAAATTSSPKTSAQQTIVDVVLNSKLPPKDKTFQRIFEDVTSVSGAGLESVAGALRIICFHVFTNPRIRRRLRAELRDAQSRHADVMDLKVLEQQPFVTATIMEGLRLSPGVATRMARIAPDRDLFYKETRIPAGTPVGMTLILMHTDESLYPYPGLFQPERWIDEGKLKTSEKGYAPFSRGTRMCLGMHLAWAELYLVLAALVQIFDFDFIDAKAEDFECASDQFVIGTRGVCLMEAYVRLHETT

SEQ ID NO: 22681 - DNA, 524 bp, Muscodor strobelii
  misc_feature: SGI EST ID NO. CUFF.53235.0
  misc_feature: Variant of the nucleotide sequence at SEQ ID NO 22679
cggccaccatcatggaaggtttacgactaagtcccggagtcgcaacacgaatggcgcgaatagccccagatcgagacttgttctacaaggaaacgcgaatacctgcagggacacccgtaggtatgaccttgattttaatgcacaccgatgagagcctatatccctaccccggattgttccagccagagcggtggattgatgaggggaaattgaagacttcagagaagggctatgccccattttcgagaggcactcggatgtgtctcggtatgcatttggcatgggccgagctttatctcgtgctcgctgctcttgttcaaatttttgatttcgactttatcgatgcaaaggcagaggactttgaatgtgctagtgaccagttcgtcattggcacccgaggtgtttgtctcatggaggcgtatgttagactgcatgagacgacttgaacaacttgctcgatgtagcccagtagaatgttccttgatgcgcctgaattagctaatcgaccttgagcattacacaat

SEQ ID NO: 22682 - DNA, 573 bp, Muscodor strobelii
  misc_feature: SGI cDNA ID NO. 567704
  misc_feature: Encodes the peptide sequence at SEQ ID NO 22683
atggatgcggcagcccagtccacgatggacgaggtcctccagggtgacagcctcctccttgcagacgagaagcgcaattgggacgaaatttattgtgtccagttcgacgaccctttcccggtcgcccgactctccagagcttcgtacgatggcttgagtcctgccggccgcaagtactacattgagcaggcaagctcgcttcttggagaccaggcaatcttcatgctagacggaaagaacaccaatgtcgtcctcttgacctctgagacacaagctagcgccagtcgtctcaaagccaaggttatccacggcgccggtcttcctattgccgtccccgtcgcagagctccagaccccaaccatcaatgcgcagcgagtcgcaatcggtcagcaagccgtcgtcaccgaagaagctgaggtcacaaagcccaacggcgaatctggcacgactaccaagacacatgctagatggtcgccggcgaacgcctaccaggcccttgccgagctttccttgggagatgagtccacgcgaacgagtggagaatggaaagccaagaccaaagaggagcagtag

SEQ ID NO: 22683 - protein, 190 aa, Muscodor strobelii
  misc_feature: SGI Peptide ID NO. 567704
MDAAAQSTMDEVLQGDSLLLADEKRNWDEIYCVQFDDPFPVARLSRASYDGLSPAGRKYYIEQASSLLGDQAIFMLDGKNTNVVLLTSETQASASRLKAKVIHGAGLPIAVPVAELQTPTINAQRVAIGQQAVVTEEAEVTKPNGESGTTTKTHARWSPANAYQALAELSLGDESTRTSGEWKAKTKEEQ

SEQ ID NO: 22684 - DNA, 395 bp, Muscodor strobelii
  misc_feature: SGI EST ID NO. CUFF.53241.0
  misc_feature: Variant of the nucleotide sequence at SEQ ID NO 22682
acggcgccggtcttcctattgccgtccccgtcgcagagctccagaccccaaccatcaatgcgcagcgagtcgcaatcggtcagcaagccgtcgtcaccgaagaagctgaggtcacaaagcccaacggcgaatctggcacgactaccaagacacatgctagatggtcgccggcgaacgcctaccaggcccttgccgagctttccttgggagatgagtccacgcgaacgagtggagaatggaaagccaagaccaaagaggagcagtaggcctgtaggaggagtggatgcgtaactgcaagaagtctctagcattacggcatattctagagaccaccaacctacgtacctgttagtaggtaccaagaaaatcaggaatagtcatcaatgataataaat

SEQ ID NO: 22685 - DNA, 285 bp, Muscodor strobelii
  misc_feature: SGI cDNA ID NO. 567705
  misc_feature: Encodes the peptide sequence at SEQ ID NO 22686
atgaagctccacaccgcaatttccacctcccttctgtgcagctttgctatggcaagaaactgtacccctgggcttaactattgcggtaggaccttgctcgcgatcggcaagtatcagccccaaatcgaccaagccctcgccgacgccggcgcgagtgaggcgaatggcggcgctgacgatctattcacctgcgttggaggcacgaatggggtcatcaagtacatttcgtactgccctaacggatgccttaatgcaggaactggcatcagcgattactgcaagtag

SEQ ID NO: 22686 - protein, 94 aa, Muscodor strobelii
  misc_feature: SGI Peptide ID NO. 567705
  misc_feature (9)..(93): NCBI GI: 121716168 Blast Desc: conserved [Aspergillus clavatus NRRL 1] gi|119403850|gb|EAW14267.1| conserved [Aspergillus clavatus NRRL 1]
  misc_feature (9)..(93): NCBI GI: 256722442 Blast Desc: NECHADRAFT_105943 [Nectria haematococca mpVI 77-13-4]
  misc_feature (19)..(93): NCBI GI: 145257658 Blast Desc: An04g04460 [Aspergillus niger] gi|134058726|emb|CAK38710.1| protein product [Aspergillus niger]
  misc_feature (19)..(93): NCBI GI: 121719743 Blast Desc: conserved [Aspergillus clavatus NRRL 1] gi|119404782|gb|EAW15144.1| conserved [Aspergillus clavatus NRRL 1]
  misc_feature (19)..(93): NCBI GI: 119495721 Blast Desc: NFIA_014320 [Neosartorya fischeri NRRL 181] gi|119412801|gb|EAW22742.1| conserved [Neosartorya fischeri NRRL 181]
  misc_feature (6)..(93): NCBI GI: 85095281 Blast Desc: NCU05788 [Neurospora crassa OR74A] gi|28921507|gb|EAA30812.1| conserved [Neurospora crassa OR74A]
  misc_feature (1)..(93): NCBI GI: 240105140 Blast Desc: CPC735_047030 [Coccidioides posadasii C735 delta SOWgp]
  misc_feature (20)..(93): NCBI GI: 159122750 Blast Desc: conserved [Aspergillus fumigatus A1163]
  misc_feature (12)..(93): NCBI GI: 119174452 Blast Desc: CIMG_09208 [Coccidioides immitis RS]
  misc_feature (10)..(93): NCBI GI: 115390416 Blast Desc: conserved [Aspergillus terreus NIH2624] gi|114195109|gb|EAU36809.1| conserved [Aspergillus terreus NIH2624]
MKLHTAISTSLLCSFAMARNCTPGLNYCGRTLLAIGKYQPQIDQALADAGASEANGGADDLFTCVGGTNGVIKYISYCPNGCLNAGTGISDYCK

SEQ ID NO: 22687 - DNA, 1089 bp, Muscodor strobelii
  misc_feature: SGI cDNA ID NO. 567706
  misc_feature: Encodes the peptide sequence at SEQ ID NO 22688
atggcttctcaacaaccgactatggctcagatgagccatgataaagacattagtacaattgctgccatcagtgccctcgtcgctcttagcactattttcgctgctgctagactttgggttcgaattaagatgatgcgtcagttcggcctcgatgatttcttcattgcagtctctgtactttgcgggtggttgagtgtagccatttacactgttgccatcaagtcgggaagtggtcaacacattgaaacactcactctagaacaaatccaaggagcaattctattcacattgattggcacggttcccggcattttatcttttactctaccgaaatttgcagttgtcaaacttctttcgagactgttaatcccttcacgatcacacctcatttggctctgggccatttgcattttcaacctattgtccctgttgctctctggcatcttattcttcgtacagtgtcaaccatcaagatcacaatgggacttttccgttcccgcacgttattgttggtccaagtggtacacggttgattttgtaagaggggcttgtgcattctcggcttttgtggacttgtacctctctgtatatccaggcgtggtgctgtataagattcgtctgccaaagaagaagaagattgcgttcagcgcggccctcggaatcggttcaatctccactgttgtcgtagtttacaaaatcacaactttggatagtcttgctagtgctgattttacatgtatggctctcgagcggctttcttatgccgagggtagcgtccttatcatcgctgcttgcattccacttctgcaacctttacttgagacgctgcgccgggtcacaaacgatacgtgggcatcaaatcatctaatgacaagtctcgaatacggaggctgcgtgagaaactcgagatggatagtattttttggcactagagcaaacgaagaagagactgtggtcacaccgagccctgtctacgacagaggaggcggtctcgatgaagacgaggccaccctcgtcacaacaggtgtacaccctcaacagagtaaggtgagtacaaaggcgcgtgcctatcaagacgactgggcatga

SEQ ID NO: 22688 - protein, 362 aa, Muscodor strobelii
  misc_feature: SGI Peptide ID NO. 567706
  misc_feature (2)..(287): NCBI GI: 116203241 Blast Desc: CHGG_09505 [Chaetomium globosum CBS 148.51] gi|88178023|gb|EAQ85491.1| CHGG_09505 [Chaetomium globosum CBS 148.51]
  misc_feature (2)..(276): NCBI GI: 85094251 Blast Desc: NCU05854 [Neurospora crassa OR74A] gi|28921301|gb|EAA30609.1| [Neurospora crassa OR74A]
  misc_feature (11)..(276): NCBI GI: 39966504 Blast Desc: MGG_01905 [Magnaporthe grisea 70-15] gi|145009598|gb|EDJ94254.1| MGG_01905 [Magnaporthe grisea 70-15]
  misc_feature (11)..(276): NCBI GI: 256727176 Blast Desc: NECHADRAFT_6003 [Nectria haematococca mpVI 77-13-4]
  misc_feature (11)..(304): NCBI GI: 39945734 Blast Desc: MGG_07987 [Magnaporthe grisea 70-15] gi|145019222|gb|EDK03450.1| MGG_07987 [Magnaporthe grisea 70-15]
  misc_feature (2)..(333): NCBI GI: 242783189 Blast Desc: conserved [Talaromyces stipitatus ATCC 10500] gi|218720293|gb|EED19712.1| conserved [Talaromyces stipitatus ATCC 10500]
  misc_feature (11)..(333): NCBI GI: 212527270 Blast Desc: conserved [Penicillium marneffei ATCC 18224] gi|210073190|gb|EEA27277.1| conserved [Penicillium marneffei ATCC 18224]
  misc_feature (18)..(321): NCBI GI: 212538323 Blast Desc: integral membrane protein [Penicillium marneffei ATCC 18224] gi|210069059|gb|EEA23150.1| integral membrane protein [Penicillium marneffei ATCC 18224]
  misc_feature (14)..(278): NCBI GI: 255931803 Blast Desc: Pc12g06150 [Penicillium chrysogenum Wisconsin 54-1255] gi|211582077|emb|CAP80242.1| Pc12g06150 [Penicillium chrysogenum Wisconsin 54-1255]
  misc_feature (5)..(276): NCBI GI: 171691190 Blast Desc: protein product [Podospora anserina] gi|170945543|emb|CAP71655.1| protein product [Podospora anserina]
MASQQPTMAQMSHDKDISTIAAISALVALSTIFAAARLWVRIKMMRQFGLDDFFIAVSVLCGWLSVAIYTVAIKSGSGQHIETLTLEQIQGAILFTLIGTVPGILSFTLPKFAVVKLLSRLLIPSRSHLIWLWAICIFNLLSLLLSGILFFVQCQPSRSQWDFSVPARYCWSKWYTVDFVRGACAFSAFVDLYLSVYPGVVLYKIRLPKKKKIAFSAALGIGSISTVVVVYKITTLDSLASADFTCMALERLSYAEGSVLIIAACIPLLQPLLETLRRVTNDTWASNHLMTSLEYGGCVRNSRWIVFFGTRANEEETVVTPSPVYDRGGGLDEDEATLVTTGVHPQQSKVSTKARAYQDDWA

SEQ ID NO: 22689 - DNA, 2712 bp, Muscodor strobelii
  misc_feature: SGI cDNA ID NO. 567707
  misc_feature: Encodes the peptide sequence at SEQ ID NO 22690
atgcgattggcgagtcgattatggccacatgatgtgaagctgcagcgacctatcctctccgtcccaagtcctcttctgctcacgtctgggagctcgaacttctcaacgcaatgtcaatatggccgacgcttcctgtcgacgtctcgtaccatcgacctgaaatggagccccgacgctgctagggccgtagtgagagaaccatcgctcaggcgctcgcgccgtcggacgagattgcgattcaccattccccgttctgcatatcttctagatgatgttgatgttgtacggactggtgctaaaaatcctacgcctcaccgctaccgacatgcagaccagaagctcgaaactactaccgcatcctctatctcgcgccactacatccacagaccattgctcgctcccttttcctctggtctagtatccgctcagtctattgggcgtagattgagtagacacttacttgactcgggcgaaagctctttgagacgcgtggaacctgcaaatcctgtcgtcgtagttcccgccacgacgtccgatgtagcccgaccacttgggcacagaaaagccctgcatcgtcaagcccgatccggaccccgaaataggatccgcaagcccactgtgagagcgaaatcgcctgtcttgaaagcctatcaattcagaagatggaaatggctcatccgagactcgtcccgactcaacctcgagtccgacttgtttccagctaaccatatgagtgacaatgcgaaccgcctgctggtcgaccgatttgacaatcgtggcgatttcgaactatggactgctctcctagagtttcagtcgcgaatccatggggctgaggggaccgctctcgtctggagaggtctctggggccggaagtccttgtatgacgtgaagcacccgctggcccctacctttttccgtgccatgctggaggctgccctcgcagcaactaatgataagatgctggagcaagtttggatctatagcgaatggatgctgcacatgcatgggtctaggtggccggatctttacacaacagtcatggctcatatgctaaaaacccaccaacatcataaagctctatcatggcaactgcgtctgtcacctcaattctaccccggcgccgatgtttttgcagcaatgatcaagcgattcgctatcgacaaggagtttgctggaacagacacgctgcaaagtctctatttcatgaatcgagatcatcagctctacgagacgcttattccttatctgttcaacctcggagaatctacgctagctaagcagtggcgcgatatgtgcatcaagtgcatggacggactttttggcatcggcgtcaagaactacgatgacaagctcggctcgaggtggttcgcgagttcatgggtttctcttgatatggccatatcgactgtggcaacattgggcattgcccagattggacccctctcgattcaatctataggattaagagctcaaggctcagaggagttttcacgccgcatccgtcagctcgaagagcacagcatttctcccacagactgtggctataatcagttgattctttaccttgcgaatcgcaaggataatgaactcctcgacgaccttctcaggagtgacctgcaccccgacgtttttgacgatcttgaccttcagacccgcctgatcaacaatgcggcagaaagtggtctcgattggcgtaccttgcgacttctcctcatctcgcaatttgtggcctttgagcgctccgcccgaactctctcgaatgacattgtgcggaccagttacaccaggaaagatatgccaagcttgcggaatattttggaggatatgagaactcgacatgttccacttgatcttgagcaggctcaattcatctttgacagcgttttagacgaacacaaaaacggtagacagggtatcaccttacgctcggcgaaattccatattgctctgtttaggcacttgacatccatggatattcccgtaccactatcgcactggaagatgttgatgcatacaatgattcggaacggatggctaggagaggtggaattactttccttaaaactggccgactattttctcgaatccacatcctcgcgtccaggcttcattccattgtattttgaagatgtgccggcagccatgagagagcccgtttcgagcgtcgagaatctgatcggtatctatgtcccccaagacatcagcgtaaacaaccaatttcaccccctagggaaactattcaacttcaagttcctggatgagctcgttgactatgcattcgccccggtacataggagacatatagtgcaaagcgcgaatctcaacaagcggcatcatacacaagcgtcgcaaatcaaagctgttatccaactcctgcgcgcattacacaagaggggtgtacccctccacatgtggaaactaagagagttgatcagtcgacagctggttttactttacagcgtgagaattccacaaacagagaactacgaggctgcgacgcaaaaaagggcgcataatgtcttgacgttgaagcagatgatgagccacattacaacggcctgggataacagcgatatacaaatcttgcctagtaataggtactgggagtggtttctcaattctcaatctgctaatgcgcaagtcaaaatgaagagggacggcaaaagagctaacatggcccgcgaagagaaggcggagaagatagtgtaa

SEQ ID NO: 22690 - protein, 903 aa, Muscodor strobelii
  misc_feature: SGI Peptide ID NO. 567707
  misc_feature (292)..(809): NCBI GI: 261360813 Blast Desc: conserved [Verticillium albo-atrum VaMs.102]
  misc_feature (246)..(562): NCBI GI: 21622333 Blast Desc: [Neurospora crassa]
  misc_feature (276)..(713): NCBI GI: 256728663 Blast Desc: NECHADRAFT_51040 [Nectria haematococca mpVI 77-13-4]
  misc_feature (276)..(712): NCBI GI: 46110014 Blast Desc: FG01889.1 [Gibberella zeae PH-1]
  misc_feature (430)..(852): NCBI GI: 156033061 Blast Desc: SS1G_13606 [Sclerotinia sclerotiorum 1980] gi|154699009|gb|EDN98747.1| SS1G_13606 [Sclerotinia sclerotiorum 1980]
  misc_feature (230)..(860): NCBI GI: 67522799 Blast Desc: AN1856.2 [Aspergillus nidulans FGSC A4] gi|40745865|gb|EAA65021.1| AN1856.2 [Aspergillus nidulans FGSC A4] gi|259487208|tpe|CBF85699.1| TPA: conserved [Aspergillus FGSC
  misc_feature (435)..(887): NCBI GI: 85102116 Blast Desc: NCU04113 [Neurospora crassa OR74A] gi|28922812|gb|EAA32033.1| NCU04113 [Neurospora crassa OR74A]
  misc_feature (174)..(856): NCBI GI: 239613638 Blast Desc: conserved [Ajellomyces dermatitidis ER-3]
  misc_feature (174)..(856): NCBI GI: 261193028 Blast Desc: conserved [Ajellomyces dermatitidis SLH14081] gi|239589055|gb|EEQ71698.1| conserved [Ajellomyces dermatitidis SLH14081]
  misc_feature (222)..(438): NCBI GI: 85102116 Blast Desc: NCU04113 [Neurospora crassa OR74A] gi|28922812|gb|EAA32033.1| NCU04113 [Neurospora crassa OR74A]
MRLASRLWPHDVKLQRPILSVPSPLLLTSGSSNFSTQCQYGRRFLSTSRTIDLKWSPDAARAVVREPSLRRSRRRTRLRFTIPRSAYLLDDVDVVRTGAKNPTPHRYRHADQKLETTTASSISRHYIHRPLLAPFSSGLVSAQSIGRRLSRHLLDSGESSLRRVEPANPVVVVPATTSDVARPLGHRKALHRQARSGPRNRIRKPTVRAKSPVLKAYQFRRWKWLIRDSSRLNLESDLFPANHMSDNANRLLVDRFDNRGDFELWTALLEFQSRIHGAEGTALVWRGLWGRKSLYDVKHPLAPTFFRAMLEAALAATNDKMLEQVWIYSEWMLHMHGSRWPDLYTTVMAHMLKTHQHHKALSWQLRLSPQFYPGADVFAAMIKRFAIDKEFAGTDTLQSLYFMNRDHQLYETLIPYLFNLGESTLAKQWRDMCIKCMDGLFGIGVKNYDDKLGSRWFASSWVSLDMAISTVATLGIAQIGPLSIQSIGLRAQGSEEFSRRIRQLEEHSISPTDCGYNQLILYLANRKDNELLDDLLRSDLHPDVFDDLDLQTRLINNAAESGLDWRTLRLLLISQFVAFERSARTLSNDIVRTSYTRKDMPSLRNILEDMRTRHVPLDLEQAQFIFDSVLDEHKNGRQGITLRSAKFHIALFRHLTSMDIPVPLSHWKMLMHTMIRNGWLGEVELLSLKLADYFLESTSSRPGFIPLYFEDVPAAMREPVSSVENLIGIYVPQDISVNNQFHPLGKLFNFKFLDELVDYAFAPVHRRHIVQSANLNKRHHTQASQIKAVIQLLRALHKRGVPLHMWKLRELISRQLVLLYSVRIPQTENYEAATQKRAHNVLTLKQMMSHITTAWDNSDIQILPSNRYWEWFLNSQSANAQVKMKRDGKRANMAREEKAEKIV

SEQ ID NO: 22691 - DNA, 213 bp, Muscodor strobelii
  misc_feature: SGI cDNA ID NO. 567708
  misc_feature: Encodes the peptide sequence at SEQ ID NO 22692
atgggtctcatcgacgcccctaacaaggtgcctcaccaccagcgcttctaccagcaagcctacaacgcgcacacccgtctctggaagatcaacccccgatccaacatcatcttcgtcccctaccagatcgccctgtggggaaccttcggtgcttccatgtacatgatggctcgcaagatcgccggctacaacacctggttcggcaagaactaa

SEQ ID NO: 22692 - protein, 70 aa, Muscodor strobelii
  misc_feature: SGI Peptide ID NO. 567708
  misc_feature (1)..(70): NCBI GI: 171694245 Blast Desc: protein product [Podospora anserina] gi|170947071|emb|CAP73876.1| protein product [Podospora anserina]
  misc_feature (2)..(70): NCBI GI: 85102120 Blast Desc: NCU04114 [Neurospora crassa OR74A] gi|28922813|gb|EAA32034.1| [Neurospora crassa OR74A]
  misc_feature (1)..(67): NCBI GI: 256728481 Blast Desc: [Nectria haematococca mpVI 77-13-4]
  misc_feature (1)..(70): NCBI GI: 261360812 Blast Desc: [Verticillium albo-atrum VaMs.102]
  misc_feature (1)..(68): NCBI GI: 46110012 Blast Desc: FG01888.1 [Gibberella zeae PH-1]
  misc_feature (8)..(70): NCBI GI: 154301397 Blast Desc: [Botryotinia fuckeliana B05.10] gi|150856108|gb|EDN31300.1| [Botryotinia fuckeliana B05.10]
  misc_feature (1)..(69): NCBI GI: 39977981 Blast Desc: [Magnaporthe grisea 70-15] gi|145013560|gb|EDJ98201.1| [Magnaporthe grisea 70-15]
  misc_feature (7)..(70): NCBI GI: 156033063 Blast Desc: [Sclerotinia sclerotiorum 1980] gi|154699010|gb|EDN98748.1| [Sclerotinia sclerotiorum 1980]
  misc_feature (1)..(48): NCBI GI: 116198241 Blast Desc: CHGG_07276 [Chaetomium globosum CBS 148.51] gi|88178555|gb|EAQ86023.1| CHGG_07276 [Chaetomium globosum CBS 148.51]
  misc_feature (2)..(67): NCBI GI: 261193026 Blast Desc: conserved [Ajellomyces dermatitidis SLH14081] gi|239589054|gb|EEQ71697.1| conserved [Ajellomyces dermatitidis SLH14081] gi|239613637|gb|EEQ90624.1| conserved [Ajellomyces
MGLIDAPNKVPHHQRFYQQAYNAHTRLWKINPRSNIIFVPYQIALWGTFGASMYMMARKIAGYNTWFGKN

SEQ ID NO: 22693 - DNA, 5471 bp, Muscodor strobelii
  misc_feature: SGI EST ID NO. CUFF.53750.0
  misc_feature: Variant of the nucleotide sequence at SEQ ID NO 22691
cacgaagtgatgtttttaatacatttgagctgatattatacagtataattttctatatcgcgctgggtatcatataagtagtacttggaaatccttttgtacaaccaaatccggagtctatcgcccatccagatttcccccatgtctatgctgtacagtccaaaagcttacactatcttctccgccttctcttcgcgggccatgttagctcttttgccgtccctcttcattttgacttgcgcattagcagattgagaattgagaaaccactcccagtacctattactaggcaagatttgtatatcgctgttatcccaggccgttgtaatgtggctcatcatctgcttcaacgtcaagacattatgcgcccttttttgcgtcgcagcctcgtagttctctgtttgtggaattctcacgctgtaaagtaaaaccagctgtcgactgatcaactctcttagtttccacatgtggaggggtacacccctcttgtgtaatgcgcgcaggagttggataacagctttgatttgcgacgcttgtgtatgatgccgcttgttgagattcgcgctttgcactatatgtctcctatgtaccggggcgaatgcatagtcaacgagctcatccaggaacttgaagttgaatagtttccctagggggtgaaattggttgtttacgctgatgtcttgggggacatagataccgatcagattctcgacgctcgaaacgggctctctcatggctgccggcacatcttcaaaatacaatggaatgaagcctggacgcgaggatgtggattcgagaaaatagtcggccagttttaaggaaagtaattccacctctcctagccatccgttccgaatcattgtatgcatcaacatcttccagtgcgatagtggtacgggaatatccatggatgtcaagtgcctaaacagagcaatatggaatttcgccgagcgtaaggtgataccctgtctaccgtttttgtgttcgtctaaaacgctgtcaaagatgaattgagcctgctcaagatcaagtggaacatgtcgagttctcatatcctccaaaatattccgcaagcttggcatatctttcctggtgtaactggtccgcacaatgtcattcgagagagttcgggcggagcgctcaaaggccacaaattgcgagatgaggagaagtcgcaaggtacgccaatcgagaccactttctgccgcattgttgatcaggcgggtctgaaggtcaagatcgtcaaaaacgtcggggtgcaggtcactcctgagaaggtcgtcgaggagttcattatccttgcgattcgcaaggtaaagaatcaactgattatagccacagtctgtgggagaaatgctgtgctcttcgagctgacggatgcggcgtgaaaactcctctgagccttgagctcttaatcctatagattgaatcgagaggggtccaatctgggcaatgcccaatgttgccacagtcgatatggccatatcaagagaaacccatgaactcgcgaaccacctcgagccgagcttgtcatcgtagttcttgacgccgatgccaaaaagtccgtccatgcactcgattgaagaattcgcgagagaggtctggctgctgagtctcctcggcatgcccgtaaatggaatttactagcaggagttctttgcgagtcaatttagtagaggggagataggcttgaaggaatctcaaaaatggacggacgggtgccggattggatgggaaatcgccaaccttgatgcacatatcgcgccactgcttagctagcgtagattctccgaggttgaacagataaggaataagcgtctcgtagagctgatgatctcgattcatgaaatagagactttgcagcgtgtctgttccagcaaactccttgtcgatagcgaatcgcttgatcattgctgcaaaaacatcggcgccggggtagaattgaggtgacagacgcagttgccatgatagagctttatgatgttggtgggtttttagcatatgagccatgactgttgtgtaaagatccggccacctagacccatgcatgtgcagcatccattcgctatagatccaaacttgctccagcatcttatcattagttgctgcgagggcagcctccagcatggcacggaaaaaggtaggggccagcgggtgcttcacgtcatacaaggacttccggccccagagacctctccagacgagagcggtcccctcagccccatggattcgcgactgaaactctaggagagcagtccatagttcgaaatcgccacgattgtcaaatcggtcgaccagcaggcggttcgcattgtcactcatatggttagctggaaacaagtcggactcgaggttgagtcgggacgagtctcggatgagccatttccatcttctgaattgataggctttcaagacaggcgatttcgctctcacagtgggcttgcggatcctatttcggggtccggatcgggcttgacgatgcagggcttttctgtgcccaagtggtcgggctacatcggacgtcgtggcgggaactacgacgacaggatttgcaggttccacgcgtctcaaagagctttcgcccgagtcaagtaagtgtctactcaatctacgcccaatagactgagcggatactagaccagaggaaaagggagcgagcaatggtctgtggatgtagtggcgcgagatagaggatgcggtagtagtttcgagcttctggtctgcatgtcggtagcggtgaggcgtaggatttttagcaccagtccgtacaacatcaacatcatctagaagatatgcagaacggggaatggtgaatcgcaatctcgtccgacggcgcgagcgcctgagcgatggttctctcactacggccctagcagcgtcggggctccatttcaggtcgatggtacgagacgtcgacaggaagcgtcggccatattgacattgcgttgagaagttcgagctcccagacgtgagcagaagaggacttgggacggagaggataggtcgctgcagcttcacatcatgtggccataatcgactcgccaatcgcattactgcagactgggtgacatgccaggaggcctctacgaagatgagagacgaaagtgtgccttaacaaacatggggatggacattgagggtattcgagttggacctcgaaatgtcacgttcaagaaaaaagtatggagatagcattgatagctgcactactaccaaagttagcggcaggggtctcatgcttacataacacatgcaatgcaggcaattgcacttgattgcttggcctcaccttcccctgcggctcctaggtagagcttttcacccgaagaaagcgcgcttagtcacctctcagcatcgaaagatccccagccaatcaggcaacgcccgtcaccagtccagtccaagaacgtctgatctctgaatccagctccaaaccaccgaacaagctccaaaccacacctcaccacagctcaccacccgactaaccttccactccaaacacacaatccgtcaccatgggtctcatcgacgcccctaacaaggtgcctcaccaccagcgcttctaccagcaagcctacaacgcgcacacccgtctctggaagatcaacccccgatccaacatcatcttcgtcccctaccagatcgccctgtggggaaccttcggtgcttccatgtacatgatggctcgcaagatcgccggctacaacacctggttcggcaagaactaagctttttaccgacgaggacgatgaagcattcaggggatagagacgggggacgagacagggagagagtcatgcagcataggtgtctaccacgtgttttattaggtcaaacatagacaaattcgttcatacgcaacgttccacatatccctaccacgatattctgtctatcccttgttttgcctgtgataccaaccactctcagagactccaactgcggcctagatatgggaagacaagtcatcgtgccagcgacggctgcgatatgtatattgatatgcgacactagctgatctgcaatctatacttcggataggcagatcacaaggtcgtgatctggttagctggtatcacgcaggccattcgtttgttagtcgcgaattatccatgggctcgtaatgcatcgcagttcttacgagcaccatcgtcatcgtgcagacttcccacagagaaaaagacatttgggttgtagtatgaaggtgatattaccaattttgtccatgacctaggccttgcgcctactgccataccctgtgtacctttttcgcatggctagtctaaaatacaagcttcgttcgtctcatctgtgttgggctaggcaaaacaaccagtttagtcaagcctcatcaactttgtccgtatgtatgtgcaatgcaattcgtcatgtcatgagagtatccgcttagtagccctcagagccaggcgccttctcatccttccgcagtgacgtcaagagctctcggaagcgctccttgcccgagccactagcaccgcccttctggcccttcccactaacatcgaccagcttggcgatgcgctcccagctcgtgcctccggacgtcgtgtcgtcgcggctggcgaggaactgctcggcgtccttgcgcgaggcggtgatggtcttctccttcttgttgttgtagttctcgtagaagtcgtcgatgttctgctgcgcctccttgatcgtctcgtccttctgggccgcgaactcctgcgcccgcttctcgttgccggcgtcgcgcttctcgcgccagttcttgatcacttcgggctcttcctcttcctctgcgtaggcggcgtagccggagttgtagtttacggatgggccgccggtgatggtctcttgctgtggtccgtttgttagaaactcattctggttgagaggggtccgatctggaaatatacctcaggagaagtaatatcgggaaattggctgttgaactgtgcactgcctgagacatcgcctcctccgagtaggtcatctgagttgccaccaagagcagctgactcgttgccggtggtgaactgggaggcatcctcgccaaggagggctcgctcgcgggtaaggaagtcatcggcggaaggagagccaacttctttgatgtcggtctgggctataaacccgggaaattatcagcgagacttcatgcagggcaatgcgatgcctgggtgcctacttaccacccgaatcgaagtcgtctaaagacgggaatcggtctgccatgttgggcgttgggaactgagaaagcggcgggttccagtgtgtcttgtaattggaagtggctgaatgagagaccggcgtggtgggaatgtcgccgatcgtgaattctagagcgtatttggattggattgatggcgtggtttgttacctagcaaacgtcgaagtcgcaaaccgacatccaggagaagtgtacacctgcagttgcagtgacttacagtgtctgacgtactttctccagcactgtaaca

SEQ ID NO: 22694 - DNA, 693 bp, Muscodor strobelii
  misc_feature: SGI cDNA ID NO. 567709
  misc_feature: Reduced expression when VOC is produced
  misc_feature: Encodes the peptide sequence at SEQ ID NO 22695
atggcagaccgattcccgtctttagacgacttcgattcgggtgcccagaccgacatcaaagaagttggctctccttccgccgatgacttccttacccgcgagcgagccctccttggcgaggatgcctcccagttcaccaccggcaacgagtcagctgctcttggtggcaactcagatgacctactcggaggaggcgatgtctcaggcagtgcacagttcaacagccaatttcccgatattacttctcctgagcaagagaccatcaccggcggcccatccgtaaactacaactccggctacgccgcctacgcagaggaagaggaagagcccgaagtgatcaagaactggcgcgagaagcgcgacgccggcaacgagaagcgggcgcaggagttcgcggcccagaaggacgagacgatcaaggaggcgcagcagaacatcgacgacttctacgagaactacaacaacaagaaggagaagaccatcaccgcctcgcgcaaggacgccgagcagttcctcgccagccgcgacgacacgacgtccggaggcacgagctgggagcgcatcgccaagctggtcgatgttagtgggaagggccagaagggcggtgctagtggctcgggcaaggagcgcttccgagagctcttgacgtcactgcggaaggatgagaaggcgcctggctctgagggctactaa

SEQ ID NO: 22695 - protein, 230 aa, Muscodor strobelii
  misc_feature: SGI Peptide ID NO. 567709
  misc_feature (1)..(227): Pfam Id: PF01086 Pfam Desc: Clathrin light chain
  misc_feature (98)..(227): Pfam Id: PF01086 Pfam Desc: Clathrin light chain
  misc_feature (1)..(230): NCBI GI: 256728664 Blast Desc: NECHADRAFT_85832 [Nectria haematococca mpVI 77-13-4]
  misc_feature (1)..(230): NCBI GI: 171694247 Blast Desc: protein product [Podospora anserina] gi|170947072|emb|CAP73877.1| protein product [Podospora anserina]
  misc_feature (1)..(230): NCBI GI: 261360811 Blast Desc: clathrin light chain [Verticillium albo-atrum VaMs.102]
  misc_feature (1)..(230): NCBI GI: 116198239 Blast Desc: CHGG_07275 [Chaetomium globosum CBS 148.51] gi|88178554|gb|EAQ86022.1| CHGG_07275 [Chaetomium globosum CBS 148.51]
  misc_feature (1)..(229): NCBI GI: 85102124 Blast Desc: NCU04115 [Neurospora crassa OR74A] gi|21622334|emb|CAD36975.1| conserved [Neurospora crassa] gi|28922814|gb|EAA32035.1| NCU04115 [Neurospora crassa OR74A]
  misc_feature (1)..(230): NCBI GI: 145605766 Blast Desc: MGG_06876 [Magnaporthe grisea 70-15] gi|145013559|gb|EDJ98200.1| MGG_06876 [Magnaporthe grisea 70-15]
  misc_feature (1)..(230): NCBI GI: 156033067 Blast Desc: SS1G_13609 [Sclerotinia sclerotiorum 1980] gi|154699012|gb|EDN98750.1| SS1G_13609 [Sclerotinia sclerotiorum 1980]
  misc_feature (1)..(230): NCBI GI: 242807165 Blast Desc: clathrin light chain [Talaromyces stipitatus ATCC 10500] gi|218715522|gb|EED14944.1| clathrin light chain [Talaromyces stipitatus ATCC 10500]
  misc_feature (1)..(230): NCBI GI: 67523187 Blast Desc: AN2050.2 [Aspergillus nidulans FGSC A4] gi|40745726|gb|EAA64882.1| AN2050.2 [Aspergillus nidulans FGSC A4] gi|259487418|tpe|CBF86080.1| TPA: clathrin light chain FGSC
  misc_feature (1)..(230): NCBI GI: 121707575 Blast Desc: clathrin light chain [Aspergillus clavatus NRRL 1] gi|119400026|gb|EAW10452.1| clathrin light chain [Aspergillus clavatus NRRL 1]
  misc_feature: Useful for introducing or modulating the production of volatile compounds
MADRFPSLDDFDSGAQTDIKEVGSPSADDFLTRERALLGEDASQFTTGNESAALGGNSDDLLGGGDVSGSAQFNSQFPDITSPEQETITGGPSVNYNSGYAAYAEEEEEPEVIKNWREKRDAGNEKRAQEFAAQKDETIKEAQQNIDDFYENYNNKKEKTITASRKDAEQFLASRDDTTSGGTSWERIAKLVDVSGKGQKGGASGSGKERFRELLTSLRKDEKAPGSEGY

SEQ ID NO: 22696 - DNA, 5664 bp, Muscodor strobelii
  misc_feature: SGI EST ID NO. CUFF.53751.1
  misc_feature: Variant of the nucleotide sequence at SEQ ID NO 22694
gatggatgcaacttggcaagtgcaagcagagttgcaaggctgcacttctggcccctgttacagtgctggagaaagtacgtcagacactgtaagtcactgcaactgcaggtgtacacttctcctggatgtcggtttgcgacttcgacgtttgctaggtaacaaaccacgccatcaatccaatccaaatacgctctagaattcacgatcggcgacattcccaccacgccggtctctcattcagccacttccaattacaagacacactggaacccgccgctttctcagttcccaacgcccaacatggcagaccgattcccgtctttagacgacttcgattcgggtgcccagaccgacatcaaagaagttggctctccttccgccgatgacttccttacccgcgagcgagccctccttggcgaggatgcctcccagttcaccaccggcaacgagtcagctgctcttggtggcaactcagatgacctactcggaggaggcgatgtctcaggcagtgcacagttcaacagccaatttcccgatattacttctcctgagcaagagaccatcaccggcggcccatccgtaaactacaactccggctacgccgcctacgcagaggaagaggaagagcccgaagtgatcaagaactggcgcgagaagcgcgacgccggcaacgagaagcgggcgcaggagttcgcggcccagaaggacgagacgatcaaggaggcgcagcagaacatcgacgacttctacgagaactacaacaacaagaaggagaagaccatcaccgcctcgcgcaaggacgccgagcagttcctcgccagccgcgacgacacgacgtccggaggcacgagctgggagcgcatcgccaagctggtcgatgttagtgggaagggccagaagggcggtgctagtggctcgggcaaggagcgcttccgagagctcttgacgtcactgcggaaggatgagaaggcgcctggctctgagggctactaagcggatactctcatgacatgacgaattgcattgcacatacatacggacaaagttgatgaggcttgactaaactggttgttttgcctagcccaacacagatgagacgaacgaagcttgtattttagactagccatgcgaaaaaggtacacagggtatggcagtaggcgcaaggcctaggtcatggacaaaattggtaatatcaccttcatactacaacccaaatgtctttttctctgtgggaagtctgcacgatgacgatggtgctcgtaagaactgcgatgcattacgagcccatggataattcgcgactaacaaacgaatggcctgcgtgataccagctaaccagatcacgaccttgtgatctgcctatccgaagtatagattgcagatcagctagtgtcgcatatcaatatacatatcgcagccgtcgctggcacgatgacttgtcttcccatatctaggccgcagttggagtctctgagagtggttggtatcacaggcaaaacaagggatagacagaatatcgtggtagggatatgtggaacgttgcgtatgaacgaatttgtctatgtttgacctaataaaacacgtggtagacacctatgctgcatgactctctccctgtctcgtcccccgtctctatcccctgaatgcttcatcgtcctcgtcggtaaaaagcttagttcttgccgaaccaggtgttgtagccggcgatcttgcgagccatcatgtacatggaagctatgtatcgagtggtcagcgtcggaaaatggcgcatagaggggggttcgggtgggttacgcaccaccgaaggttccccacagggcgatctggtaggggacgaagatgatgttggatcgggggttctgcgtgatattttgtgtcagtcgggcggatggaatcggggtgaacgaagatgggcgagccgtacgatcttccagagacgggtgtgcgcgttgtaggcttgctggtagaagcgctggtggtgaggcaccttgttaggggcgtcgatgagactggtgatgcgtgatgcgttagccttcgttcgtaatggttcaatcttgtcatggctttagggttcaaggtgcagccattgagtcgcatctcgaggcgtttaggggctttgagctatttggagagagttgacataccccatggtgacggattgtgtgtttggagtggaaggttagtcgggtggtgagctgtggtgaggtgtggtttggagcttgttcggtggtttggagctggattcagagatcagacgttcttggactggactggtgacgggcgttgcctgattggctggggatctttcgatgctgagaggtgactaagcgcgctttcttcgggtgaaaagctctacctaggagccgcaggggaaggtgaggccaagcaatcaagtgcaattgcctgcattgcatgtgttatgtaagcatgagacccctgccgctaactttggtagtagtgcagctatcaatgctatctccatacttttttcttgaacgtgacatttcgaggtccaactcgaataccctcaatgtccatccccatgtttgttaaggcacactttcgtctctcatcttcgtagaggcctcctggcatgtcacccagtctgcagtaatgcgattggcgagtcgattatggccacatgatgtgaagctgcagcgacctatcctctccgtcccaagtcctcttctgctcacgtctgggagctcgaacttctcaacgcaatgtcaatatggccgacgcttcctgtcgacgtctcgtaccatcgacctgaaatggagccccgacgctgctagggccgtagtgagagaaccatcgctcaggcgctcgcgccgtcggacgagattgcgattcaccattccccgttctgcatatcttctagatgatgttgatgttgtacggactggtgctaaaaatcctacgcctcaccgctaccgacatgcagaccagaagctcgaaactactaccgcatcctctatctcgcgccactacatccacagaccattgctcgctcccttttcctctggtctagtatccgctcagtctattgggcgtagattgagtagacacttacttgactcgggcgaaagctctttgagacgcgtggaacctgcaaatcctgtcgtcgtagttcccgccacgacgtccgatgtagcccgaccacttgggcacagaaaagccctgcatcgtcaagcccgatccggaccccgaaataggatccgcaagcccactgtgagagcgaaatcgcctgtcttgaaagcctatcaattcagaagatggaaatggctcatccgagactcgtcccgactcaacctcgagtccgacttgtttccagctaaccatatgagtgacaatgcgaaccgcctgctggtcgaccgatttgacaatcgtggcgatttcgaactatggactgctctcctagagtttcagtcgcgaatccatggggctgaggggaccgctctcgtctggagaggtctctggggccggaagtccttgtatgacgtgaagcacccgctggcccctacctttttccgtgccatgctggaggctgccctcgcagcaactaatgataagatgctggagcaagtttggatctatagcgaatggatgctgcacatgcatgggtctaggtggccggatctttacacaacagtcatggctcatatgctaaaaacccaccaacatcataaagctctatcatggcaactgcgtctgtcacctcaattctaccccggcgccgatgtttttgcagcaatgatcaagcgattcgctatcgacaaggagtttgctggaacagacacgctgcaaagtctctatttcatgaatcgagatcatcagctctacgagacgcttattccttatctgttcaacctcggagaatctacgctagctaagcagtggcgcgatatgtgcatcaaggttggcgatttcccatccaatccggcacccgtccgtccatttttgagattccttcaagcctatctcccctctactaaattgactcgcaaagaactcctgctagtaaattccatttacgggcatgccgaggagactcagcagccagacctctctcgcgaattcttcaatcgagtgcatggacggactttttggcatcggcgtcaagaactacgatgacaagctcggctcgaggtggttcgcgagttcatgggtttctcttgatatggccatatcgactgtggcaacattgggcattgcccagattggacccctctcgattcaatctataggattaagagctcaaggctcagaggagttttcacgccgcatccgtcagctcgaagagcacagcatttctcccacagactgtggctataatcagttgattctttaccttgcgaatcgcaaggataatgaactcctcgacgaccttctcaggagtgacctgcaccccgacgtttttgacgatcttgaccttcagacccgcctgatcaacaatgcggcagaaagtggtctcgattggcgtaccttgcgacttctcctcatctcgcaatttgtggcctttgagcgctccgcccgaactctctcgaatgacattgtgcggaccagttacaccaggaaagatatgccaagcttgcggaatattttggaggatatgagaactcgacatgttccacttgatcttgagcaggctcaattcatctttgacagcgttttagacgaacacaaaaacggtagacagggtatcaccttacgctcggcgaaattccatattgctctgtttaggcacttgacatccatggatattcccgtaccactatcgcactggaagatgttgatgcatacaatgattcggaacggatggctaggagaggtggaattactttccttaaaactggccgactattttctcgaatccacatcctcgcgtccaggcttcattccattgtattttgaagatgtgccggcagccatgagagagcccgtttcgagcgtcgagaatctgatcggtatctatgtcccccaagacatcagcgtaaacaaccaatttcaccccctagggaaactattcaacttcaagttcctggatgagctcgttgactatgcattcgccccggtacataggagacatatagtgcaaagcgcgaatctcaacaagcggcatcatacacaagcgtcgcaaatcaaagctgttatccaactcctgcgcgcattacacaagaggggtgtacccctccacatgtggaaactaagagagttgatcagtcgacagctggttttactttacagcgtgagaattccacaaacagagaactacgaggctgcgacgcaaaaaagggcgcataatgtcttgacgttgaagcagatgatgagccacattacaacggcctgggataacagcgatatacaaatcttgcctagtaataggtactgggagtggtttctcaattctcaatctgctaatgcgcaagtcaaaatgaagagggacggcaaaagagctaacatggcccgcgaagagaaggcggagaagatagtgtaagcttttggactgtacagcatagacatgggggaaatctggatgggcgatagactccggatttggttgtacaaaaggatttccaagtactacttatatgatacccagcgcgatatagaaaattatactgtataatatcagctcaaatgtattaaaaacatcacttcgtg

SEQ ID NO: 22697 - DNA, 1176 bp, Muscodor strobelii
  misc_feature: SGI cDNA ID NO. 567710
  misc_feature: Encodes the peptide sequence at SEQ ID NO 22698
atggcatacaacgacgatgccgtgctggctaagctctcgtctctgtccgagacgcaggatagcatcgtcagcgtgtcccagtggatcatgttctacaggcgtcatgcagaccgcaccgtccagctctggctgcagaagctcaaggattgctccagccacaaacgtctgagtctcctctatcttgccaatgaagttgctcagcagtccaaggcccgcaggaaagaagaattcctcacggccttttctcccgctattgccgaggctgtttctgttgcttacaagggcgcaccgcaagacatacagcagagaatccgaagggttgtcgatgtctggagagagcgcagcatcttcgaggagcctatccaagcagcagtcgagggccgacttcaagatcttgaaaaggcgcgcagtaccgccaagagcggattgggtggcggtggctccatcttcgcttccgcatcaccttcgacaccctctgaattggtgtctcttgtcaagcctcagcaaaatgtttccaagctgcttttcagcactaagaccgcggtgaaatctgccaatgcagactacgatgccctcatgggacctggcagcagtgctccatcagcaccagtctacgctgctcgcctcaacggcctgctcaagacactggcccaggccgagggcgcagtggagcaatgtgtcaaggcacgccgagatctcgtcaacgagctccagaagattctggacacaaacaggactgccctcatagcagaagagaatgacatggagacattcatggagaaaaaggccaaggtggaggataagaaaaccgaggtcgaacgcgctatcatggccggtttgcctaacgacgagccctatgtcactggtaacaaccaacacgagcaggccatggaagagcccgatgcgcccgaaattgaggctctgactcctccgtccaacgatgaagacttcgagccttctccgaacaagtctgccccggaattctccccgaacgtccctcccgaggctaccttccagtccactgttgtctcgcctccacacaagtcggttgcaaccgggtcgaatgggtctaagaggcggcggcttgacgatgatgagttcccgggcttgggtggtgatgatgggattgattccgatgtggctgagatgctgcgtaaggacagcaatagtaactga

SEQ ID NO: 22698 - protein, 391 aa, Muscodor strobelii
  misc_feature: SGI Peptide ID NO. 567710
  misc_feature (52)..(118): Pfam Id: PF04818 Pfam Desc: Domain of function, DUF618
  misc_feature (1)..(390): NCBI GI: 156033065 Blast Desc: SS1G_13608 [Sclerotinia sclerotiorum 1980] gi|154699011|gb|EDN98749.1| SS1G_13608 [Sclerotinia sclerotiorum 1980]
  misc_feature (1)..(388): NCBI GI: 154301393 Blast Desc: BC1G_10366 [Botryotinia fuckeliana B05.10] gi|150856106|gb|EDN31298.1| BC1G_10366 [Botryotinia fuckeliana B05.10]
  misc_feature (1)..(390): NCBI GI: 256728482 Blast Desc: [Nectria haematococca mpVI 77-13-4]
  misc_feature (1)..(390): NCBI GI: 46110008 Blast Desc: FG01886.1 [Gibberella zeae PH-1]
  misc_feature (1)..(389): NCBI GI: 261360810 Blast Desc: DUF618 domain-containing protein [Verticillium albo-atrum VaMs.102]
  misc_feature (1)..(388): NCBI GI: 116198237 Blast Desc: CHGG_07274 [Chaetomium globosum CBS 148.51] gi|88178553|gb|EAQ86021.1| CHGG_07274 [Chaetomium globosum CBS 148.51]
  misc_feature (1)..(387): NCBI GI: 145605764 Blast Desc: MGG_06877 [Magnaporthe grisea 70-15] gi|145013558|gb|EDJ98199.1| MGG_06877 [Magnaporthe grisea 70-15]
  misc_feature (1)..(389): NCBI GI: 240110622 Blast Desc: CPC735_040440 [Coccidioides posadasii C735 delta SOWgp]
  misc_feature (1)..(389): NCBI GI: 119196083 Blast Desc: CIMG_02416 [Coccidioides immitis RS]
  misc_feature (1)..(389): NCBI GI: 85102128 Blast Desc: NCU04116 [Neurospora crassa OR74A] gi|21622335|emb|CAD36976.1| conserved [Neurospora crassa] gi|28922815|gb|EAA32036.1| [Neurospora crassa OR74A]
MAYNDDAVLAKLSSLSETQDSIVSVSQWIMFYRRHADRTVQLWLQKLKDCSSHKRLSLLYLANEVAQQSKARRKEEFLTAFSPAIAEAVSVAYKGAPQDIQQRIRRVVDVWRERSIFEEPIQAAVEGRLQDLEKARSTAKSGLGGGGSIFASASPSTPSELVSLVKPQQNVSKLLFSTKTAVKSANADYDALMGPGSSAPSAPVYAARLNGLLKTLAQAEGAVEQCVKARRDLVNELQKILDTNRTALIAEENDMETFMEKKAKVEDKKTEVERAIMAGLPNDEPYVTGNNQHEQAMEEPDAPEIEALTPPSNDEDFEPSPNKSAPEFSPNVPPEATFQSTVVSPPHKSVATGSNGSKRRRLDDDEFPGLGGDDGIDSDVAEMLRKDSNSN

SEQ ID NO: 22699 - DNA, 2197 bp, Muscodor strobelii
  misc_feature: SGI EST ID NO. CUFF.53272.0
  misc_feature: Variant of the nucleotide sequence at SEQ ID NO 22697
ctttcttgtacctccattgttgatataagtctcccactcaatcgtcttcatctatgtctttctgcttcattgcaagttgccagcacatctcagacgattgcctatcagcgtcaggctgatactggttttagatataaattcgacaatcatactaactcattgccattcagtcgctctacgacatcaagctagctagcctctcagacccacccaggattcgtccaactttgtttatcaactagaagagtatcgggaagggtttcgtcgaacaggctgtcatcgttgccaatcaatgcctcatcttgtttcatagcatactcctagagtcgctgctgtgggcctgaaggcatttcaaagtacctagttagcttatctgccgcgcattactctgttccatcttgatgcgcaaagcctctgcgacaccaccacgtagattgttgatctgagtctgtcaacttgagtgaaccagcactgcaaacgtatttgcagataggcatactcaaggtttgagcgcggcacgcggcacatcctattacactctcttcgcgttcgtcaagcagaccacgcttatataccccaacctccatctgtcgcaatggcatacaacgacgatgccgtgctggctaagctctcgtctctgtccgagacgcaggatagcatcgtcagcgtgtcccagtggatcatgttctacaggcgtcatgcagaccgcaccgtccagctctggctgcagaagctcaaggattgctccagccacaaacgtctgagtctcctctatcttgccaatgaagttgctcagcagtccaaggcccgcaggaaagaagaattcctcacggccttttctcccgctattgccgaggctgtttctgttgcttacaagggcgcaccgcaagacatacagcagagaatccgaagggttgtcgatgtctggagagagcgcagcatcttcgaggagcctatccaagcagcagtcgagggccgacttcaagatcttgaaaaggcgcgcagtaccgccaagagcggattgggtggcggtggctccatcttcgcttccgcatcaccttcgacaccctctgaattggtgtctcttgtcaagcctcagcaaaatgtttccaagctgcttttcagcactaagaccgcggtgaaatctgccaatgcagactacgatgccctcatgggacctggcagcagtgctccatcagcaccagtctacgctgctcgcctcaacggcctgctcaagacactggcccaggccgagggcgcagtggagcaatgtgtcaaggcacgccgagatctcgtcaacgagctccagaagattctggacacaaacaggactgccctcatagcagaagagaatgacatggagacattcatggagaaaaaggccaaggtggaggataagaaaaccgaggtcgaacgcgctatcatggccggtttgcctaacgacgagccctatgtcactggtaacaaccaacacgagcaggccatggaagagcccgatgcgcccgaaattgaggctctgactcctccgtccaacgatgaagacttcgagccttctccgaacaagtctgccccggaattctccccgaacgtccctcccgaggctaccttccagtccactgttgtctcgcctccacacaagtcggttgcaaccgggtcgaatgggtctaagaggcggcggcttgacgatgatgagttcccgggcttgggtggtgatgatgggattgattccgatgtggctgagatgctgcgtaaggacagcaatagtaactgatctgtctgaaagtgtggaggaatattgatcttactctaaacggagtggggtttttcatggaaagagattcatgagggtctaggattgaagaagttcatggcttcattattctgtacagtatactcttgtctcgacctacttcacttggctcttgagccgctgcgttgtactacagttccagctttcttaggcagccaccatccgctttacgatgctctctagtactacggctctcttgcattgtttgcgagacttcgtctcataagagaatgaaattttttcctattcaacaatcgagcaggagttttgtctatcgccttttcgattgtttgatgagatcgaggcggaattgatatttgattcagtaaaggggaggaattccatagtgtctgtaagaatggcagcaggatagatattatattattc

SEQ ID NO: 22700 - DNA, 660 bp, Muscodor strobelii
  misc_feature: SGI cDNA ID NO. 567711
  misc_feature: Encodes the peptide sequence at SEQ ID NO 22701
atgaccgaacaaccaccctcctacgtaccgttaagcgaagtcgtcatagacgatccagccgaaaatacatccgagcctacagccgagcctacaatccaaaggacagtccaacagatcgaagaaacagaaggaacggtctattctaagcagccttcgaaagagtctcaattagagaacagaatctgcaatgctgtcttcgttattgcatttctgacgtttttcactgggcttggcacctacggagtcgcaaaatataagggcgtggggaatgcagcgggcctagttcttgctgtcgtttccttcacgattctcggtctctccgtttgtaccacggggattatagcagcgacgaatactccatccgccatggccgaacaaccacccgcctacgcgagagatgttccaaatgcgaaaccggagcccataggcgaacagacggctccctcggtccaacctacacgatcatcagcgcgacctcgcgagagcatggatccagtcgaccctgtcctggctttatttttctatattttcctcgccctagacttagcgatcggggcttgggcacttgcaagctactttggtgttgaaggggccgaacttctttctattgcttttttctgcttctcctttcctattctcgccggctatatcaagttgtag

SEQ ID NO: 22701 - protein, 219 aa, Muscodor strobelii
  misc_feature: SGI Peptide ID NO. 567711
MTEQPPSYVPLSEVVIDDPAENTSEPTAEPTIQRTVQQIEETEGTVYSKQPSKESQLENRICNAVFVIAFLTFFTGLGTYGVAKYKGVGNAAGLVLAVVSFTILGLSVCTTGIIAATNTPSAMAEQPPAYARDVPNAKPEPIGEQTAPSVQPTRSSARPRESMDPVDPVLALFFYIFLALDLAIGAWALASYFGVEGAELLSIAFFCFSFPILAGYIKL

SEQ ID NO: 22702 - DNA, 1116 bp, Muscodor strobelii
  misc_feature: SGI cDNA ID NO. 567712
  misc_feature: Encodes the peptide sequence at SEQ ID NO 22703
atgccgcaatcaccacagacgccgcgccattcgcggcactcgactatcgacacaggctattcctacggcagtcccaacacatctcccatagcgcatcgccagtccagatcctctttcaacgaacccctgactcctcttcgaagcagtatgaacgagaatgagctgcgcgacctcggtggcatggacaacggtctgggaaacttggcagatgagcttgccgatgcactatctggttcaggcgacgaaggcgactactacgaggacgattatgagaatcaggaggctgtgcaagagaatggcgaaggcatcacaaataatggtgtagcagagctacctaacaggaccaagggctctggtctgagtgttccatcaccaaatggtcgcggtcaccgtcgcacaggtagtgcctacgacggaagtgaatacggctcggaatcggatctagagtcacctggaatgccacccagcttggtcgccaagatcgatgcggtagagtctttagctcggagaggcactgaagctactggcggaccggcggatggcgtgttcaagcgtgtcacagatggactgagggaccttggttcccagtctgctgttgaaggtagcaccacaagattaatcacggctcattccgctctggcatcacatcttacacatcagacgaggcaactccacaacctcacatatcctctcctgtcgcctctcgtcgctccccccgacccagaaaccatcgatgcgctgctgccagtcctcacttccgtctcccaagacatgccgcgacccgccacatccgcattcgactcactagccgcactgcactctgtcacctccgatctagttcacaccctaaactacctatcagacactctccacatgtcacggcagacgacaacaacagctacccgcagattaagaacagcaaaggaaatggtatcagaaatgaagcgagaggaggaactcaaagaagagggtgagaggtggctaaccaagggaaactggggcgagagactacagaatcgcgaatgcgccggtgtttgcagggatgtagttggtggcttcgaggaagtctgtaatggttggcgggcacgtttattggcacaggctgaatcagcttga

SEQ ID NO: 22703 - protein, 371 aa, Muscodor strobelii
  misc_feature: SGI Peptide ID NO. 567712
  misc_feature (1)..(370): NCBI GI: 46110050 Blast Desc: FG01907.1 [Gibberella zeae PH-1]
  misc_feature (1)..(370): NCBI GI: 256728471 Blast Desc: [Nectria haematococca mpVI 77-13-4]
  misc_feature (7)..(369): NCBI GI: 171692167 Blast Desc: protein product [Podospora anserina] gi|170946032|emb|CAP72833.1| protein product [Podospora anserina]
  misc_feature (1)..(365): NCBI GI: 39972429 Blast Desc: MGG_07516 [Magnaporthe grisea 70-15] gi|145016712|gb|EDK01142.1| MGG_07516 [Magnaporthe grisea 70-15]
  misc_feature (2)..(367): NCBI GI: 85099323 Blast Desc: NCU01277 [Neurospora crassa OR74A] gi|28922276|gb|EAA31519.1| [Neurospora crassa OR74A] gi|38566808|emb|CAE76116.1| [Neurospora crassa]
  misc_feature (1)..(368): NCBI GI: 154312874 Blast Desc: BC1G_05138 [Botryotinia fuckeliana B05.10] gi|150849840|gb|EDN25033.1| BC1G_05138 [Botryotinia fuckeliana B05.10]
  misc_feature (4)..(367): NCBI GI: 116206590 Blast Desc: CHGG_02588 [Chaetomium globosum CBS 148.51] gi|88183185|gb|EAQ90653.1| CHGG_02588 [Chaetomium globosum CBS 148.51]
  misc_feature (1)..(286): NCBI GI: 261360805 Blast Desc: conserved [Verticillium albo-atrum VaMs.102]
  misc_feature (2)..(365): NCBI GI: 242803059 Blast Desc: conserved [Talaromyces stipitatus ATCC 10500] gi|218717442|gb|EED16863.1| conserved [Talaromyces stipitatus ATCC 10500]
  misc_feature (2)..(365): NCBI GI: 212540022 Blast Desc: conserved [Penicillium marneffei ATCC 18224] gi|210067465|gb|EEA21557.1| conserved [Penicillium marneffei ATCC 18224]
MPQSPQTPRHSRHSTIDTGYSYGSPNTSPIAHRQSRSSFNEPLTPLRSSMNENELRDLGGMDNGLGNLADELADALSGSGDEGDYYEDDYENQEAVQENGEGITNNGVAELPNRTKGSGLSVPSPNGRGHRRTGSAYDGSEYGSESDLESPGMPPSLVAKIDAVESLARRGTEATGGPADGVFKRVTDGLRDLGSQSAVEGSTTRLITAHSALASHLTHQTRQLHNLTYPLLSPLVAPPDPETIDALLPVLTSVSQDMPRPATSAFDSLAALHSVTSDLVHTLNYLSDTLHMSRQTTTTATRRLRTAKEMVSEMKREEELKEEGERWLTKGNWGERLQNRECAGVCRDVVGGFEEVCNGWRARLLAQAESA

SEQ ID NO: 22704 - DNA, 1954 bp, Muscodor strobelii
  misc_feature: SGI EST ID NO. CUFF.53285.0
  misc_feature: Variant of the nucleotide sequence at SEQ ID NO 22702
ccgccgtgaggtaataactcagggtcgaatttttgagatttgcatctacacactccttattatcgcggtcgtgccttgtccagtgatttgcttgtgcttttgttcctgttgttcttgctttgctcagtataggtaatcagagaagtcattcagctaaagcgcaccacgcgactagcctaccacgtttctaatcgactcgaggaacaacgcattaggagatacccacacttatactgacttgtcatttaatttggccctcgcgccttctacaccagctcaactatagatgcaagcattgtcttatagctctgcgattcctgcctcaaacgtgcttttctaaaccgcgtagctgtcatagcaaccggtcgccatcgtttgcacgtaccttggaacaaagcaccactagtgctctctatctcagccatcccgctccccccctcgccgagtacaaagcaaacagcgatcttgctctgcttgcaagttctcgagttcccgtttgcgctcgttggtttttccatcgcgtcgaccatctccacgacaccctccctcccttgcgccaccatgccgcaatcaccacagacgccgcgccattcgcggcactcgactatcgacacaggctattcctacggcagtcccaacacatctcccatagcgcatcgccagtccagatcctctttcaacgaacccctgactcctcttcgaagcagtatgaacgagaatgagctgcgcgacctcggtggcatggacaacggtctgggaaacttggcagatgagcttgccgatgcactatctggttcaggcgacgaaggcgactactacgaggacgattatgagaatcaggaggctgtgcaagagaatggcgaaggcatcacaaataatggtgtagcagagctacctaacaggaccaagggctctggtctgagtgttccatcaccaaatggtcgcggtcaccgtcgcacaggtagtgcctacgacggaagtgaatacggctcggaatcggatctagagtcacctggaatgccacccagcttggtcgccaagatcgatgcggtagagtctttagctcggagaggcactgaagctactggcggaccggcggatggcgtgttcaagcgtgtcacagatggactgagggaccttggttcccagtctgctgttgaaggtagcaccacaagattaatcacggctcattccgctctggcatcacatcttacacatcagacgaggcaactccacaacctcacatatcctctcctgtcgcctctcgtcgctccccccgacccagaaaccatcgatgcgctgctgccagtcctcacttccgtctcccaagacatgccgcgacccgccacatccgcattcgactcactagccgcactgcactctgtcacctccgatctagttcacaccctaaactacctatcagacactctccacatgtcacggcagacgacaacaacagctacccgcagattaagaacagcaaaggaaatggtatcagaaatgaagcgagaggaggaactcaaagaagagggtgagaggtggctaaccaagggaaactggggcgagagactacagaatcgcgaatgcgccggtgtttgcagggatgtagttggtggcttcgaggaagtctgtaatggttggcgggcacgtttattggcacaggctgaatcagcttgaggggatggattcattgtgtacaggacacgacgctgcatgattttctttgttatatcaggaacgggagtcaaatcccttatatttggtctcggacagacagagagacccggcgttttgagatgagatgtctatatagactggacattgttggagtgaaggatgtgcatttgttcatgcatggcgtggtagtatactaggattaggatgaataccccgagactagagttcttgttgctgctcttgagaatatggaaaaggaattacttctgcatcggca

SEQ ID NO: 22705 - DNA, 573 bp, Muscodor strobelii
  misc_feature: SGI cDNA ID NO. 567713
  misc_feature: Encodes the peptide sequence at SEQ ID NO 22706
atgacgtctttccgccaatttcgtccagatgatctactgcgcttttctaagtgcaatcttgaccccctgaccgagacttacgacctgagcttctacaaccaatactttgccaaatggccttccatgtttcaggtggctgaggattatgaagggaacatcgtaggatacatcatgggcaagactgaaagctctccggattacttcaagggttctgagcactatcttccttggcacgctcacataacagcactcactgtagcccctgaggctcggcgcacgggcattggcaaaattctgacagagaagctcgaggccagcgcagagcaggccaatgcctggtttgttgatttattcgtgcgcaagagcaacgagaaggctatcaaattctatgagagcatgggctacagcgtctaccgtgtcgtcaaaaattactatggcgacaacgttgacgaccccaccgctgacggtgaagacgcctacgacatgcgcaaggccatgccgcgtgacaagaagctcgagcacatccgagcggacggcaaggaccataatattcagcctgaggatgtgttctga

SEQ ID NO: 22706 - protein, 190 aa, Muscodor strobelii
  misc_feature: SGI Peptide ID NO. 567713
  misc_feature (45)..(136): Pfam Id: PF00583 Pfam Desc: Acetyltransferase (GNAT) family
  misc_feature (1)..(190): NCBI GI: 171692165 Blast Desc: protein product [Podospora anserina] gi|170946031|emb|CAP72832.1| protein product [Podospora anserina]
  misc_feature (1)..(190): NCBI GI: 39972427 Blast Desc: conserved [Magnaporthe grisea 70-15] gi|145016711|gb|EDK01141.1| conserved [Magnaporthe grisea 70-15]
  misc_feature (1)..(190): NCBI GI: 256728656 Blast Desc: [Nectria haematococca mpVI 77-13-4]
  misc_feature (1)..(190): NCBI GI: 85099319 Blast Desc: N-acetyltransferase 5 [Neurospora crassa OR74A] gi|28922275|gb|EAA31518.1| N-acetyltransferase 5 [Neurospora crassa OR74A] gi|38566809|emb|CAE76117.1| related to [Neurospora
  misc_feature (1)..(190): NCBI GI: 46110048 Blast Desc: FG01906.1 [Gibberella zeae PH-1]
  misc_feature (1)..(190): NCBI GI: 261360804 Blast Desc: N-acetyltransferase [Verticillium albo-atrum VaMs.102]
  misc_feature (1)..(180): NCBI GI: 116206592 Blast Desc: conserved [Chaetomium globosum CBS 148.51] gi|88183186|gb|EAQ90654.1| conserved [Chaetomium globosum CBS 148.51]
  misc_feature (1)..(189): NCBI GI: 238486554 Blast Desc: N-acetyltransferase (Nat5), [Aspergillus flavus NRRL3357] gi|220699394|gb|EED55733.1| N-acetyltransferase (Nat5), [Aspergillus flavus NRRL3357]
  misc_feature (1)..(190): NCBI GI: 154312876 Blast Desc: BC1G_05139 [Botryotinia fuckeliana B05.10] gi|150849841|gb|EDN25034.1| BC1G_05139 [Botryotinia fuckeliana B05.10]
  misc_feature (1)..(189): NCBI GI: 115388517 Blast Desc: ATEG_02586 [Aspergillus terreus NIH2624] gi|114195848|gb|EAU37548.1| ATEG_02586 [Aspergillus terreus NIH2624]
  misc_feature (1)..(189): SWISSPROT Homolog: EC 2.3.1.88 Peptide alpha-N-acetyltransferase
MTSFRQFRPDDLLRFSKCNLDPLTETYDLSFYNQYFAKWPSMFQVAEDYEGNIVGYIMGKTESSPDYFKGSEHYLPWHAHITALTVAPEARRTGIGKILTEKLEASAEQANAWFVDLFVRKSNEKAIKFYESMGYSVYRVVKNYYGDNVDDPTADGEDAYDMRKAMPRDKKLEHIRADGKDHNIQPEDVF

SEQ ID NO: 22707 - DNA, 759 bp, Muscodor strobelii
  misc_feature: SGI cDNA ID NO. 567714
  misc_feature: Encodes the peptide sequence at SEQ ID NO 22708
atgtccaaacttgacggcctggtcttcttggttactggcggttgcagtggtatcgggcttgcgacagctcagatcctatcaaagagaggggcaacagtcgccatcgcggatgtcgacccatcagctttggagaaaaccaaggcttactttgagcctctgaacgtgcctcacactatcaccaaagtagacatatcaaagagggccgaggtcgaatcctggatcaacggcacagtggagaaattcgggaaactagacggcgccgccaacgtcgctggcatagtcggcaaacaccacggattccgagagatcaaggatattgaagatgatgactgggatagaattatagccgtcaacttgaccggaaccatgtactgtctgcgtgctgagctcaacaaggtcgttgacggagggtccatcgtgaatgtctcgtctattcacggttacaagggttttgccaaacatggcccatatgatgccagcaagcatggtgttatcggtctgacgaggactgcggcgaaagaagccggatcgcgtgaagtccgggtgaacacagtagctccaggagccatctttacaccattgatgcaaaagagcttaaagcagcacaacatcccacatgagacgcctcctgttgaggatgaggccgcattcaaacgccaaggaacagcggaggagtgtgccgaggcaattgtctggctactgagcccagaaagcagatacgtaagcggtgctatcttcccagtcgacggatgcatgtag

SEQ ID NO: 22708 - protein, 252 aa, Muscodor strobelii
  misc_feature: SGI Peptide ID NO. 567714
  misc_feature (7)..(176): Pfam Id: PF00106 Pfam Desc: short chain dehydrogenase
  misc_feature (4)..(251): NCBI GI: 46110046 Blast Desc: FG01905.1 [Gibberella zeae PH-1]
  misc_feature (1)..(250): NCBI GI: 261360803 Blast Desc: 3-oxoacyl-[acyl-carrier-protein] reductase [Verticillium albo-atrum VaMs.102]
  misc_feature (4)..(251): NCBI GI: 145609329 Blast Desc: MGG_07514 [Magnaporthe grisea 70-15] gi|145016710|gb|EDK01140.1| MGG_07514 [Magnaporthe grisea 70-15]
  misc_feature (4)..(251): NCBI GI: 261361457 Blast Desc: 3-alpha-(or 20-beta)-hydroxysteroid dehydrogenase [Verticillium albo-atrum VaMs.102]
  misc_feature (4)..(250): NCBI GI: 67522731 Blast Desc: AN1822.2 [Aspergillus nidulans FGSC A4] gi|40745831|gb|EAA64987.1| AN1822.2 [Aspergillus nidulans FGSC A4] gi|259487170|tpe|CBF85629.1| TPA: oxidoreductase, short chain
  misc_feature (4)..(250): NCBI GI: 169768656 Blast Desc: [Aspergillus oryzae RIB40] gi|83766656|dbj|BAE56796.1| protein product [Aspergillus oryzae]
  misc_feature (4)..(250): NCBI GI: 238497976 Blast Desc: short chain dehydrogenase family protein [Aspergillus flavus NRRL3357] gi|220693497|gb|EED49842.1| short chain dehydrogenase family protein [Aspergillus flavus NRRL3357]
  misc_feature (4)..(252): NCBI GI: 154312858 Blast Desc: BC1G_05130 [Botryotinia fuckeliana B05.10] gi|150849832|gb|EDN25025.1| BC1G_05130 [Botryotinia fuckeliana B05.10]
  misc_feature (4)..(252): NCBI GI: 156052176 Blast Desc: SS1G_07497 [Sclerotinia sclerotiorum 1980] gi|154705273|gb|EDO05012.1| SS1G_07497 [Sclerotinia sclerotiorum 1980]
  misc_feature (4)..(251): NCBI GI: 212528248 Blast Desc: oxidoreductase, short chain dehydrogenase/reductase family protein, [Penicillium marneffei ATCC 18224] gi|210073679|gb|EEA27766.1| oxidoreductase, short chain family
  misc_feature (3)..(252): SWISSPROT Homolog: EC 1.1.1.100 3-oxoacyl-[acyl-carrier-protein] reductase
MSKLDGLVFLVTGGCSGIGLATAQILSKRGATVAIADVDPSALEKTKAYFEPLNVPHTITKVDISKRAEVESWINGTVEKFGKLDGAANVAGIVGKHHGFREIKDIEDDDWDRIIAVNLTGTMYCLRAELNKVVDGGSIVNVSSIHGYKGFAKHGPYDASKHGVIGLTRTAAKEAGSREVRVNTVAPGAIFTPLMQKSLKQHNIPHETPPVEDEAAFKRQGTAEECAEAIVWLLSPESRYVSGAIFPVDGCM

SEQ ID NO: 22709 - DNA, 1366 bp, Muscodor strobelii
  misc_feature: SGI EST ID NO. CUFF.53451.2
  misc_feature: Variant of the nucleotide sequence at SEQ ID NO 22707
taccaacatggccaattggcctcgaattcttatttaatgtcaagtcctcaaatcgagttctcgcatggcgttgcttcttgacctatctcaatcactctaaccatcatttgtagctagtccactagcctgtaatacttggtattgaatgaacttcttgtgctgtcttcaacacaggccgcgtcgtctcaagatgtccaaacttgacggcctggtcttcttggttactggcggttgcagtggtatcgggcttgcgacagctcagatcctatcaaagagaggggcaacagtcgccatcgcggatgtcgacccatcagctttggagaaaaccaaggcttactttgagcctctgaacgtgcctcacactatcaccaaagtagacatatcaaagagggccgaggtcgaatcctggatcaacggcacagtggagaaattcgggaaactagacggcgccgccaacgtcgctggcatagtcggcaaacaccacggattccgagagatcaaggatattgaagatgatgactgggatagaattatagccgtcaacttgaccggaaccatgtactgtctgcgtgctgagctcaacaaggtcgttgacggagggtccatcgtgaatgtctcgtctattcacggttacaagggttttgccaaacatggcccatatgatgccagcaagcatggtgttatcggtctgacgaggactgcggcgaaagaagccggatcgcgtgaagtccgggtgaacacagtagctccaggagccatctttacaccattgatgcaaaagagcttaaagcagcacaacatcccacatgagacgcctcctgttgaggatgaggccgcattcaaacgccaaggaacagcggaggagtgtgccgaggcaattgtctggctactgagcccagaaagcagatacgtaagcggtgctatcttcccagtcgacggatgcatgtagaggaagaagccagtagttggagtgcgaagagggggagtgtgcatcagcgccagactcagaacacatcctcaggctgaatattatggtccttgccgtccgctcggatgtgctcgagcttcttgtcacgcggcatggccttgcgcatgtcgtaggcgtcttcaccgtcagcggtggggtcgtcaacgttgtcgccatagtaatttttgacgacacggtagacgctgtagcccatgctctcatagaatttgatagccttctcgttgctcttgcgcacgaataaatcaacaaaccaggcattggcctgctctgcgctggcctcgagcttctctgtcagaattttgccaatgcccgtgcgccgagcctcaggggctacagtgagtgctgttatgtgagcgtgccaaggaagatagtgctcag

SEQ ID NO: 22710 - DNA, 810 bp, Muscodor strobelii
  misc_feature: SGI cDNA ID NO. 567715
  misc_feature: Encodes the peptide sequence at SEQ ID NO 22711
atgtccaaacttgacggcctggtcttcttggttactggcggttgcagtggtatcgggcttgcgacagctcagatcctatcaaagagaggggcaacagtcgccatcgcggatgtcgacccatcagctttggagaaaaccaaggcttactttgagcctctgaacgtgcctcacactatcaccaaagtagacatatcaaagagggccgaggtcgaatcctggatcaacggcacagtggagaaattcgggaaactagacggcgccgccaacgtcgctggcatagtcggcaaacaccacggattccgagagatcaaggatattgaagatgatgactgggatagaattatagccgtcaacttgaccggaaccatgtactgtctgcgtgctgagctcaacaaggtcgttgacggagggtccatcgtgaatgtctcgtctattcacggttacaagggttttgccaaacatggcccatatgactccttacatctagatggatcagggtcatcgctcacactcgttttctatagtgccagcaagcatggtgttatcggtctgacgaggactgcggcgaaagaagccggatcgcgtgaagtccgggtgaacacagtagctccaggagccatctttacaccattgatgcaaaagagcttaaagcagcacaacatcccacatgagacgcctcctgttgaggatgaggccgcattcaaacgccaaggaacagcggaggagtgtgccgaggcaattgtctggctactgagcccagaaagcagatacgtaagcggtgctatcttcccagtcgacggatgcatgtag

SEQ ID NO: 22711 - protein, 269 aa, Muscodor strobelii
  misc_feature: SGI Peptide ID NO. 567715
  misc_feature (7)..(193): Pfam Id: PF00106 Pfam Desc: short chain dehydrogenase
  misc_feature (7)..(157): Pfam Id: PF00106 Pfam Desc: short chain dehydrogenase
  misc_feature (4)..(268): NCBI GI: 46110046 Blast Desc: FG01905.1 [Gibberella zeae PH-1]
  misc_feature (1)..(267): NCBI GI: 261360803 Blast Desc: 3-oxoacyl-[acyl-carrier-protein] reductase [Verticillium albo-atrum VaMs.102]
  misc_feature (4)..(268): NCBI GI: 145609329 Blast Desc: MGG_07514 [Magnaporthe grisea 70-15] gi|145016710|gb|EDK01140.1| MGG_07514 [Magnaporthe grisea 70-15]
  misc_feature (4)..(268): NCBI GI: 261361457 Blast Desc: 3-alpha-(or 20-beta)-hydroxysteroid dehydrogenase [Verticillium albo-atrum VaMs.102]
  misc_feature (4)..(267): NCBI GI: 67522731 Blast Desc: AN1822.2 [Aspergillus nidulans FGSC A4] gi|40745831|gb|EAA64987.1| AN1822.2 [Aspergillus nidulans FGSC A4] gi|259487170|tpe|CBF85629.1| TPA: oxidoreductase, short chain
  misc_feature (4)..(267): NCBI GI: 169768656 Blast Desc: [Aspergillus oryzae RIB40] gi|83766656|dbj|BAE56796.1| protein product [Aspergillus oryzae]
  misc_feature (4)..(267): NCBI GI: 238497976 Blast Desc: short chain dehydrogenase family protein [Aspergillus flavus NRRL3357] gi|220693497|gb|EED49842.1| short chain dehydrogenase family protein [Aspergillus flavus NRRL3357]
  misc_feature (4)..(269): NCBI GI: 154312858 Blast Desc: BC1G_05130 [Botryotinia fuckeliana B05.10] gi|150849832|gb|EDN25025.1| BC1G_05130 [Botryotinia fuckeliana B05.10]
  misc_feature (4)..(269): NCBI GI: 156052176 Blast Desc: SS1G_07497 [Sclerotinia sclerotiorum 1980] gi|154705273|gb|EDO05012.1| SS1G_07497 [Sclerotinia sclerotiorum 1980]
  misc_feature (4)..(268): NCBI GI: 212528248 Blast Desc: oxidoreductase, short chain dehydrogenase/reductase family protein, [Penicillium marneffei ATCC 18224] gi|210073679|gb|EEA27766.1| oxidoreductase, short chain family
  misc_feature (3)..(269): SWISSPROT Homolog: EC 1.1.1.100 3-oxoacyl-[acyl-carrier-protein] reductase
MSKLDGLVFLVTGGCSGIGLATAQILSKRGATVAIADVDPSALEKTKAYFEPLNVPHTITKVDISKRAEVESWINGTVEKFGKLDGAANVAGIVGKHHGFREIKDIEDDDWDRIIAVNLTGTMYCLRAELNKVVDGGSIVNVSSIHGYKGFAKHGPYDSLHLDGSGSSLTLVFYSASKHGVIGLTRTAAKEAGSREVRVNTVAPGAIFTPLMQKSLKQHNIPHETPPVEDEAAFKRQGTAEECAEAIVWLLSPESRYVSGAIFPVDGCM

SEQ ID NO: 22712 - DNA, 1366 bp, Muscodor strobelii; identical to SEQ ID NO: 22709
  misc_feature: SGI EST ID NO. CUFF.53451.2
  misc_feature: Variant of the nucleotide sequence at SEQ ID NO 22710

SEQ ID NO: 22713 - DNA, 807 bp, Muscodor strobelii
  misc_feature: SGI cDNA ID NO. 567716
  misc_feature: Encodes the peptide sequence at SEQ ID NO 22714
atgtccaaacttgacggcctggtcttcttggttactggcggttgcagtggtatcgggcttgcgacagctcagatcctatcaaagagaggggcaacagtcgccatcgcggatgtcgacccatcagctttggagaaaaccaaggcttactttgagcctctgaacgtgcctcacactatcaccaaagtagacatatcaaagagggccgaggtcgaatcctggatcaacggcacagtggagaaattcgggaaactagacggcgccgccaacgtcgctggcatagtcggcaaacaccacggattccgagagatcaaggatattgaagatgatgactgggatagaattatagccgtcaacttgaccggaaccatgtactgtctgcgtgctgagctcaacaaggtcgttgacggagggtccatcgtgaatgtctcgtctattcacggttacaagggtacgtactcagttttgccaaacatggcccatatgaatggatcagggtcatcgctcacactcgttttctatagtgccagcaagcatggtgttatcggtctgacgaggactgcggcgaaagaagccggatcgcgtgaagtccgggtgaacacagtagctccaggagccatctttacaccattgatgcaaaagagcttaaagcagcacaacatcccacatgagacgcctcctgttgaggatgaggccgcattcaaacgccaaggaacagcggaggagtgtgccgaggcaattgtctggctactgagcccagaaagcagatacgtaagcggtgctatcttcccagtcgacggatgcatgtag

SEQ ID NO: 22714 - protein, 268 aa, Muscodor strobelii
  misc_feature: SGI Peptide ID NO. 567716
  misc_feature (7)..(192): Pfam Id: PF00106 Pfam Desc: short chain dehydrogenase
  misc_feature (7)..(150): Pfam Id: PF00106 Pfam Desc: short chain dehydrogenase
  misc_feature (4)..(267): NCBI GI: 46110046 Blast Desc: FG01905.1 [Gibberella zeae PH-1]
  misc_feature (4)..(267): NCBI GI: 145609329 Blast Desc: MGG_07514 [Magnaporthe grisea 70-15] gi|145016710|gb|EDK01140.1| MGG_07514 [Magnaporthe grisea 70-15]
  misc_feature (1)..(266): NCBI GI: 261360803 Blast Desc: 3-oxoacyl-[acyl-carrier-protein] reductase [Verticillium albo-atrum VaMs.102]
  misc_feature (4)..(267): NCBI GI: 261361457 Blast Desc: 3-alpha-(or 20-beta)-hydroxysteroid dehydrogenase [Verticillium albo-atrum VaMs.102]
  misc_feature (4)..(266): NCBI GI: 67522731 Blast Desc: AN1822.2 [Aspergillus nidulans FGSC A4] gi|40745831|gb|EAA64987.1| AN1822.2 [Aspergillus nidulans FGSC A4] gi|259487170|tpe|CBF85629.1| TPA: oxidoreductase, short chain
  misc_feature (4)..(266): NCBI GI: 169768656 Blast Desc: [Aspergillus oryzae RIB40] gi|83766656|dbj|BAE56796.1| protein product [Aspergillus oryzae]
  misc_feature (4)..(266): NCBI GI: 238497976 Blast Desc: short chain dehydrogenase family protein [Aspergillus flavus NRRL3357] gi|220693497|gb|EED49842.1| short chain dehydrogenase family protein [Aspergillus flavus NRRL3357]
  misc_feature (4)..(268): NCBI GI: 154312858 Blast Desc: BC1G_05130 [Botryotinia fuckeliana B05.10] gi|150849832|gb|EDN25025.1| BC1G_05130 [Botryotinia fuckeliana B05.10]
  misc_feature (4)..(268): NCBI GI: 156052176 Blast Desc: SS1G_07497 [Sclerotinia sclerotiorum 1980] gi|154705273|gb|EDO05012.1| SS1G_07497 [Sclerotinia sclerotiorum 1980]
  misc_feature (4)..(267): NCBI GI: 212528248 Blast Desc: oxidoreductase, short chain dehydrogenase/reductase family protein, [Penicillium marneffei ATCC 18224] gi|210073679|gb|EEA27766.1| oxidoreductase, short chain family
  misc_feature (3)..(268): SWISSPROT Homolog: EC 1.1.1.100 3-oxoacyl-[acyl-carrier-protein] reductase
MSKLDGLVFLVTGGCSGIGLATAQILSKRGATVAIADVDPSALEKTKAYFEPLNVPHTITKVDISKRAEVESWINGTVEKFGKLDGAANVAGIVGKHHGFREIKDIEDDDWDRIIAVNLTGTMYCLRAELNKVVDGGSIVNVSSIHGYKGTYSVLPNMAHMNGSGSSLTLVFYSASKHGVIGLTRTAAKEAGSREVRVNTVAPGAIFTPLMQKSLKQHNIPHETPPVEDEAAFKRQGTAEECAEAIVWLLSPESRYVSGAIFPVDGCM

SEQ ID NO: 22715 - DNA, 1366 bp, Muscodor strobelii; identical to SEQ ID NO: 22709
  misc_feature: SGI EST ID NO. CUFF.53451.2
  misc_feature: Variant of the nucleotide sequence at SEQ ID NO 22713

SEQ ID NO: 22716 - DNA, 804 bp, Muscodor strobelii
  misc_feature: SGI cDNA ID NO. 567717
  misc_feature: Reduced expression when VOC is produced
  misc_feature: Encodes the peptide sequence at SEQ ID NO 22717
atgcacgcatccttgattttcaccaccctcttgggtgccgccaccgcccttgccgcgccttcatggcctcagctttccaagagccagtcgcccagcttcagcgccgagtcctacatcgctgattacttcaacgctctggcgactgttgtccgcgacacgagaaatggaggagataaagccggtgcttgtgattttaagaaggccgttatgcccatgcaggatggtctccccgctgtcacctccggcctagtcctgaagcacgtagccattggccgtggcagccagaactacacctgcgacctgagcaacagcaccgcagtccccgtccaaaccggtgctctcgcaactctcttcaacgtctcgtgcgtcgccgccaactaccccacgctcctcgcacagtcgcccaaggccgctctcgcgcttgacatcacgacctccagcaaccccaacgtggacacggtctcgaccctcggccccatgtctctctccgtctctggcaagcactacttcaccaacgccacgactcccttcttcaacctcgactcgaccagcctcagcctcggcaaagcccctgctcacaagctcaacgcgagtaatgctcccgctgatgcgcccaagggtctcctaggcgagactgccgttccgtggctcaagctcgcgaccaatcccgagaccactggcaacaccaaggagatctaccgtgtcaacactgccggtggaagtgcacctgccacgtgccagggtcaagctgcttcgttcgtggttcagtatgctgctgagtactggttctgggagtccacgtag

SEQ ID NO: 22717 - protein, 267 aa, Muscodor strobelii
  misc_feature: SGI Peptide ID NO. 567717
  misc_feature (1)..(267): NCBI GI: 171694219 Blast Desc: protein product [Podospora anserina] gi|170947058|emb|CAP73863.1| protein product [Podospora anserina]
  misc_feature (5)..(264): NCBI GI: 261360831 Blast Desc: malate dehydrogenase [Verticillium albo-atrum VaMs.102]
  misc_feature (1)..(264): NCBI GI: 164426544 Blast Desc: NCU04122 [Neurospora crassa OR74A] gi|16944428|emb|CAC28784.2| [Neurospora crassa] gi|157071378|gb|EAA32042.2| conserved [Neurospora crassa OR74A]
  misc_feature (1)..(264): NCBI GI: 46109980 Blast Desc: FG01872.1 [Gibberella zeae PH-1]
  misc_feature (8)..(264): NCBI GI: 256728492 Blast Desc: NECHADRAFT_96845 [Nectria haematococca mpVI 77-13-4]
  misc_feature (1)..(260): NCBI GI: 116198271 Blast Desc: CHGG_07291 [Chaetomium globosum CBS 148.51] gi|88178570|gb|EAQ86038.1| CHGG_07291 [Chaetomium globosum CBS 148.51]
  misc_feature (3)..(267): NCBI GI: 156051216 Blast Desc: SS1G_07015 [Sclerotinia sclerotiorum 1980] gi|154704793|gb|EDO04532.1| SS1G_07015 [Sclerotinia sclerotiorum 1980]
  misc_feature (3)..(261): NCBI GI: 154299234 Blast Desc: BC1G_11795 [Botryotinia fuckeliana B05.10] gi|150857498|gb|EDN32690.1| BC1G_11795 [Botryotinia fuckeliana B05.10]
  misc_feature (1)..(264): NCBI GI: 39957633 Blast Desc: MGG_09188 [Magnaporthe grisea 70-15] gi|145013377|gb|EDJ98018.1| MGG_09188 [Magnaporthe grisea 70-15]
  misc_feature (37)..(264): NCBI GI: 238844097 Blast Desc: conserved fungal protein [Microsporum canis CBS 113480]
  misc_feature: Useful for introducing or modulating the production of volatile compounds
MHASLIFTTLLGAATALAAPSWPQLSKSQSPSFSAESYIADYFNALATVVRDTRNGGDKAGACDFKKAVMPMQDGLPAVTSGLVLKHVAIGRGSQNYTCDLSNSTAVPVQTGALATLFNVSCVAANYPTLLAQSPKAALALDITTSSNPNVDTVSTLGPMSLSVSGKHYFTNATTPFFNLDSTSLSLGKAPAHKLNASNAPADAPKGLLGETAVPWLKLATNPETTGNTKEIYRVNTAGGSAPATCQGQAASFVVQYAAEYWFWEST

SEQ ID NO: 22718 - DNA, 1833 bp, Muscodor strobelii
  misc_feature: SGI EST ID NO. CUFF.53454.0
  misc_feature: Variant of the nucleotide sequence at SEQ ID NO 22716
ctaccatccagcgtcgtataacaataataaaagtcgttctcgccgcaccctcatctcccacttaccctccctctattctacacatatatccaaagtgtaattccgcttcatatatatctcttgttggggataatctttttccttttctatttccttttcatctcttaggtcttcttttccttctatatttttcttattccacgtttactttagtacatctcatctatcttctcagggaaagggtctgattcgtttactttccttattgttcgtccttactttacttacgtcaacgaacaatttacctgagacgacgatccaaattcgataccttacttatcaagtactactcgtggacttttgacaatctttcgcgagcaaggagagaattggaagtaatagacgacaacataacgaagtgaataatcaatcttttcatccgaaccacattgggagagaaaaaaaatccgcccttaccttttatctttctacttcaacaacaaccacctcaccacctcaaaaccaacgcaaatcaagatgcacgcatccttgattttcaccaccctcttgggtgccgccaccgcccttgccgcgccttcatggcctcagctttccaagagccagtcgcccagcttcagcgccgagtcctacatcgctgattacttcaacgctctggcgactgttgtccgcgacacgagaaatggaggagataaagccggtgcttgtgattttaagaaggccgttatgcccatgcaggatggtctccccgctgtcacctccggcctagtcctgaagcacgtagccattggccgtggcagccagaactacacctgcgacctgagcaacagcaccgcagtccccgtccaaaccggtgctctcgcaactctcttcaacgtctcgtgcgtcgccgccaactaccccacgctcctcgcacagtcgcccaaggccgctctcgcgcttgacatcacgacctccagcaaccccaacgtggacacggtctcgaccctcggccccatgtctctctccgtctctggcaagcactacttcaccaacgccacgactcccttcttcaacctcgactcgaccagcctcagcctcggcaaagcccctgctcacaagctcaacgcgagtaatgctcccgctgatgcgcccaagggtctcctaggcgagactgccgttccgtggctcaagctcgcgaccaatcccgagaccactggcaacaccaaggagatctaccgtgtcaacactgccggtggaagtgcacctgccacgtgccagggtcaagctgcttcgttcgtggttcagtatgctgctgagtactggttctgggagtccacgtagtgcaagaacggcgaagacaccgtggccgaagagtagcagataagggaggaaagcacgtagcgacaagttcgcagggaaactctgtacaaaacagacccggatgacgggaacgaaaaggacacaggtagtaaacaggcaaagggcaccacttttccaaagtgaatgccagatgtagcactattcgcacatcttgtttctgttcgcttgacggtagaatcggagatgtcttccacggaagcatctctaaagagtccccgtcgcgaacacgaggcgccgtctaccttgtagccgaaaagtttccaagtttgtggcgtcaaggaacatctttttaattcttcttcgaccgaatataccttttttccattctcattcatgccgtgctctctttggtgggatattcgagtctgtgatacttgacatacctgggtatactatgggctgataagcaggtacctgactcgcttgatgccttgtcgcgatatgtgatacgtg

SEQ ID NO: 22719 - DNA, 2217 bp, Muscodor strobelii
  misc_feature: SGI cDNA ID NO. 567718
  misc_feature: Reduced expression when VOC is produced
  misc_feature: Encodes the peptide sequence at SEQ ID NO 22720
atggatgcgcagacgctcgatgcggccatgccaccggctgcaccgcgacagtccgaagagcaaagcacggctgcgggcaatgagaacacgaatcagttccagcacgctatctcagcatggaggactatcgatctctctacgcttatccaaaacctcgacaacaccgcttccgacatagtcacttaccagcgtgattcgaccgtgcagcgcaaagatctagcgcagaagacgaaagatttccgaaagctagatgacgccggaaagcttaccgagatcaagagtctactcaaggcatatcagacattcatcgatctcctcacgaatcactccaaagctaccaactctgccttcttgcaggtctactctgcattggagaacgcccctgatccatatcctctcctcgaagcctcggtcgattccatgctggtatctgaggataccttaccgaagctaacagaggagaatcaacacttacaagacaacatcgctcaattgacgacgcaaatcgaagaaaccgagtcgcgtttgcagacagagagcacaaaccgacagcaactcgagaacaatttggagtccaaggttaaagaagtcgagtcttcgtgggctgcagtcttggaagagaagaaggacaactgggaggctaaggagaaggcactcgaagagaaagtggagagccaggagaggctcattaacgaaatcaaggccagctacgaggtcacacaacgactcaagggctccgagaacgccgacgacgaaggcagcaggcaacatgtgacaagtgccgagctggaaatggtcaattccgatctggaacggacaagcacaagactggctgaagtggaagcccggaacgagcaattacgactcgaactcgctcaggccaagtcccaggtccaaacccatgctccatccctagaagacgacccaacctacatacgggttagatccgagaattcctctctgatccgcaagctcgattcggcaagagtagaaaaggaggcatttaagcgggacattgacgcgaaactgcgcagtctggaaagggaggttggtctactgaaggaggatcgcgatggcctgaaagccaaggtccaaaaatggagcgattatgacgatgtgaaacaagaactagaagtgttgaagagcatcgagttcgcaaccggcgatgatgacgatgtgctggtaaatcccaacggcaatgtaccggagaccaagggcaaaggtgatactcttgagcaactgctattagccagaaacaagaagttgagcgacgaattgacgatcctgcgcgtgtcgcaccaagaccttcaaagccgcttagaaacgatacaggaggatatgtccaagacaaacgccgatctggagagatcgcagaatcttaatgcacagctagagaacgatttggcaaccttgcaatccgagggacagaacgccttcccgtcgggagcatccgtagctggaacttattccagatacgcaccatccgtcgccccaggtagaaggggcggtggcaggacatcacccacttcatccatcttatcgggcttcaaccctcgtgacacagcaggcgaacctataggaggcggctctggtatcttacccatgatcacagctcagcgtgatcgcttcaagaaacgaaactcacagcttgaaacggagctgtcagagagccatcgcaacgtatcacaactgcggcaagagatcgccgcgttgcaaaaggacaacttgcaactgtatgagaagacacgatacgtatccacgtacaaccgtgccggcccatcagcttcgtcatcatcagcctacgcatcgaacccgaacccatcgacagtatcgataggcagcacgggtaacccaggaatcgagatggatcgctacagaaaggcgtacgagtccaacatatcgcctttcgcagccttcagagggcgcgagtcagcacgggcgtacaagcgaatgagcttgcccgagagggtggtctactcgatcacccggatggtgctggcgtcaaggacgagtcgtaatctatttgcggcgtactgcgttgcgctgcaccttcttgtgttcttatcgttatactggctcggcacggcggacgcagaccagtatgtaggcgctgccgctattgcgggagcagggtcagcgggcggcagcagactggggtctagtggccagggtgtgaagaatggggactggaaagaggaggcctttaatggacattga

SEQ ID NO: 22720 - protein, 738 aa, Muscodor strobelii
  misc_feature: SGI Peptide ID NO. 567718
  misc_feature (440)..(704): Pfam Id: PF08172 Pfam Desc: CASP C terminal
  misc_feature (440)..(604): Pfam Id: PF08172 Pfam Desc: CASP C terminal
  misc_feature (624)..(704): Pfam Id: PF08172 Pfam Desc: CASP C terminal
  misc_feature (23)..(737): NCBI GI: 154299232 Blast Desc: BC1G_11794 [Botryotinia fuckeliana B05.10] gi|150857497|gb|EDN32689.1| BC1G_11794 [Botryotinia fuckeliana B05.10]
  misc_feature (11)..(737): NCBI GI: 156051214 Blast Desc: SS1G_07014 [Sclerotinia sclerotiorum 1980] gi|154704792|gb|EDO04531.1| SS1G_07014 [Sclerotinia sclerotiorum 1980]
  misc_feature (30)..(702): NCBI GI: 85102161 Blast Desc: NCU04124 [Neurospora crassa OR74A] gi|16944426|emb|CAC28782.2| conserved [Neurospora crassa] gi|28922823|gb|EAA32044.1| conserved [Neurospora crassa OR74A]
  misc_feature (28)..(704): NCBI GI: 261360830 Blast Desc: CASP [Verticillium albo-atrum VaMs.102]
  misc_feature (7)..(700): NCBI GI: 256728491 Blast Desc: [Nectria haematococca mpVI 77-13-4]
  misc_feature (7)..(698): NCBI GI: 46109982 Blast Desc: FG01873.1 [Gibberella zeae PH-1]
  misc_feature (10)..(701): NCBI GI: 39977701 Blast Desc: MGG_06735 [Magnaporthe grisea 70-15] gi|145013745|gb|EDJ98386.1| MGG_06735 [Magnaporthe grisea 70-15]
  misc_feature (37)..(696): NCBI GI: 171694217 Blast Desc: protein product [Podospora anserina] gi|170947057|emb|CAP73862.1| protein product [Podospora anserina]
  misc_feature (1)..(701): NCBI GI: 242773744 Blast Desc: Golgi membrane protein (Coy1), [Talaromyces stipitatus ATCC 10500] gi|218721920|gb|EED21338.1| Golgi membrane protein (Coy1), [Talaromyces stipitatus ATCC 10500]
  misc_feature (11)..(737): NCBI GI: 226295278 Blast Desc: Golgi membrane protein (Coy1) [Paracoccidioides brasiliensis Pb18]
  misc_feature: Useful for introducing or modulating the production of volatile compounds
MDAQTLDAAMPPAAPRQSEEQSTAAGNENTNQFQHAISAWRTIDLSTLIQNLDNTASDIVTYQRDSTVQRKDLAQKTKDFRKLDDAGKLTEIKSLLKAYQTFIDLLTNHSKATNSAFLQVYSALENAPDPYPLLEASVDSMLVSEDTLPKLTEENQHLQDNIAQLTTQIEETESRLQTESTNRQQLENNLESKVKEVESSWAAVLEEKKDNWEAKEKALEEKVESQERLINEIKASYEVTQRLKGSENADDEGSRQHVTSAELEMVNSDLERTSTRLAEVEARNEQLRLELAQAKSQVQTHAPSLEDDPTYIRVRSENSSLIRKLDSARVEKEAFKRDIDAKLRSLEREVGLLKEDRDGLKAKVQKWSDYDDVKQELEVLKSIEFATGDDDDVLVNPNGNVPETKGKGDTLEQLLLARNKKLSDELTILRVSHQDLQSRLETIQEDMSKTNADLERSQNLNAQLENDLATLQSEGQNAFPSGASVAGTYSRYAPSVAPGRRGGGRTSPTSSILSGFNPRDTAGEPIGGGSGILPMITAQRDRFKKRNSQLETELSESHRNVSQLRQEIAALQKDNLQLYEKTRYVSTYNRAGPSASSSSAYASNPNPSTVSIGSTGNPGIEMDRYRKAYESNISPFAAFRGRESARAYKRMSLPERVVYSITRMVLASRTSRNLFAAYCVALHLLVFLSLYWLGTADADQYVGAAAIAGAGSAGGSRLGSSGQGVKNGDWKEEAFNGH

SEQ ID NO: 22721 - DNA, 2680 bp, Muscodor strobelii
  misc_feature: SGI EST ID NO. CUFF.53430.1
  misc_feature: Variant of the nucleotide sequence at SEQ ID NO 22719
tccatgtccaacacttgtggccgaactgcgactgcgacatcgactccgtcccatcgatctatcttgaaatccacatattaaccgacaccaacattaactgatcatcgcactcgcgaccggtggtcaattctcggaatctcatgaagccgtagctgcgccccccggccgtggattctcgagttggaatacaaagccatggatgcgcagacgctcgatgcggccatgccaccggctgcaccgcgacagtccgaagagcaaagcacggctgcgggcaatgagaacacgaatcagttccagcacgctatctcagcatggaggactatcgatctctctacgcttatccaaaacctcgacaacaccgcttccgacatagtcacttaccagcgtgattcgaccgtgcagcgcaaagatctagcgcagaagacgaaagatttccgaaagctagatgacgccggaaagcttaccgagatcaagagtctactcaaggcatatcagacattcatcgatctcctcacgaatcactccaaagctaccaactctgccttcttgcaggtctactctgcattggagaacgcccctgatccatatcctctcctcgaagcctcggtcgattccatgctggtatctgaggataccttaccgaagctaacagaggagaatcaacacttacaagacaacatcgctcaattgacgacgcaaatcgaagaaaccgagtcgcgtttgcagacagagagcacaaaccgacagcaactcgagaacaatttggagtccaaggttaaagaagtcgagtcttcgtgggctgcagtcttggaagagaagaaggacaactgggaggctaaggagaaggcactcgaagagaaagtggagagccaggagaggctcattaacgaaatcaaggccagctacgaggtcacacaacgactcaagggctccgagaacgccgacgacgaaggcagcaggcaacatgtgacaagtgccgagctggaaatggtcaattccgatctggaacggacaagcacaagactggctgaagtggaagcccggaacgagcaattacgactcgaactcgctcaggccaagtcccaggtccaaacccatgctccatccctagaagacgacccaacctacatacgggttagatccgagaattcctctctgatccgcaagctcgattcggcaagagtagaaaaggaggcatttaagcgggacattgacgcgaaactgcgcagtctggaaagggaggttggtctactgaaggaggatcgcgatggcctgaaagccaaggtccaaaaatggagcgattatgacgatgtgaaacaagaactagaagtgttgaagagcatcgagttcgcaaccggcgatgatgacgatgtgctggtaaatcccaacggcaatgtaccggagaccaagggcaaaggtgatactcttgagcaactgctattagccagaaacaagaagttgagcgacgaattgacgatcctgcgcgtgtcgcaccaagaccttcaaagccgcttagaaacgatacaggaggatatgtccaagacaaacgccgatctggagagatcgcagaatcttaatgcacagctagagaacgatttggcaaccttgcaatccgagggacagaacgccttcccgtcgggagcatccgtagctggaacttattccagatacgcaccatccgtcgccccaggtagaaggggcggtggcaggacatcacccacttcatccatcttatcgggcttcaaccctcgtgacacagcaggcgaacctataggaggcggctctggtatcttacccatgatcacagctcagcgtgatcgcttcaagaaacgaaactcacagcttgaaacggagctgtcagagagccatcgcaacgtatcacaactgcggcaagagatcgccgcgttgcaaaaggacaacttgcaactgtatgagaagacacgatacgtatccacgtacaaccgtgccggcccatcagcttcgtcatcatcagcctacgcatcgaacccgaacccatcgacagtatcgataggcagcacgggtaacccaggaatcgagatggatcgctacagaaaggcgtacgagtccaacatatcgcctttcgcagccttcagagggcgcgagtcagcacgggcgtacaagcgaatgagcttgcccgagagggtggtctactcgatcacccggatggtgctggcgtcaaggacgagtcgtaatctatttgcggcgtactgcgttgcgctgcaccttcttgtgttcttatcgttatactggctcggcacggcggacgcagaccagtatgtaggcgctgccgctattgcgggagcagggtcagcgggcggcagcagactggggtctagtggccagggtgtgaagaatggggactggaaagaggaggcctttaatggacattgatgaggatatgtgtgtatgcttctacgttcagcacttgtattgttaccctggtgtcgttctgcttgtagactggtgcctatgtgacgcagattcggcgacgaggactactattgtatatcactagcgatttagatggaatgacataggggatcgaacatcacaatgttctctcatgctttcgtgaagacgtctattctatcttgccaatagagccggcagagagcagtaagctgccacgaaccacacggatagctgatgaccagaacca

SEQ ID NO: 22722 - DNA, 3603 bp, Muscodor strobelii
  misc_feature: SGI cDNA ID NO. 567719
  misc_feature: Encodes the peptide sequence at SEQ ID NO 22723
atggcctccgttgcgcacagcgacctaagctcccaggctcctccgagacctggtcctttcatcttgcgcactctgttcgaacatgtcccgctttccgaagatggctccagagacgatatcaagatcaattgtgtcgaatatctagatcgaaacttatatgtcggcacttcagactcagagctgcttcacttcgtccagataccctccgatccctcggacacttcaggagtgccgacctttatactcgcatcacgactgaaacccgcattcgctacaaccaaaaatactgccgatgcgcccaagcctggtgtgcaggagatcctcctgctccccaatgctgggaaggcttgtatcttgtgcaattccactgtgactttctactcattgcccgagctgagtccagtctatggcaccctgcaggtcaagaactgcggctggattggtggagtcgacctgaatgatactgagggcacaaatggagctatcatactgctatcacttagaaccaaaatacaggttgtgaggctggcagaagatgctcctcggcccatcaagaatatcgactttgcgggcagcaggctgtccgtgagaagagacagtattgcttgtgtcgctgactccaggaactatgccctgctggaaattggtcgccagctcaagattccactcatgtccatctcatcactagaagagagccagccaggtaccatcatgggtcaagcacaggatatatcgggcggtccggcaagcgggctatctaggagtaattcatccgctaatccccgaacccagagtccccagccccaatcccataggagaggtgtcagcttagggaacttggtatccagcgtaaataggaaacaagagcagtccaccgccgaaccggaggaacctgtctttcaagagagatcaccaccagaatccagggcgagcccggcccctccagaaccagcagctgcaacggctgacgcagaagagggtgcgacgccaagtaaagtagcagagagtcagcagcagatcaagcctcccgcagctccagcacaaaaacctgtttttcttaggccacatatcgtatccccaactcctgaagaatttcttctagtaacaggcaccgccccttcagaaccgggcattggcatctttgtgaacaccgatggagatccaactcggccaactgttgagtttgaccgttatccacatgaaattgttgtagacggaggctctgttgatatatcatcgtcgaggacatctcttgccccggaagaaggttatgttctggcgtcaatgggtaaagagttcaaagatggtatacactatggccttgaaattcaccgttgggataacgatgcagcagaaggcgagccacccatacactggcttgaaattagcgatgctgtctcgagcgagatcaaaacacctcaacctctcggcattaggtctttcttaggaaccgatgatactcacttccaggagatcattgataggctttgcagacgccgattcacaccatttgcctcaggtgccccggacatttcatcaatgtcgctgaggagtgttgactcacgtacagcactgtctatggagagaatgtccagagagagggagctattcgatagggacaacgactctcaaagcgacgagtcgttgtcggaaggatgggaagcgagtcgcaatgccgaagaagaggactttgctcgtcgattagcggtggctactgtacggcttgctgtctggtctggtcctaatatctggtgggcagcccgtaaccccttaattttacagttggactctcaactggatgccgctgtcgctaccacggacttgtcaggacagcgtcgagaacttttttggattctgaattcgttccgtggacgtgatgcccgatcagagctggagttcttaacgttcagttatatacgacagcaagctggtgtcctattactgacaaatttcctcaaatcagaggagacgccattcaaagaacccgaactcaaagccttggaggaggtcttagtagagagccagctcgatccacgggtcattttgtcgatcatccctggggtccgaaatgaagtgatcgaaacgcgcaaaggcatctggatctttggtggggtcaagacgaccgccgagaacttcatttccagtcctagcttcagtgcgcagctgaaagtgacattgggtggtttatcgcacacggtcctggcttttttacgacagtttctcagtacttggagacgtaagaagggcttcggtagtgtgtccgatgagaacgaagtctttcgcaccgtcgatgccgctcttcttgctgttttgcttgaaatcgatcagcactcgccgccgggcaggggcagaggacgttcgatacgtactgagctgtatgatctcgtcgataatggggtagactgtttcgacagagcccagacgatcatcgaatcgtatcaccgcctgtatgtgctcagtagactctaccagagcaagaagatggcgcaagaagtcctcgagacatggagacgcattattgaaggagaacgaaatgatggcggtgaattccaggacggcgagcagatcgtacgcgagtatcttacgaagatcagcaatcaaactctcgttcaagaatacggtatctggttagccaaccgcaaccccaaattgggcgtccacgtattcgccgaagataaagggaaaacgaagttcgagccgtccttcgtcgtagagcttctacgacgtgatgcaccggcagctgtcaaatactatttggagttcttagtatttggtaaaggacatacaatatatgtgaacgagcttatcacatactacctcgacattgtcatcactcatctccaaacatcatccgaggctcgagacgttgtgctttcgacatacgaagcttaccgtgctctgcagcccccaaaaccaacataccgtcaattccttacggacaatgcaccacccgacgacgaagcatggcacagtcggctgagactactgcagctactgggcggaaactacgattacgactcgtctgtgattagagatcgcatcgcgagtctaagtagtaccgctgaagacttgctggtcccagagacgatcatcctcgatggccgagagcgaaatcacgagaatgctttacgtcttcttgttcaccggctaggggattacgacacggctgttgcgtactgtttccgtggcggcgcgagtatatacagtatctaccaagcgcagccacaaaaccaacctcctccttcacacgaagacctcaaggctcccaaacgccgcgatagcgcaccgccgacgcagaatcaacaggctaggttattccgcgcgttgttgggggaattcttacagcttgaggatataagcgatagagtggagcagactagtctgctacttgataagtttggagcgtggttcgatataggtgatattttgcaggtcataccggatgggtggagcgtggacttggttgcggggtttctgatgaaggctctgaggaagattgtcgtggagaagaatgagacgagtgttgcgagggcattgagctcggcgcagaatttaaaagtgcagcatgagcttgttgttaggattgggggagaaggggcctag

SEQ ID NO: 22723 - protein, 1200 aa, Muscodor strobelii
  misc_feature: SGI Peptide ID NO. 567719
  misc_feature (18)..(1199): NCBI GI: 46109984 Blast Desc: FG01874.1 [Gibberella zeae PH-1]
  misc_feature (1)..(1200): NCBI GI: 171694215 Blast Desc: protein product [Podospora anserina] gi|170947056|emb|CAP73861.1| protein product [Podospora anserina]
  misc_feature (11)..(1199): NCBI GI: 39977703 Blast Desc: MGG_06736 [Magnaporthe grisea 70-15] gi|145013744|gb|EDJ98385.1| MGG_06736 [Magnaporthe grisea 70-15]
  misc_feature (18)..(1199): NCBI GI: 261360829 Blast Desc: conserved [Verticillium albo-atrum VaMs.102]
  misc_feature (1)..(1200): NCBI GI: 116198275 Blast Desc: CHGG_07293 [Chaetomium globosum CBS 148.51] gi|88178572|gb|EAQ86040.1| CHGG_07293 [Chaetomium globosum CBS 148.51]
  misc_feature (18)..(1195): NCBI GI: 16944425 Blast Desc: related to TGF beta receptor associated protein 1 [Neurospora crassa]
  misc_feature (18)..(1195): NCBI GI: 164426540 Blast Desc: NCU04125 [Neurospora crassa OR74A] gi|157071376|gb|EAA32045.2| conserved [Neurospora crassa OR74A]
  misc_feature (15)..(1195): NCBI GI: 156051212 Blast Desc: SS1G_07013 [Sclerotinia sclerotiorum 1980] gi|154704791|gb|EDO04530.1| SS1G_07013 [Sclerotinia sclerotiorum 1980]
  misc_feature (18)..(1195): NCBI GI: 154299230 Blast Desc: BC1G_11793 [Botryotinia fuckeliana B05.10] gi|150857496|gb|EDN32688.1| BC1G_11793 [Botryotinia fuckeliana B05.10]
  misc_feature (14)..(1163): NCBI GI: 189208967 Blast Desc: conserved [Pyrenophora tritici-repentis Pt-1C-BFP] gi|187976909|gb|EDU43535.1| conserved [Pyrenophora tritici-repentis Pt-1C-BFP]
MASVAHSDLSSQAPPRPGPFILRTLFEHVPLSEDGSRDDIKINCVEYLDRNLYVGTSDSELLHFVQIPSDPSDTSGVPTFILASRLKPAFATTKNTADAPKPGVQEILLLPNAGKACILCNSTVTFYSLPELSPVYGTLQVKNCGWIGGVDLNDTEGTNGAIILLSLRTKIQVVRLAEDAPRPIKNIDFAGSRLSVRRDSIACVADSRNYALLEIGRQLKIPLMSISSLEESQPGTIMGQAQDISGGPASGLSRSNSSANPRTQSPQPQSHRRGVSLGNLVSSVNRKQEQSTAEPEEPVFQERSPPESRASPAPPEPAAATADAEEGATPSKVAESQQQIKPPAAPAQKPVFLRPHIVSPTPEEFLLVTGTAPSEPGIGIFVNTDGDPTRPTVEFDRYPHEIVVDGGSVDISSSRTSLAPEEGYVLASMGKEFKDGIHYGLEIHRWDNDAAEGEPPIHWLEISDAVSSEIKTPQPLGIRSFLGTDDTHFQEIIDRLCRRRFTPFASGAPDISSMSLRSVDSRTALSMERMSRERELFDRDNDSQSDESLSEGWEASRNAEEEDFARRLAVATVRLAVWSGPNIWWAARNPLILQLDSQLDAAVATTDLSGQRRELFWILNSFRGRDARSELEFLTFSYIRQQAGVLLLTNFLKSEETPFKEPELKALEEVLVESQLDPRVILSIIPGVRNEVIETRKGIWIFGGVKTTAENFISSPSFSAQLKVTLGGLSHTVLAFLRQFLSTWRRKKGFGSVSDENEVFRTVDAALLAVLLEIDQHSPPGRGRGRSIRTELYDLVDNGVDCFDRAQTIIESYHRLYVLSRLYQSKKMAQEVLETWRRIIEGERNDGGEFQDGEQIVREYLTKISNQTLVQEYGIWLANRNPKLGVHVFAEDKGKTKFEPSFVVELLRRDAPAAVKYYLEFLVFGKGHTIYVNELITYYLDIVITHLQTSSEARDVVLSTYEAYRALQPPKPTYRQFLTDNAPPDDEAWHSRLRLLQLLGGNYDYDSSVIRDRIASLSSTAEDLLVPETIILDGRERNHENALRLLVHRLGDYDTAVAYCFRGGASIYSIYQAQPQNQPPPSHEDLKAPKRRDSAPPTQNQQARLFRALLGEFLQLEDISDRVEQTSLLLDKFGAWFDIGDILQVIPDGWSVDLVAGFLMKALRKIVVEKNETSVARALSSAQNLKVQHELVVRIGGEGA

SEQ ID NO: 22724 - DNA, 3964 bp, Muscodor strobelii
  misc_feature: SGI EST ID NO. CUFF.53305.0
  misc_feature: Variant of the nucleotide sequence at SEQ ID NO 22722
cacgattcaagctcccaccttaaactacaacgacgaaataaagctttcgctgccggcgcgatcgtcccaagacaccatgaacaaaacgagagcaatatgatgttgtcgatacagctatggcctccgttgcgcacagcgacctaagctcccaggctcctccgagacctggtcctttcatcttgcgcactctgttcgaacatgtcccgctttccgaagatggctccagagacgatatcaagatcaattgtgtcgaatatctagatcgaaacttatatgtcggcacttcagactcagagctgcttcacttcgtccagataccctccgatccctcggacacttcaggagtgccgacctttatactcgcatcacgactgaaacccgcattcgctacaaccaaaaatactgccgatgcgcccaagcctggtgtgcaggagatcctcctgctccccaatgctgggaaggcttgtatcttgtgcaattccactgtgactttctactcattgcccgagctgagtccagtctatggcaccctgcaggtcaagaactgcggctggattggtggagtcgacctgaatgatactgagggcacaaatggagctatcatactgctatcacttagaaccaaaatacaggttgtgaggctggcagaagatgctcctcggcccatcaagaatatcgactttgcgggcagcaggctgtccgtgagaagagacagtattgcttgtgtcgctgactccaggaactatgccctgctggaaattggtcgccagctcaagattccactcatgtccatctcatcactagaagagagccagccaggtaccatcatgggtcaagcacaggatatatcgggcggtccggcaagcgggctatctaggagtaattcatccgctaatccccgaacccagagtccccagccccaatcccataggagaggtgtcagcttagggaacttggtatccagcgtaaataggaaacaagagcagtccaccgccgaaccggaggaacctgtctttcaagagagatcaccaccagaatccagggcgagcccggcccctccagaaccagcagctgcaacggctgacgcagaagagggtgcgacgccaagtaaagtagcagagagtcagcagcagatcaagcctcccgcagctccagcacaaaaacctgtttttcttaggccacatatcgtatccccaactcctgaagaatttcttctagtaacaggcaccgccccttcagaaccgggcattggcatctttgtgaacaccgatggagatccaactcggccaactgttgagtttgaccgttatccacatgaaattgttgtagacggaggctctgttgatatatcatcgtcgaggacatctcttgccccggaagaaggttatgttctggcgtcaatgggtaaagagttcaaagatggtatacactatggccttgaaattcaccgttgggataacgatgcagcagaaggcgagccacccatacactggcttgaaattagcgatgctgtctcgagcgagatcaaaacacctcaacctctcggcattaggtctttcttaggaaccgatgatactcacttccaggagatcattgataggctttgcagacgccgattcacaccatttgcctcaggtgccccggacatttcatcaatgtcgctgaggagtgttgactcacgtacagcactgtctatggagagaatgtccagagagagggagctattcgatagggacaacgactctcaaagcgacgagtcgttgtcggaaggatgggaagcgagtcgcaatgccgaagaagaggactttgctcgtcgattagcggtggctactgtacggcttgctgtctggtctggtcctaatatctggtgggcagcccgtaaccccttaattttacagttggactctcaactggatgccgctgtcgctaccacggacttgtcaggacagcgtcgagaacttttttggattctgaattcgttccgtggacgtgatgcccgatcagagctggagttcttaacgttcagttatatacgacagcaagctggtgtcctattactgacaaatttcctcaaatcagaggagacgccattcaaagaacccgaactcaaagccttggaggaggtcttagtagagagccagctcgatccacgggtcattttgtcgatcatccctggggtccgaaatgaagtgatcgaaacgcgcaaaggcatctggatctttggtggggtcaagacgaccgccgagaacttcatttccagtcctagcttcagtgcgcagctgaaagtgacattgggtggtttatcgcacacggtcctggcttttttacgacagtttctcagtacttggagacgtaagaagggcttcggtagtgtgtccgatgagaacgaagtctttcgcaccgtcgatgccgctcttcttgctgttttgcttgaaatcgatcagcactcgccgccgggcaggggcagaggacgttcgatacgtactgagctgtatgatctcgtcgataatggggtagactgtttcgacagagcccagacgatcatcgaatcgtatcaccgcctgtatgtgctcagtagactctaccagagcaagaagatggcgcaagaagtcctcgagacatggagacgcattattgaaggagaacgaaatgatggcggtgaattccaggacggcgagcagatcgtacgcgagtatcttacgaagatcagcaatcaaactctcgttcaagaatacggtatctggttagccaaccgcaaccccaaattgggcgtccacgtattcgccgaagataaagggaaaacgaagttcgagccgtccttcgtcgtagagcttctacgacgtgatgcaccggcagctgtcaaatactatttggagttcttagtatttggtaaaggacatacaatatatgtgaacgagcttatcacatactacctcgacattgtcatcactcatctccaaacatcatccgaggctcgagacgttgtgctttcgacatacgaagcttaccgtgctctgcagcccccaaaaccaacataccgtcaattccttacggacaatgcaccacccgacgacgaagcatggcacagtcggctgagactactgcagctactgggcggaaactacgattacgactcgtctgtgattagagatcgcatcgcgagtctaagtagtaccgctgaagacttgctggtcccagagacgatcatcctcgatggccgagagcgaaatcacgagaatgctttacgtcttcttgttcaccggctaggggattacgacacggctgttgcgtactgtttccgtggcggcgcgagtatatacagtatctaccaagcgcagccacaaaaccaacctcctccttcacacgaagacctcaaggctcccaaacgccgcgatagcgcaccgccgacgcagaatcaacaggctaggttattccgcgcgttgttgggggaattcttacagcttgaggatataagcgatagagtggagcagactagtctgctacttgataagtttggagcgtggttcgatataggtgatattttgcaggtcataccggatgggtggagcgtggacttggttgcggggtttctgatgaaggctctgaggaagattgtcgtggagaagaatgagacgagtgttgcgagggcattgagctcggcgcagaatttaaaagtgcagcatgagcttgttgttaggattgggggagaaggggcctagtgttgagatggggtgatcgtgtttatgttgtagagataatagaactgaggggttggggttagaaggagaaatatagtgtatttgaacgaaactatatcttccttagggtttttgcattatcattcgattgcaaaaggtggggtttgtagcacattacagtatactcatgtctatcggagggttcttccaaggttgatagacgtcgttcatgtgggagagtagtagtcagatccagacaaagccag

SEQ ID NO: 22725 - DNA, 2199 bp, Muscodor strobelii
  misc_feature: SGI cDNA ID NO. 567720
  misc_feature: Encodes the peptide sequence at SEQ ID NO 22726
atgaacttcaagactatcaatacttcgaatgaacctcgttccattcgtatctatgagcctttgtgtgaggacagagatgagatccgcgttttagcccttgaggcgattggagacgatggtctcgtccactgccgcctcgaaaccgtctctttactggatcattcgaccgattattcttcatttctcacttcatttgatgaaaagaccaggaacgagtcgatgcggcatatactgcggtcatgggcagaggcctgctttccaccagtggatcaccagctgctgaattcgcatcatagatggaagcaacggccgcgcgccacatcatgccgcttcaactggggtgatttcgcgaccctatcgtatgtctggggaaccgataataataagtgcgagatagtcgtgaatggtgtcatcttgcccgtaacgcggaatctaaacgaagctctcctcagactcgcacggaacggtgaattccgtagtgagtataagatatggatcgatgcaatctccatcaatcaagacgacaaaccggagcgcgcgagccaagtgcagaaaatgagacagatttacagtagtgcctggacagtcatcgcgtggctgggcgagagtgatgcagatcgctggatccccaaagctttcgccttttcaaagatgctcgcctcactcgaagatgaggacaaggatcttagtatgctctgtgaccaaagctctggaatcttcaccgatgctgcgtttcttgcgatgctcaagatggcacgtcacccgtattggtcccgtctttggataatccaggaagttgtgatgggtgcgtcttgcacagtgttgcgttgtggcgatcactaccttggtttcgaaaccttttgccaggcgatcgcagtactataccacggcgacaactggatccttaaggaccatatgcttcgtagagcgtaccgccgcggaatgaccactctaagtgatctaaactatcagatattagaaaatggtcctttatcttggtctacaagcacgctgcatttagtccatctggacctcagtcacctaagccgttatgaagataaaggcgccaacgttgagcgccttggcttccgtcgtttactggaagtcgccaactcatctaactgccttgaggcgcgcgacaaagttttcgctttgaccggaatgatggagacgaagatagcaaatgaaattgtcaaggcatacagcctagatgtgcctcagctattcgcggcagtgactcgcgcattcatcacatattacgacaacttagagcctttgcgtcagggaaacccgtggggaccacagtgtgcgccaacgtgggtggccgattggacttggaaaggccgtttgcgatggtcccgtccagagactggctacaccggccctctttggagttactcggatcccagcccgaggccagaggaaatctacaacgcccatggtggtcaacccgcccgctattcgctccttgacgatagccttttattgaactgcgaagggtttgtattcgatgagattgctggcttgggtgctagagaggatggtgtatttcaatggatgaaagaaacagttacgcagtgcctctcatggaaaagctcttatggcgacgaccaggaaaccgcccgagcactctctcgcctcttacttggcggtagtatggtaggccgacaggtgcaatctagaggctgctatgaagccatcttgagtctcccatcgactttcaaagcaggccttccacaatttcgggccaagaaatggagttggctgcgaaaccaagaaggttattattataagtggtcggaatggcgggaagcacacaatcacttgatgcttggcaagaggagaatggattctttctttacagatcgaatcccagatggggctgaagagtctgcatacactgcggctttcgctggagtagatagaaccgtcaaagaacgacgcttcatgctgacgaaaagcggtcgtttcggctgggctccggataatgcacacgaccgtgacggggacaggaatcaggtgaggatcggagacttagttgcaattgtctttggatgcagcactccgttaattatcagacgatatggcaagcaattcctggtgctcggcgagtcgtatgtggaaggattgatgaatggagaagcattagagtttgtgaaggaagagcgctgcaaactgaagtcgttcgtcttttgctaa

SEQ ID NO: 22726 - protein, 732 aa, Muscodor strobelii
  misc_feature: SGI Peptide ID NO. 567720
  misc_feature (116)..(265): Pfam Id: PF06985 Pfam Desc: Heterokaryon incompatibility protein (HET)
  misc_feature (164)..(204): Pfam Id: PF06985 Pfam Desc: Heterokaryon incompatibility protein (HET)
  misc_feature (17)..(731): NCBI GI: 256733030 Blast Desc: NECHADRAFT_78922 [Nectria haematococca mpVI 77-13-4]
  misc_feature (104)..(732): NCBI GI: 189206171 Blast Desc: conserved [Pyrenophora tritici-repentis Pt-1C-BFP] gi|187975513|gb|EDU42139.1| conserved [Pyrenophora tritici-repentis Pt-1C-BFP]
  misc_feature (17)..(727): NCBI GI: 46139107 Blast Desc: FG11068.1 [Gibberella zeae PH-1]
  misc_feature (18)..(671): NCBI GI: 169603594 Blast Desc: SNOG_04806 [Phaeosphaeria nodorum SN15] gi|111066077|gb|EAT87197.1| SNOG_04806 [Phaeosphaeria nodorum SN15]
  misc_feature (18)..(717): NCBI GI: 256723241 Blast Desc: NECHADRAFT_51990 [Nectria haematococca mpVI 77-13-4]
  misc_feature (116)..(730): NCBI GI: 168042194 Blast Desc: [Physcomitrella patens subsp. patens] gi|162675113|gb|EDQ61612.1| [Physcomitrella patens subsp. patens]
  misc_feature (116)..(717): NCBI GI: 256728445 Blast Desc: NECHADRAFT_54320 [Nectria haematococca mpVI 77-13-4]
  misc_feature (115)..(717): NCBI GI: 256730775 Blast Desc: NECHADRAFT_30134 [Nectria haematococca mpVI 77-13-4]
  misc_feature (114)..(718): NCBI GI: 119179507 Blast Desc: CIMG_08498 [Coccidioides immitis RS]
  misc_feature (116)..(716): NCBI GI: 256724019 Blast Desc: NECHADRAFT_86353 [Nectria haematococca mpVI 77-13-4]
MNFKTINTSNEPRSIRIYEPLCEDRDEIRVLALEAIGDDGLVHCRLETVSLLDHSTDYSSFLTSFDEKTRNESMRHILRSWAEACFPPVDHQLLNSHHRWKQRPRATSCRFNWGDFATLSYVWGTDNNKCEIVVNGVILPVTRNLNEALLRLARNGEFRSEYKIWIDAISINQDDKPERASQVQKMRQIYSSAWTVIAWLGESDADRWIPKAFAFSKMLASLEDEDKDLSMLCDQSSGIFTDAAFLAMLKMARHPYWSRLWIIQEVVMGASCTVLRCGDHYLGFETFCQAIAVLYHGDNWILKDHMLRRAYRRGMTTLSDLNYQILENGPLSWSTSTLHLVHLDLSHLSRYEDKGANVERLGFRRLLEVANSSNCLEARDKVFALTGMMETKIANEIVKAYSLDVPQLFAAVTRAFITYYDNLEPLRQGNPWGPQCAPTWVADWTWKGRLRWSRPETGYTGPLWSYSDPSPRPEEIYNAHGGQPARYSLLDDSLLLNCEGFVFDEIAGLGAREDGVFQWMKETVTQCLSWKSSYGDDQETARALSRLLLGGSMVGRQVQSRGCYEAILSLPSTFKAGLPQFRAKKWSWLRNQEGYYYKWSEWREAHNHLMLGKRRMDSFFTDRIPDGAEESAYTAAFAGVDRTVKERRFMLTKSGRFGWAPDNAHDRDGDRNQVRIGDLVAIVFGCSTPLIIRRYGKQFLVLGESYVEGLMNGEALEFVKEERCKLKSFVFC

SEQ ID NO: 22727 - DNA, 450 bp, Muscodor strobelii
  misc_feature: SGI cDNA ID NO. 567721
  misc_feature: Elevated expression when VOC is produced
  misc_feature: Encodes the peptide sequence at SEQ ID NO 22728
atgctattaaagacccattccatcacacttacgctcctggcgactcgagccctggccgccacccagcctgaatgcgtgcaaacctgcatcagcaacaacccaacgagctccttctgcgacggcgacgagaccggccaagatcttgccgattgcacatgtcagagcatctacggcagcttgttgcttcaatgcatcaagaaatgccccgaagctgatcaaatcacatacgcatccaatctccccggggactgtggcgagacgctgttccctaacctcgatatcccgacaactacatcaacgccatcgccatcagcagctaccccaacatctgacgcgactgagtcatctaattcaggcgacgattcgggaaccgatgcagctactggtctcatagtccctacatggactcttctcgcgtcgttgcttgggattggtgtcatggctctataa

SEQ ID NO: 22728 - protein, 149 aa, Muscodor strobelii
  misc_feature: SGI Peptide ID NO. 567721
  misc_feature: Useful for introducing or modulating the production of volatile compounds
MLLKTHSITLTLLATRALAATQPECVQTCISNNPTSSFCDGDETGQDLADCTCQSIYGSLLLQCIKKCPEADQITYASNLPGDCGETLFPNLDIPTTTSTPSPSAATPTSDATESSNSGDDSGTDAATGLIVPTWTLLASLLGIGVMAL

SEQ ID NO: 22729 - DNA, 2498 bp, Muscodor strobelii
  misc_feature: SGI EST ID NO. CUFF.53330.0
  misc_feature: Variant of the nucleotide sequence at SEQ ID NO 22727
aacgaaatgagtatagtctagggactggtcaatacgaaatacgcgctcttatagacaccagaatattctctgcttgacccaataatgctggctgtctactatattgaccaactcattcggctccctctgcaaactcaataattcgcttcaagaaacacaaaaaaacacgacgtgaggccgtaatcatcacaatgctattaaagacccattccatcacacttacgctcctggcgactcgagccctggccgccacccagcctgaatgcgtgcaaacctgcatcagcaacaacccaacgagctccttctgcgacggcgacgagaccggccaagatcttgccgattgcacatgtcagagcatctacggcagcttgttgcttcaatgcatcaagaaatgccccgaagctgatcaaatcacatacgcatccaatctccccggggactgtggcgagacgctgttccctaacctcgatatcccgacaactacatcaacgccatcgccatcagcagctaccccaacatctgacgcgactgagtcatctaattcaggcgacgattcgggaaccgatgcagctactggtctcatagtccctacatggactcttctcgcgtcgttgcttgggattggtgtcatggctctataaacaaggggcattatcaacctatgctatgagttgagctgccggggaagaattgagaagcggcctgaacattgcgattactagtaatgtatatattccaagtgtcacgcagcatctgcagagatgcacaagttgcaatggctgccggtggtgatgaggatgaaggtcgaggttggtattgagggatacgatagactatgtacgtaacaaagagtcttgagaacagagagatgccaggcaccggaatactgttccagcttgtacatgagccatcacgtgctggaggtcccaagaatatttctgtgaaactcgatgttacacgctactaaatgcagacacaactccaccggcagaaaaaggggcccgattccaatgctctataaacaatattcacttcactgtcttgtaaacacacatatatgttgcaactaattatcctccaacatacgctcaatcagaagccccaaccgacttcaaagccgcagcaacaacctcatccacactattcttcctcagccccagcttctcgttcatgatgatatcactagtatccttctccaaatgccccccaaacctcccagtaacaaagcccgtctcaatcaacgcgaacgtagcaaactcatttccttgcttgacctcctcctgtttctcagcaatcaatttttcagaatcaatagtctccacggtgtacttaacaccctggatcctctcgatcgcctcaaggagctgctgctgcgtaatggcgaagtcactgaggaagatattccggttcttagtttcctcgggcatcttcagcgcgttgataagccccgcggcggtattctcttccgtcgtacacgagaagtagccatttccgtcgtcccaaaagacgaatttcttctcctggatatgcatgccgaggaaactgttcttcatggaccaggctagccacatgccattgctgatgctcatccactcgatgagaccctcatctgccttggcgcggaggtattcctgtatcttccctttgctgcggaatactgcgttgagggcttgagcctcaggacgcatgttattcaggccgtattcactgggaacataacgttggacaccagcgctgatagctgcgtctatcattcggtattgattgtcgactgagagacttgtcatgcagtttacgatcacgtcttgacccttgaaagcggcgatgaggtccgaagtcgggtaagaatcaggaattgtgatgatcttcatatgggatgggagttgagactttgaagatgctcgttggaggagagtcaagttgaatgatgagtccttttggaaggcgtctagtactacactgccgattgagcctgcagcgccgatgagaaggatgttcttgagggccgacattttgcttttgagggccgatgtttgaaactgagatacagtgctgttcgtttgactatctgtcgtaatgcggtgctactcagagagccgtgtgtgataatggatgtcctacctctcgacgtggagagaccggcgattaaatatccacgccatctcttcgtagctatcgtcgatagcttttgtgcgttccctttcatcattattcatctcttaatctccgatcattctttgcatcagagcttgaagcggcgtttgaagcttttgcggccatcgtctcgtacgacgtcattggtaatcagggtatggcgcatacggacacaaaccccgcaagcgatggtagtgagagggatcaatgcaacctgactcgatatttatcggcgataattatagattcgaagtttattaagaacggaaactgggaagcgattcgaatagaaatgcttacatagattgcctcgggcaatgattctgatgattactgaacatgca

SEQ ID NO: 22730 - DNA, 1071 bp, Muscodor strobelii
  misc_feature: SGI cDNA ID NO. 567722
  misc_feature: Encodes the peptide sequence at SEQ ID NO 22731
atgaataatgatgaaagggaacgcacaaaagctatcgacgatagctacgaagagatggcgtggatatttaatcgccggtctctccacgtcgagagtcaaacgaacagcactgtatctcagtttcaaacatcggccctcaaaagcaaaatgtcggccctcaagaacatccttctcatcggcgctgcaggctcaatcggcagtgtagtactagacgccttccaaaaggactcatcattcaacttgactctcctccaacgagcatcttcaaagtctcaactcccatcccatatgaagatcatcacaattcctgattcttacccgacttcggacctcatcgccgctttcaagggtcaagacgtgatcgtaaactgcatgacaagtctctcagtcgacaatcaataccgaatgatagacgcagctatcagcgctggtgtccaacgttatgttcccagtgaatacggcctgaataacatgcgtcctgaggctcaagccctcaacgcagtattccgcagcaaagggaagatacaggaatacctccgcgccaaggcagatgagggtctcatcgagtggatgagcatcagcaatggcatgtggctagcctggtccatgaagaacagtttcctcggcatgcatatccaggagaagaaattcgtcttttgggacgacggaaatggctacttctcgtgtacgacggaagagaataccgccgcggggcttatcaacgcgctgaagatgcccgaggaaactaagaaccggaatatcttcctcagtgacttcgccattacgcagcagcagctccttgaggcgatcgagaggatccagggtgttaagtacaccgtggagactattgattctgaaaaattgattgctgagaaacaggaggaggtcaagcaaggaaatgagtttgctacgttcgcgttgattgagacgggctttgttactgggaggtttggggggcatttggagaaggatactagtgatatcatcatgaacgagaagctggggctgaggaagaatagtgtggatgaggttgttgctgcggctttgaagtcggttggggcttctgattga

SEQ ID NO: 22731 - protein, 356 aa, Muscodor strobelii
  misc_feature: SGI Peptide ID NO. 567722
  misc_feature (56)..(280): Pfam Id: PF05368 Pfam Desc: NmrA-like family
  misc_feature (113)..(181): Pfam Id: PF05368 Pfam Desc: NmrA-like family
  misc_feature (51)..(352): NCBI GI: 256730456 Blast Desc: NECHADRAFT_30234 [Nectria haematococca mpVI 77-13-4]
  misc_feature (51)..(355): NCBI GI: 46114400 Blast Desc: FG03042.1 [Gibberella zeae PH-1]
  misc_feature (51)..(352): NCBI GI: 242777886 Blast Desc: conserved [Talaromyces stipitatus ATCC 10500] gi|218722743|gb|EED22161.1| conserved [Talaromyces stipitatus ATCC 10500]
  misc_feature (46)..(352): NCBI GI: 116194316 Blast Desc: CHGG_03756 [Chaetomium globosum CBS 148.51] gi|88179669|gb|EAQ87137.1| CHGG_03756 [Chaetomium globosum CBS 148.51]
  misc_feature (54)..(353): NCBI GI: 121708821 Blast Desc: conserved [Aspergillus clavatus NRRL 1] gi|119400406|gb|EAW10832.1| conserved [Aspergillus clavatus NRRL 1]
  misc_feature (51)..(350): NCBI GI: 169597151 Blast Desc: SNOG_01357 [Phaeosphaeria nodorum SN15] gi|111069886|gb|EAT91006.1| SNOG_01357 [Phaeosphaeria nodorum SN15]
  misc_feature (50)..(350): NCBI GI: 242807383 Blast Desc: NmrA-like family protein [Talaromyces stipitatus ATCC 10500] gi|218715570|gb|EED14992.1| NmrA-like family protein [Talaromyces stipitatus ATCC 10500]
  misc_feature (52)..(349): NCBI GI: 189198828 Blast Desc: isoflavone reductase family protein [Pyrenophora tritici-repentis Pt-1C-BFP] gi|187982850|gb|EDU48338.1| isoflavone reductase family protein [Pyrenophora tritici-repentis
  misc_feature (51)..(350): NCBI GI: 189192883 Blast Desc: isoflavone reductase family protein [Pyrenophora tritici-repentis Pt-1C-BFP] gi|187978344|gb|EDU44970.1| isoflavone reductase family protein [Pyrenophora tritici-repentis
  misc_feature (51)..(355): NCBI GI: 242816413 Blast Desc: conserved [Talaromyces stipitatus ATCC 10500] gi|218715111|gb|EED14534.1| conserved [Talaromyces stipitatus ATCC 10500]
MNNDERERTKAIDDSYEEMAWIFNRRSLHVESQTNSTVSQFQTSALKSKMSALKNILLIGAAGSIGSVVLDAFQKDSSFNLTLLQRASSKSQLPSHMKIITIPDSYPTSDLIAAFKGQDVIVNCMTSLSVDNQYRMIDAAISAGVQRYVPSEYGLNNMRPEAQALNAVFRSKGKIQEYLRAKADEGLIEWMSISNGMWLAWSMKNSFLGMHIQEKKFVFWDDGNGYFSCTTEENTAAGLINALKMPEETKNRNIFLSDFAITQQQLLEAIERIQGVKYTVETIDSEKLIAEKQEEVKQGNEFATFALIETGFVTGRFGGHLEKDTSDIIMNEKLGLRKNSVDEVVAAALKSVGASD

SEQ ID NO: 22732 - DNA, 3402 bp, Muscodor strobelii
  misc_feature: SGI cDNA ID NO. 567723
  misc_feature: Encodes the peptide sequence at SEQ ID NO 22733
atgcctctgcttgagccccgccgtcggtcacgagccgtatatgaggatgatgacgatgagccagatccctctccagccaactccgactcgtctaagcgccgcagaccgaaccatgaccatgatgacgaagacatgaccgacggctccgacaacagccccgcccctcccagtcggcgccccaacggacatcgcaatggacgtcatgtagccaccaccaacggctacagccacacgcctaacgagggcgagtttgcgccgggggccatcgtgcgagtgcgcgtcgacaacttcgtcacatacgagcacgccgagttcctccccgggcccaacctgaacatggtcatcggccccaacggcaccggcaagagctccctcgtctgcgccatctgcctcggcctgggctaccacccgaagcacctcggccgcgccagccacgtcggcgagttcgtcaagcacggcaaggacaccgccctcatcgaggtcgagctgcagaagcggccacaggaccgagccaaccacgtcatccgcgtccagatcaaccgagaggataatggcaggaagtggtggctgaacggcagagaagccagccacaaggacatacagaagaccacccgcgacctccgcatccagatcgacaatctgtgtcagttcttgccccaggacaaggtcgccgagtttgccggcctcacgcccacccgcctcctcgaggagaccctccgcgccgccgccccggaagagatcttgcagtggcaggcccagctcaagactctgcacaaagaccacaaggagatgaaagctcaggtcgagacactgtctgaaaccctcaaggggcacgagtctcgccagcagggtctccaggccgacgtcgacaggctgcgcgagcgccagaccatcgagcagaatgtcaaggacctgcagaatgcccgtctcgtcgccgaatacaacgacaagcggcgcaaacacggcgaggccaaagaccgcatgaaggaggccaagaagcggctgatcgatcttgagcgtgcatgcgaaccagcgatgcatgcagtcagggaaaaggaaaactaccgagaccaaattgtgcccatcgtgaacctccgaaagcaggccttgcgagatgccgaagaagaaggcgctcgagtgttgcgaggtatcgaagtccatgatgacaacatcaagcaggccctggtcaagatggaggccgaggaaaagtcgattgaaccgaaaaagacttcgcttgcaaggactcgtgcagaaatcacgaacctgcaggccaagctgaaggaaaaacctcctgaattcgtagctgctgaatggaatgtcagaatccgagagaaagatagtgctaggcaagagatagaggcggaacgacgcgaggtctcggaccggttcgacgaactcaaagcacgcaatgtcgccaagaagactaccttgcaggagttggtcaaagagaatgaagctctcgattctcaacagggacaaaaattagctgtgctcaaacggctgaaacccgatgcagccaggggctgggagtggcttcaggagcatcagaacgacttcgagaaagaagtattcggcccgccaatgctaaactgcagtatgacgaaccatgattatgcagacgtcgtgcaatcactgcttcatgaagacgactttttctgctttgtctgtcagacgaccagcgatcacaaaaagctaagcaaccagctctttaccgttatggggctttcctgcaccattcggacctgtggtagcgacgtcgcatcttttcagcctgctgttcctaaagagcagctcggtcaactcggccttgatggctacgctattgactatgtagaaggcccccgccctgtcatggccatgctctgtgctgagaagaaactccataacgtgggtgtagctctacaagatatcagcaatgcgcagtatgaacaattagcgaactcgaatatgccaggttgggcctcaggcaaaagagtctacgctgtctcgcgccggagggagtacggcccaaatgccacttctactgctaccaagaatgtttatccggctcgctactggacagaccagcccgtagacgaggccgaacgagccaatatcagcaaacagatacacgaggtccaagcagaaatggctgctctgaggacacaaggaattgaaatgagaaataaactccaagaactcaatcaacaggacgaagacgtgaaagccgaggtctcccaggaatcgttgaagcaacaaaagagcgagcttcagaaagtacagacccagtacgcaacactcggcgacaaaatcgcgtttcaaaaacagagtctcgaaaataccgagaaaaacatacagggcgcacggggccgaatactgaagcttagcgcgcaagcagatgagctgtacatcgaaagaacacagctcgttcttgaacataaagatcttctttcgaaaatgcgggatgctcaccaatcattactcgatgtccaaattcgtctcgtcgaggcgaattcagatgtgaaagggctcgcggatcgtaacaaagatattgaacagcgcctggataaggagaaggctgaaatcgaagctgcgaaacaagagtcagcacggcttagagacgaggcccaggaagcccagtcgaaacttgccgagttgcttgacggggattcggacctgttggccaagctgaacggacttgccgctggaaagaccgaggaggacctcaccagcgagatcgacgtggagcaaagcaagctcgaatacgtgcacgccgttgacccggcgattctacggcaattcgaaaagcgagcacaggagattcagacccttacacagcgtaacgccgatctgaccaaaaagtttgaatcactctctcgtaagatcgacgagctcagacagaaatgggagcctcgcgttgacgctctgatcaccaagatcaatgatgccttcgcatataacttcgagcagatcaactgtgcgggtcaagtcgatattcacaaggacgaggaggacttcgaggagtgggcaattgagatcaaagtgaagttccggcaaaacgaaacactacagcaactcaaccagcaccgacagtccggcggtgagcgtgccgtatcgacgatcttctacttgatggcattgcagtccatggcacaggcaccgttccgcgtcgtcgatgagatcaaccagggtatggatccccgtaatgagcgcatggtgcacgagcgtatggtcgagattgcgtgtcgtgaacatacgagccagtatttcctcatcacgcctaagctgctcacaaatctgcgatacgacgagcgcatgcgcgttctgtgtatcgcgtctggcgaacatatgcctactgagggccgcaagctggattttggtaagcttgttaagattcagaaggcgcttgtagctggggcgtaa

SEQ ID NO: 22733 - protein, 1133 aa, Muscodor strobelii
  misc_feature: SGI Peptide ID NO. 567723
  misc_feature (88)..(1113): Pfam Id: PF02463 Pfam Desc: RecF/RecN/SMC N terminal domain
  misc_feature (88)..(133): Pfam Id: PF02463 Pfam Desc: RecF/RecN/SMC N terminal domain
  misc_feature (29)..(1133): NCBI GI: 256733584 Blast Desc: NECHADRAFT_35358 [Nectria haematococca mpVI 77-13-4]
  misc_feature (57)..(1133): NCBI GI: 46128649 Blast Desc: FG08702.1 [Gibberella zeae PH-1]
  misc_feature (78)..(1133): NCBI GI: 171684911 Blast Desc: protein product [Podospora anserina] gi|170942416|emb|CAP68068.1| protein product [Podospora anserina]
  misc_feature (8)..(1133): NCBI GI: 145609998 Blast Desc: MGG_12590 [Magnaporthe grisea 70-15] gi|145017377|gb|EDK01740.1| MGG_12590 [Magnaporthe grisea 70-15]
  misc_feature (8)..(1133): NCBI GI: 149210167 Blast Desc: MGCH7_ch7g565 [Magnaporthe grisea 70-15] gi|86196520|gb|EAQ71158.1| MGCH7_ch7g565 [Magnaporthe grisea 70-15]
  misc_feature (37)..(1129): NCBI GI: 116193581 Blast Desc: CHGG_06508 [Chaetomium globosum CBS 148.51] gi|88182421|gb|EAQ89889.1| CHGG_06508 [Chaetomium globosum CBS 148.51]
  misc_feature (41)..(1130): NCBI GI: 85111143 Blast Desc: NCU09065 [Neurospora crassa OR74A] gi|28925527|gb|EAA34557.1| [Neurospora crassa OR74A]
  misc_feature (12)..(1111): NCBI GI: 156055804 Blast Desc: SS1G_05254 [Sclerotinia sclerotiorum 1980] gi|154703038|gb|EDO02777.1| SS1G_05254 [Sclerotinia sclerotiorum 1980]
  misc_feature (1)..(1129): NCBI GI: 115386660 Blast Desc: ATEG_07185 [Aspergillus terreus NIH2624] gi|114190869|gb|EAU32569.1| ATEG_07185 [Aspergillus terreus NIH2624]
  misc_feature (1)..(1131): NCBI GI: 119467308 Blast Desc: structural maintenance of chromosomes 5 smc5 [Neosartorya fischeri NRRL 181] gi|119405612|gb|EAW15563.1| structural maintenance of chromosomes 5 smc5 [Neosartorya NRRL
MPLLEPRRRSRAVYEDDDDEPDPSPANSDSSKRRRPNHDHDDEDMTDGSDNSPAPPSRRPNGHRNGRHVATTNGYSHTPNEGEFAPGAIVRVRVDNFVTYEHAEFLPGPNLNMVIGPNGTGKSSLVCAICLGLGYHPKHLGRASHVGEFVKHGKDTALIEVELQKRPQDRANHVIRVQINREDNGRKWWLNGREASHKDIQKTTRDLRIQIDNLCQFLPQDKVAEFAGLTPTRLLEETLRAAAPEEILQWQAQLKTLHKDHKEMKAQVETLSETLKGHESRQQGLQADVDRLRERQTIEQNVKDLQNARLVAEYNDKRRKHGEAKDRMKEAKKRLIDLERACEPAMHAVREKENYRDQIVPIVNLRKQALRDAEEEGARVLRGIEVHDDNIKQALVKMEAEEKSIEPKKTSLARTRAEITNLQAKLKEKPPEFVAAEWNVRIREKDSARQEIEAERREVSDRFDELKARNVAKKTTLQELVKENEALDSQQGQKLAVLKRLKPDAARGWEWLQEHQNDFEKEVFGPPMLNCSMTNHDYADVVQSLLHEDDFFCFVCQTTSDHKKLSNQLFTVMGLSCTIRTCGSDVASFQPAVPKEQLGQLGLDGYAIDYVEGPRPVMAMLCAEKKLHNVGVALQDISNAQYEQLANSNMPGWASGKRVYAVSRRREYGPNATSTATKNVYPARYWTDQPVDEAERANISKQIHEVQAEMAALRTQGIEMRNKLQELNQQDEDVKAEVSQESLKQQKSELQKVQTQYATLGDKIAFQKQSLENTEKNIQGARGRILKLSAQADELYIERTQLVLEHKDLLSKMRDAHQSLLDVQIRLVEANSDVKGLADRNKDIEQRLDKEKAEIEAAKQESARLRDEAQEAQSKLAELLDGDSDLLAKLNGLAAGKTEEDLTSEIDVEQSKLEYVHAVDPAILRQFEKRAQEIQTLTQRNADLTKKFESLSRKIDELRQKWEPRVDALITKINDAFAYNFEQINCAGQVDIHKDEEDFEEWAIEIKVKFRQNETLQQLNQHRQSGGERAVSTIFYLMALQSMAQAPFRVVDEINQGMDPRNERMVHERMVEIACREHTSQYFLITPKLLTNLRYDERMRVLCIASGEHMPTEGRKLDFGKLVKIQKALVAGA

SEQ ID NO: 22734 - DNA, 3784 bp, Muscodor strobelii
  misc_feature: SGI EST ID NO. CUFF.53346.0
  misc_feature: Variant of the nucleotide sequence at SEQ ID NO 22732
gtcaattgtagatacctaactcataaatttctttgagacccgttgaaattattttgaggataggtatatacttatgcatgtagctaaggtagttagcaactcatattcaactacctctatctatatgcttcaggggcctcagtgcccaccacctgtctctacctctctccaccacaccaccacaatatcaaatcaacatcatcaccatcatgcctctgcttgagccccgccgtcggtcacgagccgtatatgaggatgatgacgatgagccagatccctctccagccaactccgactcgtctaagcgccgcagaccgaaccatgaccatgatgacgaagacatgaccgacggctccgacaacagccccgcccctcccagtcggcgccccaacggacatcgcaatggacgtcatgtagccaccaccaacggctacagccacacgcctaacgagggcgagtttgcgccgggggccatcgtgcgagtgcgcgtcgacaacttcgtcacatacgagcacgccgagttcctccccgggcccaacctgaacatggtcatcggccccaacggcaccggcaagagctccctcgtctgcgccatctgcctcggcctgggctaccacccgaagcacctcggccgcgccagccacgtcggcgagttcgtcaagcacggcaaggacaccgccctcatcgaggtcgagctgcagaagcggccacaggaccgagccaaccacgtcatccgcgtccagatcaaccgagaggataatggcaggaagtggtggctgaacggcagagaagccagccacaaggacatacagaagaccacccgcgacctccgcatccagatcgacaatctgtgtcagttcttgccccaggacaaggtcgccgagtttgccggcctcacgcccacccgcctcctcgaggagaccctccgcgccgccgccccggaagagatcttgcagtggcaggcccagctcaagactctgcacaaagaccacaaggagatgaaagctcaggtcgagacactgtctgaaaccctcaaggggcacgagtctcgccagcagggtctccaggccgacgtcgacaggctgcgcgagcgccagaccatcgagcagaatgtcaaggacctgcagaatgcccgtctcgtcgccgaatacaacgacaagcggcgcaaacacggcgaggccaaagaccgcatgaaggaggccaagaagcggctgatcgatcttgagcgtgcatgcgaaccagcgatgcatgcagtcagggaaaaggaaaactaccgagaccaaattgtgcccatcgtgaacctccgaaagcaggccttgcgagatgccgaagaagaaggcgctcgagtgttgcgaggtatcgaagtccatgatgacaacatcaagcaggccctggtcaagatggaggccgaggaaaagtcgattgaaccgaaaaagacttcgcttgcaaggactcgtgcagaaatcacgaacctgcaggccaagctgaaggaaaaacctcctgaattcgtagctgctgaatggaatgtcagaatccgagagaaagatagtgctaggcaagagatagaggcggaacgacgcgaggtctcggaccggttcgacgaactcaaagcacgcaatgtcgccaagaagactaccttgcaggagttggtcaaagagaatgaagctctcgattctcaacagggacaaaaattagctgtgctcaaacggctgaaacccgatgcagccaggggctgggagtggcttcaggagcatcagaacgacttcgagaaagaagtattcggcccgccaatgctaaactgcagtatgacgaaccatgattatgcagacgtcgtgcaatcactgcttcatgaagacgactttttctgctttgtctgtcagacgaccagcgatcacaaaaagctaagcaaccagctctttaccgttatggggctttcctgcaccattcggacctgtggtagcgacgtcgcatcttttcagcctgctgttcctaaagagcagctcggtcaactcggccttgatggctacgctattgactatgtagaaggcccccgccctgtcatggccatgctctgtgctgagaagaaactccataacgtgggtgtagctctacaagatatcagcaatgcgcagtatgaacaattagcgaactcgaatatgccaggttgggcctcaggcaaaagagtctacgctgtctcgcgccggagggagtacggcccaaatgccacttctactgctaccaagaatgtttatccggctcgctactggacagaccagcccgtagacgaggccgaacgagccaatatcagcaaacagatacacgaggtccaagcagaaatggctgctctgaggacacaaggaattgaaatgagaaataaactccaagaactcaatcaacaggacgaagacgtgaaagccgaggtcgaatcgttgaagcaacaaaagagcgagcttcagaaagtacagacccagtacgcaacactcggcgacaaaatcgcgtttcaaaaacagagtctcgaaaataccgagaaaaacatacagggcgcacggggccgaatactgaagcttagcgcgcaagcagatgagctgtacatcgaaagaacacagctcgttcttgaacataaagatcttctttcgaaaatgcgggatgctcaccaatcattactcgatgtccaaattcgtctcgtcgaggcgaattcagatgtgaaagggctcgcggatcgtaacaaagatattgaacagcgcctggataaggagaaggctgaaatcgaagctgcgaaacaagagtcagcacggcttagagacgaggcccaggaagcccagtcgaaacttgccgagttgcttgacggggattcggacctgttggccaagctgaacggacttgccgctggaaagaccgaggaggacctcaccagcgagatcgacgtggagcaaagcaagctcgaatacgtgcacgccgttgacccggcgattctacggcaattcgaaaagcgagcacaggagattcagacccttacacagcgtaacgccgatctgaccaaaaagtttgaatcactctctcgtaagatcgacgagctcagacagaaatgggagcctcgcgttgacgctctgatcaccaagatcaatgatgccttcgcatataacttcgagcagatcaactgtgcgggtcaagtcgatattcacaaggacgaggaggacttcgaggagtgggcaattgagatcaaagtgaagttccggcaaaacgaaacactacagcaactcaaccagcaccgacagtccggcggtgagcgtgccgtatcgacgatcttctacttgatggcattgcagtccatggcacaggcaccgttccgcgtcgtcgatgagatcaaccagggtatggatccccgtaatgagcgcatggtgcacgagcgtatggtcgagattgcgtgtcgtgaacatacgagccagtatttcctcatcacgcctaagctgctcacaaatctgcgatacgacgagcgcatgcgcgttctgtgtatcgcgtctggcgaacatatgcctactgagggccgcaagctggattttggtaagcttgttaagattcagaaggcgcttgtagctggggcgtaatgctgctcgcgcagtcaatgagttgaggatgtatatattgctcatagggttttcaagcgcgggcgttcggtatctagaggacatcgcgagaaggacaggacgtagatactcacataagtgtatgtatgatgaatgaatgaagagcgtaaatttatagggttatgcttacaggtcccgat

SEQ ID NO: 22735 - DNA, 3618 bp, Muscodor strobelii
  misc_feature: SGI cDNA ID NO. 567724
  misc_feature: Encodes the peptide sequence at SEQ ID NO 22736
atggctgatcccggaggtgctgggtctcaatatgagcaccctcccttgactgactcgacggatcgcgtcaacaacgcttcaccgaagaaatctggcaagaagactcgatctagatcacgaggagaacaatcgcaagccaatcctttgcgccatcgcccaagcagtatccctgcccacatgcgcactcagtcagcttctacactaggaaccacaaaccccatcagacattctgtcggagaagatcccagcaacaagcgtgtttcgcagctttccgtctcgacagcttcgagtgccaggcgcaaaactcatatcggaccatggcagctggggaaaacattgggcacgggctctgctgcccgagttcgcctggctcggcattatctcacccaagaaaacgtcgcggtcaagatcctttcgcgggactcggtccaattgactgcagctggtagcattgcagatctcgatcaatgggatcgtagtcgtgatgaataccacgcccagggacatatccccatggctatcgagcgggaggttgctatactcaagctcatcgaccatcccaacatcatcaagctgtacgacatatgggagaaccgttcagagatttatatggtcctcgaatacctgaactacggcgatctcttcagctacatcagcagagttggcgcgttgcacgaagtcgagatgatgggctatttccgccaattgctcgatgctttggaatactgtcattcattcaaaatctgtcatcgcgacctcaagcccgagaacatcctcatgcaatccaatggtatcgtgaaaattgcggatttcggcatggcagccattcaacaaagtccgactcatgccttgcgaacgtcctgtggaagtccccactacgccgcccctgagttgatcaatcgaaaggtgtacgaagtggacaaggtggatatttggagcttgggctgtatcctctatgccgcattgtgtggacgtttaccttttgatgatcccaccggaaatatacctcgccttctggggagagccgcgaagggtgactacgtgataccatcgtatctcagcccagggatccaagatctcatccaacgaatactgcagatcgatcccgtcaagcgtatccccatccgcatgatatggagacatcctatcgtgcgcaaatacgacgaaatggatgatctgaacaccaaagcccgccggtctgtcaggttttgctacgacgaaagacgaacacctgtgccattggaggaaattgatagtcagctactgcgccagctacgatccattttgcacacatactcggagaaacagctcatacagctgctcacgagctcagagccaaatgaccagaagatgtactactggcttcttgttcactatcaagtaactcgaatggaaagctatgatgcgagtttggcgtattcgcccagtgacattcaccatttccgtccaactacgatgaagtggaagcgacagcaaatcacgtacacatttccttccgagaatggaagaataccctccaaattcacccttgtttccaataccgaggcaagtattgaaggagcagaggacgctgctagcaaagctacgttgcagagctacgacccttacaagtcatcgaggaatatgggtgatcaagaggccagccatgctaagattgtcattcaccgcgggggtagctcagcaaaaaactccactcgttcgtctgtcgttcgtcgtgctcaaagcggttctgcaagatccaattccatgcactcaaatggtgggaaaggggctcgattccttaccccatctactgctatgcgcgcttcgcgccagtcgcttggttccatccaaagtagcggcgcgggctcgtatacgcggtcagtttcccgacataaaaggggggtcgatttctctcatagccgaggacagctcggggtccctcgagatgtatcgcgacctccaattactccgttgagacacggcaatttgtctaagaactcggctgccaaaggtaaaggtaaagtcatcagccgatttgcggcagaagcatcttacccacgacagggaagctcaaggatgaccgaagagatgcgtgaattcagttccagtctggcaaaagactgtgatgatgctttcaacagcactttgccagatggcgccgagtcgtatctagatgtttccaccttagaccctgatggcgatgctttattgtcatcgcccgtcggaatgtctactccatcgcctgctattttcggggccagccaagcaactcgcgctgtccacccgtgggactcgcgaccattgccgcccgcaccggacgaggcccatgagattatgatggccaacaagagagcatccagaaaagagaatcaccacggatcttctgtcaaagcggactgtgtctcatctcatctcaactgcctcgtaccgaataggacgtcgagcgctgaagcggagagaagccagcgggctgtgtcagctcccatttattctgcgtatagcactcagtggggaaagggcaagattcctctaccgcctatcaacgagaagtccaaagaggagcttcgaagtgatcctagtgataaacggatcgtgtcagcgcctgcgaggttcatgaagaaaactaactcaggtgaagtcaacgagtttgccggtttggaatatcttgctcagcaggaggctactattcgacttgtcaactccccctcgaacaataggaaggtggacccaagtctcgttcctgcccctctaaaccttgacacacgaagacatctgatacgtggcgcccatcctagctcagcaggcgcgcagcaacctaatctccgtgagcgttacatgcatgacgaagccgagctaccaactgcaggtgaagaacccgatacttctatctctaccaagagaagttcatggtaccggctgttctcaacgaaaccatctgcatccaacagcacggatcgtctagctcattcagaaacgaactcatcagacggcgcggccaacacgactttcaggaaagcattcggtggtctcgccttctggcgccgtagcaaaaatcaatctcagatggagttttccattggtcccgatgcggagcgctctccgagccctcaaccaatccatgttcacagccagacgagccagcatgtgcaccatggcgatgcgagcaacagcggcacagacgtcaaagaacgcaggattgaagcgcagcaacactggatctttcgcctcctccgagtcaagcctgccacacgcaatgtctgcttctccatgtctgcgcgtcagacacgacaagagatcgcgctcttgctgaaagattggcgaaagtacggtatcgaagatgtgcaggttgataagcaacgtgacatgatctttgctcgtgtcggcgcagagaattttcgtaacgccaaggaggtgtcttttgcagcagagattatggacgttatcgagcacagagttcggggtcgcaacctccgtctgagcgtcgtccgctttacgcaggagcgcggagctgccagcagcttccactatgttgttgacaatctgacttcgacctttgaaagccgcaacttgttggtcagagacaagcacaagatcaagatgatcctcaaggcgttgagctttgtgcgaaaggactga

SEQ ID NO: 22736 - protein, 1205 aa, Muscodor strobelii
  misc_feature: SGI Peptide ID NO. 567724
  misc_feature (107)..(384): Pfam Id: PF00069 Pfam Desc: Protein kinase domain
  misc_feature (176)..(274): Pfam Id: PF07714 Pfam Desc: Protein tyrosine kinase
  misc_feature (85)..(1200): NCBI GI: 171684909 Blast Desc: protein product [Podospora anserina] gi|170942415|emb|CAP68067.1| protein product [Podospora anserina]
  misc_feature (85)..(1200): NCBI GI: 116193583 Blast Desc: CHGG_06509 [Chaetomium globosum CBS 148.51] gi|88182422|gb|EAQ89890.1| CHGG_06509 [Chaetomium globosum CBS 148.51]
  misc_feature (74)..(1200): NCBI GI: 149210169 Blast Desc: MGCH7_ch7g566 [Magnaporthe grisea 70-15] gi|86196521|gb|EAQ71159.1| MGCH7_ch7g566 [Magnaporthe grisea 70-15]
  misc_feature (101)..(1200): NCBI GI: 256734092 Blast Desc: NECHADRAFT_91959 [Nectria haematococca mpVI 77-13-4]
  misc_feature (14)..(1205): NCBI GI: 156055802 Blast Desc: SS1G_05253 [Sclerotinia sclerotiorum 1980] gi|154703037|gb|EDO02776.1| SS1G_05253 [Sclerotinia sclerotiorum 1980]
  misc_feature (145)..(1200): NCBI GI: 145609996 Blast Desc: MGG_02810 [Magnaporthe grisea 70-15] gi|145017376|gb|EDK01739.1| MGG_02810 [Magnaporthe grisea 70-15]
  misc_feature (14)..(635): NCBI GI: 261353239 Blast Desc: BR serine/threonine-protein kinase [Verticillium albo-atrum VaMs.102]
  misc_feature (15)..(790): NCBI GI: 164423312 Blast Desc: NCU09064 [Neurospora crassa OR74A] gi|157070040|gb|EAA34556.2| conserved [Neurospora crassa OR74A]
  misc_feature (16)..(1199): NCBI GI: 189199318 Blast Desc: serine/threonine-protein kinase GIN4 [Pyrenophora tritici-repentis Pt-1C-BFP] gi|187983095|gb|EDU48583.1| serine/threonine-protein kinase GIN4 [Pyrenophora Pt-1C-BFP]
  misc_feature (15)..(490): NCBI GI: 46128647 Blast Desc: FG08701.1 [Gibberella zeae PH-1]
MADPGGAGSQYEHPPLTDSTDRVNNASPKKSGKKTRSRSRGEQSQANPLRHRPSSIPAHMRTQSASTLGTTNPIRHSVGEDPSNKRVSQLSVSTASSARRKTHIGPWQLGKTLGTGSAARVRLARHYLTQENVAVKILSRDSVQLTAAGSIADLDQWDRSRDEYHAQGHIPMAIEREVAILKLIDHPNIIKLYDIWENRSEIYMVLEYLNYGDLFSYISRVGALHEVEMMGYFRQLLDALEYCHSFKICHRDLKPENILMQSNGIVKIADFGMAAIQQSPTHALRTSCGSPHYAAPELINRKVYEVDKVDIWSLGCILYAALCGRLPFDDPTGNIPRLLGRAAKGDYVIPSYLSPGIQDLIQRILQIDPVKRIPIRMIWRHPIVRKYDEMDDLNTKARRSVRFCYDERRTPVPLEEIDSQLLRQLRSILHTYSEKQLIQLLTSSEPNDQKMYYWLLVHYQVTRMESYDASLAYSPSDIHHFRPTTMKWKRQQITYTFPSENGRIPSKFTLVSNTEASIEGAEDAASKATLQSYDPYKSSRNMGDQEASHAKIVIHRGGSSAKNSTRSSVVRRAQSGSARSNSMHSNGGKGARFLTPSTAMRASRQSLGSIQSSGAGSYTRSVSRHKRGVDFSHSRGQLGVPRDVSRPPITPLRHGNLSKNSAAKGKGKVISRFAAEASYPRQGSSRMTEEMREFSSSLAKDCDDAFNSTLPDGAESYLDVSTLDPDGDALLSSPVGMSTPSPAIFGASQATRAVHPWDSRPLPPAPDEAHEIMMANKRASRKENHHGSSVKADCVSSHLNCLVPNRTSSAEAERSQRAVSAPIYSAYSTQWGKGKIPLPPINEKSKEELRSDPSDKRIVSAPARFMKKTNSGEVNEFAGLEYLAQQEATIRLVNSPSNNRKVDPSLVPAPLNLDTRRHLIRGAHPSSAGAQQPNLRERYMHDEAELPTAGEEPDTSISTKRSSWYRLFSTKPSASNSTDRLAHSETNSSDGAANTTFRKAFGGLAFWRRSKNQSQMEFSIGPDAERSPSPQPIHVHSQTSQHVHHGDASNSGTDVKERRIEAQQHWIFRLLRVKPATRNVCFSMSARQTRQEIALLLKDWRKYGIEDVQVDKQRDMIFARVGAENFRNAKEVSFAAEIMDVIEHRVRGRNLRLSVVRFTQERGAASSFHYVVDNLTSTFESRNLLVRDKHKIKMILKALSFVRKD

SEQ ID NO: 22737 - DNA, 1233 bp, Muscodor strobelii
  misc_feature: SGI cDNA ID NO. 567725
  misc_feature: Reduced expression when VOC is produced
  misc_feature: Encodes the peptide sequence at SEQ ID NO 22738
atgaagttcaccactatgctagccaccgttggcttggctgctggcgccaagcacgaagagatcaaattccgcacagactcgggtgtttacggaccagctcttgaggttgtccacgcgtactatgggcaatggccaactggagttgctgtttcaagcaaaggacgaattttcacgaattatcccgctggtctggatgggactaatgcctataatggctccaacagcaactacgccgtcggcgagacgacctccctaacgacggagaaggcttacccaagccttgagttcaaccagcctcccggcggtgctattaactacacgactgtcccaccaacaaccgtcaattaccaaaacttcctcatcagcgtgcaatcagtcgtcatcgacgcaaaagaccgtctctggatcctcgacacaggccgcgtcctgttaaacggcgagctgctcaacgcagcgcagggtggtcccaaactagtcggtgttgatctatcgacggacaaggtcttccagacaatcactttcccctctaccgtagcgttgccctacagctatctcaacgacgtacgcttcgatctacgctcgagcatcacggagtccggtaagggcgtggcctatatcaccgatagctcacagcagggtcgtaacgctattatcgtcgttgatttgggtactggcgagagctggcgacgtctcgatctcgctggtcccgttcgctcagagtcgcagttcctttctttcgtttgggggaggccgacgtatgggtctaatgatgttggggagacgacttataatcctacaggttctgatgggattgcgctctcggctgatggcgagacgttgtactttggaccctttgcgtcgaggtatatgtatagtgtaccgactgcgcggctgagggataggggtggacagagtgaggttcttgcgagacagtccgtcatgaacatagggcaaaaaggccacagcgatggcttcgagacagacagcaacggcctgatctacgctggcaacggcgagtccaacgcgatcaatatcttcaacccggctaacggctccgtcacactctttgtccgtgatccgcgcatcaactgggtagacactatgtctatcgcggccgatggatatctgtactttactgctaatcagctactcgagagcgagaagatcaggcccttcgctcttttccgggccccactacctaatggtgctacgaaggtaccgcttcctgggtaa

SEQ ID NO: 22738 - protein, 410 aa, Muscodor strobelii
  misc_feature: SGI Peptide ID NO. 567725
  misc_feature (121)..(408): Pfam Id: PF03022 Pfam Desc: Major royal jelly protein
  misc_feature (121)..(229): Pfam Id: PF03022 Pfam Desc: Major royal jelly protein
  misc_feature (22)..(406): NCBI GI: 189204964 Blast Desc: major royal jelly protein [Pyrenophora tritici-repentis Pt-1C-BFP] gi|187985916|gb|EDU51404.1| major royal jelly protein [Pyrenophora tritici-repentis Pt-1C-BFP]
  misc_feature (48)..(408): NCBI GI: 169599424 Blast Desc: SNOG_02533 [Phaeosphaeria nodorum SN15] gi|111069625|gb|EAT90745.1| SNOG_02533 [Phaeosphaeria nodorum SN15]
  misc_feature (7)..(408): NCBI GI: 145237780 Blast Desc: An07g04550 [Aspergillus niger] gi|134076012|emb|CAK45090.1| protein product [Aspergillus niger]
  misc_feature (26)..(400): NCBI GI: 85090217 Blast Desc: NCU09913 [Neurospora crassa OR74A] gi|28919661|gb|EAA29076.1| [Neurospora crassa OR74A]
  misc_feature (23)..(406): NCBI GI: 190346695 Blast Desc: PGUG_02940 [Pichia guilliermondii ATCC 6260]
  misc_feature (23)..(406): NCBI GI: 146418491 Blast Desc: PGUG_02940 [Pichia guilliermondii ATCC 6260]
  misc_feature (16)..(406): NCBI GI: 169606015 Blast Desc: SNOG_06040 [Phaeosphaeria nodorum SN15] gi|111065984|gb|EAT87104.1| SNOG_06040 [Phaeosphaeria nodorum SN15]
  misc_feature (20)..(380): NCBI GI: 242210330 Blast Desc: [Postia placenta Mad-698-R] gi|220729910|gb|EED83776.1| [Postia placenta Mad-698-R]
  misc_feature (24)..(399): NCBI GI: 77458939 Blast Desc: Pfl01_2714 [Pseudomonas fluorescens Pf0-1] gi|77382942|gb|ABA74455.1| conserved [Pseudomonas fluorescens Pf0-1]
  misc_feature (11)..(383): NCBI GI: 242217083 Blast Desc: [Postia placenta Mad-698-R] gi|220726512|gb|EED80459.1| [Postia placenta Mad-698-R]
  misc_feature: Useful for introducing or modulating the production of volatile compounds
MKFTTMLATVGLAAGAKHEEIKFRTDSGVYGPALEVVHAYYGQWPTGVAVSSKGRIFTNYPAGLDGTNAYNGSNSNYAVGETTSLTTEKAYPSLEFNQPPGGAINYTTVPPTTVNYQNFLISVQSVVIDAKDRLWILDTGRVLLNGELLNAAQGGPKLVGVDLSTDKVFQTITFPSTVALPYSYLNDVRFDLRSSITESGKGVAYITDSSQQGRNAIIVVDLGTGESWRRLDLAGPVRSESQFLSFVWGRPTYGSNDVGETTYNPTGSDGIALSADGETLYFGPFASRYMYSVPTARLRDRGGQSEVLARQSVMNIGQKGHSDGFETDSNGLIYAGNGESNAINIFNPANGSVTLFVRDPRINWVDTMSIAADGYLYFTANQLLESEKIRPFALFRAPLPNGATKVPLPG

SEQ ID NO: 22739 - DNA, 1590 bp, Muscodor strobelii
  misc_feature: SGI EST ID NO. CUFF.53372.0
  misc_feature: Variant of the nucleotide sequence at SEQ ID NO 22737
ccggtggactatggcttctggtggcaatcggaagggttggggtaactatttccctgggaattcgtgagtgatgattaagccatggtattctcatagtggaagaaaaccagtgcatatcgatcactgccgtcgcttgaaataacactggaagacgtggtcaggttccgctcataacactatgaagttcaccactatgctagccaccgttggcttggctgctggcgccaagcacgaagagatcaaattccgcacagactcgggtgtttacggaccagctcttgaggttgtccacgcgtactatgggcaatggccaactggagttgctgtttcaagcaaaggacgaattttcacgaattatcccgctggtctggatgggactaatgcctataatggctccaacagcaactacgccgtcggcgagacgacctccctaacgacggagaaggcttacccaagccttgagttcaaccagcctcccggcggtgctattaactacacgactgtcccaccaacaaccgtcaattaccaaaacttcctcatcagcgtgcaatcagtcgtcatcgacgcaaaagaccgtctctggatcctcgacacaggccgcgtcctgttaaacggcgagctgctcaacgcagcgcagggtggtcccaaactagtcggtgttgatctatcgacggacaaggtcttccagacaatcactttcccctctaccgtagcgttgccctacagctatctcaacgacgtacgcttcgatctacgctcgagcatcacggagtccggtaagggcgtggcctatatcaccgatagctcacagcagggtcgtaacgctattatcgtcgttgatttgggtactggcgagagctggcgacgtctcgatctcgctggtcccgttcgctcagagtcgcagttcctttctttcgtttgggggaggccgacgtatgggtctaatgatgttggggagacgacttataatcctacaggttctgatgggattgcgctctcggctgatggcgagacgttgtactttggaccctttgcgtcgaggtatatgtatagtgtaccgactgcgcggctgagggataggggtggacagagtgaggttcttgcgagacagtccgtcatgaacatagggcaaaaaggccacagcgatggcttcgagacagacagcaacggcctgatctacgctggcaacggcgagtccaacgcgatcaatatcttcaacccggctaacggctccgtcacactctttgtccgtgatccgcgcatcaactgggtagacactatgtctatcgcggccgatggatatctgtactttactgctaatcagctactcgagagcgagaagatcaggcccttcgctcttttccgggccccactacctaatggtgctacgaaggtaccgcttcctgggtaagtatatgactagtcatatgatgagtggcgatggtagtttggatagtttggcttattggtggtggtgatggggttgattgatatcgtaccattaaatactcaaaccaatagagtctcgagtcctagacacttatttggtacatttgaatggcaaaataagtcgcttctagtcatttgcgc

SEQ ID NO: 22740 - DNA, 2007 bp, Muscodor strobelii
  misc_feature: SGI cDNA ID NO. 567726
  misc_feature: Reduced expression when VOC is produced
  misc_feature: Encodes the peptide sequence at SEQ ID NO 22741
atgaaccaagaaaccctcacccgtggtggcagtaaaaatggtcaaatgcttcaaagtcaccaggttctacgtgccgctgcgctcacgattggtatcatcactgcgcgacatctcttcgtcaatgggtttcactacccatatctcatgctccttgctcatgcctcgatcgctcttatagtagaaagtcttggcacatgcaaagatgaagaagacaacacaacacaacgaccagcatggccgcatagctggactacgcggttctatcaggctgctttcgccgtgagcgctggactcggcatttttttcgcctaccactcattacttcacaaccgaaacaccacactatgggttatgctgcttgccatcgactggtctgctatcattagtcgctgtgtaaaatggagttcatcccaccaagcccagcgacacacttgggatgcacctttatccgccataacgatactgctttgtctcttggtactgctgtggaaagacaactggctgatagtgaagggcactgagatgaatgtcttagccgcactcttcgttgcgatagccagacacctatggaccagtggccgaattgagagcccggtcattatcggtcatatccatatggatgcttacgttgcaggcgtttcattttgccaggtcttgaacatgatactactgctgtgtgcaggcttatacaatcgtcgggatttccatgtccatggccgcatcatattgatcattgtgaatactgctgcgagcgtttttgcccttcagagcaacgcaagcctcaagaggttcacctcctccttccaactaaaggttacgcgcaacatctcggtgaaccatgagttcggcagcatcgcgtttggtctgttcgtcatcctactagtcgagatcgataattgtgttgctcaacatcgaccttcgacgacatcgatgacccagtggattgccttcatcattgccaacctgacgacattggatgcgagatcaatcagcccgtttgcaacacagtcaaatggggagcagctgtacatgtcgctccctgtgcctttgaaaacaccagaccagtctggacgacaaacaccaatcctggatgacgccgaagcgatgaacgaggaagatgagatgctggagtacgagagctcatggctacgtcgagtatctctagcatggcaagctgcactgagcagtctcacgttattacttgttgtatactgtgcaattggatcaccgcacatggaacccaacaagttgtcattcgatctggatatcgttattgcttggtacgacgaacccatcgaacatgtcgtacagacagcgcaactagtacttgaactgccgaatgttgccggccgtaaagtgcgaacaatcgtgtacaacaaaggcacgctaaaccaaactgagctcgaacaagcatttccacatgcttcgagcgacctcatcatccgaccgctggagaacttcggacgagaaggcaacacctatctgacacacgttatcaataaagagcaggactgggctagccacaccatgtttgtgcaggcggaacctcacgaaccagaatacctacaagcacgcttgcgcgattacttcatacagaacacgggtttcctatccctatcctacgtccgtaacttttgcccaagctgtgacgaatgcaacgatcactcgggatggagcggcaatggaaccctaatacgcgatattttcgaccggtcaaacccgaaccaagagtgccaggatattagcatgacgtacagaggccaattcgttgtctctgccaagaggatgcagcaggcaaaccaaaagctattaaaagacttaagagatcaggttgacgtttcgctcgagtttggatacacgcttgagagaatgtgggcgacgattttcagatgcccgacgatctcggagaaatgccctacgcttttgagtggatgggtaggaaacgtggctgcggcggcggattgccagtgtctagacgtcgagagcgagtctataaaggaagactaa

SEQ ID NO: 22741 - protein, 668 aa, Muscodor strobelii
  misc_feature: SGI Peptide ID NO. 567726
  misc_feature (414)..(644): NCBI GI: 156037330 Blast Desc: SS1G_12376 [Sclerotinia sclerotiorum 1980] gi|154697787|gb|EDN97525.1| SS1G_12376 [Sclerotinia sclerotiorum 1980]
  misc_feature (421)..(662): NCBI GI: 169622655 Blast Desc: SNOG_14554 [Phaeosphaeria nodorum SN15] gi|160704822|gb|EAT78094.2| SNOG_14554 [Phaeosphaeria nodorum SN15]
  misc_feature (454)..(597): NCBI GI: 154321427 Blast Desc: BC1G_01588 [Botryotinia fuckeliana B05.10] gi|150852126|gb|EDN27318.1| BC1G_01588 [Botryotinia fuckeliana B05.10]
  misc_feature (510)..(661): NCBI GI: 154293153 Blast Desc: BC1G_14562 [Botryotinia fuckeliana B05.10] gi|150845602|gb|EDN20795.1| BC1G_14562 [Botryotinia fuckeliana B05.10]
  misc_feature (420)..(659): NCBI GI: 134114473 Blast Desc: CNBG4650 [Cryptococcus neoformans var. neoformans B-3501A] gi|50256798|gb|EAL19518.1| CNBG4650 [Cryptococcus neoformans var. neoformans B-3501A]
  misc_feature (420)..(657): NCBI GI: 170084617 Blast Desc: [Laccaria bicolor S238N-H82] gi|164651084|gb|EDR15324.1| [Laccaria bicolor S238N-H82]
  misc_feature (446)..(659): NCBI GI: 154294260 Blast Desc: [Botryotinia fuckeliana B05.10] gi|150844826|gb|EDN20019.1| [Botryotinia fuckeliana B05.10]
  misc_feature (484)..(629): NCBI GI: 280957513 Blast Desc: DaesDRAFT_1511 [Desulfovibrio aespoeensis Aspo-2] gi|270738378|gb|EFA66492.1| DaesDRAFT_1511 [Desulfovibrio aespoeensis Aspo-2]
  misc_feature: Useful for introducing or modulating the production of volatile compounds
MNQETLTRGGSKNGQMLQSHQVLRAAALTIGIITARHLFVNGFHYPYLMLLAHASIALIVESLGTCKDEEDNTTQRPAWPHSWTTRFYQAAFAVSAGLGIFFAYHSLLHNRNTTLWVMLLAIDWSAIISRCVKWSSSHQAQRHTWDAPLSAITILLCLLVLLWKDNWLIVKGTEMNVLAALFVAIARHLWTSGRIESPVIIGHIHMDAYVAGVSFCQVLNMILLLCAGLYNRRDFHVHGRIILIIVNTAASVFALQSNASLKRFTSSFQLKVTRNISVNHEFGSIAFGLFVILLVEIDNCVAQHRPSTTSMTQWIAFIIANLTTLDARSISPFATQSNGEQLYMSLPVPLKTPDQSGRQTPILDDAEAMNEEDEMLEYESSWLRRVSLAWQAALSSLTLLLVVYCAIGSPHMEPNKLSFDLDIVIAWYDEPIEHVVQTAQLVLELPNVAGRKVRTIVYNKGTLNQTELEQAFPHASSDLIIRPLENFGREGNTYLTHVINKEQDWASHTMFVQAEPHEPEYLQARLRDYFIQNTGFLSLSYVRNFCPSCDECNDHSGWSGNGTLIRDIFDRSNPNQECQDISMTYRGQFVVSAKRMQQANQKLLKDLRDQVDVSLEFGYTLERMWATIFRCPTISEKCPTLLSGWVGNVAAAADCQCLDVESESIKED

SEQ ID NO: 22742 - DNA, 2539 bp, Muscodor strobelii
  misc_feature: SGI EST ID NO. CUFF.53393.0
  misc_feature: Variant of the nucleotide sequence at SEQ ID NO 22740
caaagactggggtgtactactgcaggacctgtaatagaaatggaccctcgtcgcagtgtgcacgtcttcccccaggcagcgaaataaacggtaccttgtaccgcctactgcgccgcgcaaatcttaaggtacttcacgtcgctgggtcgcgtgtccagctcgtgtgcgtgaaacacaatcacaatttgtccagcagcctcttcattctcttcatttcattttctcaaacacaacatcgctctttcaacttcactgcgtcaagagtccgcaaaaatataaaacggcaagagggtgctcagggtggaaatcgccgtcgttcatggaaggccacatccaacaaccccacatatctcacgatatcatctcctgaggtgtgcaatcatgaaccaagaaaccctcacccgtggtggcagtaaaaatggtcaaatgcttcaaagtcaccaggttctacgtgccgctgcgctcacgattggtatcatcactgcgcgacatctcttcgtcaatgggtttcactacccatatctcatgctccttgctcatgcctcgatcgctcttatagtagaaagtcttggcacatgcaaagatgaagaagacaacacaacacaacgaccagcatggccgcatagctggactacgcggttctatcaggctgctttcgccgtgagcgctggactcggcatttttttcgcctaccactcattacttcacaaccgaaacaccacactatgggttatgctgcttgccatcgactggtctgctatcattagtcgctgtgtaaaatggagttcatcccaccaagcccagcgacacacttgggatgcacctttatccgccataacgatactgctttgtctcttggtactgctgtggaaagacaactggctgatagtgaagggcactgagatgaatgtcttagccgcactcttcgttgcgatagccagacacctatggaccagtggccgaattgagagcccggtcattatcggtcatatccatatggatgcttacgttgcaggcgtttcattttgccaggtcttgaacatgatactactgctgtgtgcaggcttatacaatcgtcgggatttccatgtccatggccgcatcatattgatcattgtgaatactgctgcgagcgtttttgcccttcagagcaacgcaagcctcaagaggttcacctcctccttccaactaaaggttacgcgcaacatctcggtgaaccatgagttcggcagcatcgcgtttggtctgttcgtcatcctactagtcgagatcgataattgtgttgctcaacatcgaccttcgacgacatcgatgacccagtggattgccttcatcattgccaacctgacgacattggatgcgagatcaatcagcccgtttgcaacacagtcaaatggggagcagctgtacatgtcgctccctgtgcctttgaaaacaccagaccagtctggacgacaaacaccaatcctggatgacgccgaagcgatgaacgaggaagatgagatgctggagtacgagagctcatggctacgtcgagtatctctagcatggcaagctgcactgagcagtctcacgttattacttgttgtatactgtgcaattggatcaccgcacatggaacccaacaagttgtcattcgatctggatatcgttattgcttggtacgacgaacccatcgaacatgtcgtacagacagcgcaactagtacttgaactgccgaatgttgccggccgtaaagtgcgaacaatcgtgtacaacaaaggcacgctaaaccaaactgagctcgaacaagcatttccacatgcttcgagcgacctcatcatccgaccgctggagaacttcggacgagaaggcaacacctatctgacacacgttatcaataaagagcaggactgggctagccacaccatgtttgtgcaggcggaacctcacgaaccagaatacctacaagcacgcttgcgcgattacttcatacagaacacgggtttcctatccctatcctacgtccgtaacttttgcccaagctgtgacgaatgcaacgatcactcgggatggagcggcaatggaaccctaatacgcgatattttcgaccggtcaaacccgaaccaagagtgccaggatattagcatgacgtacagaggccaattcgttgtctctgccaagaggatgcagcaggcaaaccaaaagctattaaaagacttaagagatcaggttgacgtttcgctcgagtttggatacacgcttgagagaatgtgggcgacgattttcagatgcccgacgatctcggagaaatgccctacgcttttgagtggatgggtaggaaacgtggctgcggcggcggattgccagtgtctagacgtcgagagcgagtctataaaggaagactaaaggcttagagcggatggtcaattttgctttcctgttttttgctagttcgagatacccctaaatgttaacggttctgcttctcatggctcaaataaagttttcgtgacgtacttgatccctacaccgttgtcactaacgatgcgtactcgcg

SEQ ID NO: 22743 - DNA, 1164 bp, Muscodor strobelii
  misc_feature: SGI cDNA ID NO. 567727
  misc_feature: Encodes the peptide sequence at SEQ ID NO 22744
atggtccagaccgtattatactatgtatcgatgcttagtattctgagtgtcaacgcgacagatatttcccgccatggtaaggccgactgcgaatcttacatcaagaagacggtaacacctaaggccaagactgtgtactctacaaagcgagtcactgtgacgccgacgacacttcttaaagtgaccggcactacgacaatccctctcacagcgtcggttacctcttcagtagtcgagaccgacgttgtctcttataccgagacggacactgacttcgagaccgccaccaccttcgagaccgatgctaccatcaccgtaacagtcactgctggtccagcaccagacaagcgtaccattacaactgccaaagcaactcctacctatgcctctgtctgcaaaaacactcaggcatatctcacggcatgtaaatgcatcgatgccataacccgcacaaccactctcccttgcaaaaccgtgacgtcgactgtcactaaactcttcaccgcatctcccaagacgatcacatcagccaccacgatacctttcagcacgacagtatcgaccgaaaccatcttcgaaacttacacgacagagaccgtctcgacgcctatcgagaccgacaccgtcaccgtcacagattcgactctcacactagaagcgacagcaaccgccactgagaccgtcgttcctggtcctcccacgccgacatttgccatgatcgccggctacttcccagcccaacagcccaaccccaacatctacgcctacaaccgggcgctcaacgcagaagcttacttcatggacttcaccagcgacccgagcaacgccgtccaattcacgctcaacgctgtcgacggatccgtaactatcctcaatggtcccgcggccggcgatctatccttctgctcgaagagcgtcggcgacgcatccttcgtcctcgtgactacgaccacgtatgcagcttcgcaaggaggtgtcccggtcaaatgtacaattgccgacggtcttttcttctgcgagtggaagacccccggcgtatacgacgccactttctggctatgtggtggccacttgaatctcgttcagccgggcttcgatttcaccaataactgcaatgcaggtggtactgcgtatcggattacgattgcggccccgagcgcataa

SEQ ID NO: 22744 - protein, 387 aa, Muscodor strobelii
  misc_feature: SGI Peptide ID NO. 567727
  misc_feature (23)..(378): NCBI GI: 46139831 Blast Desc: FG11430.1 [Gibberella zeae PH-1]
  misc_feature (261)..(380): NCBI GI: 46138285 Blast Desc: FG10657.1 [Gibberella zeae PH-1]
  misc_feature (30)..(334): NCBI GI: 46117392 Blast Desc: FG04538.1 [Gibberella zeae PH-1]
MVQTVLYYVSMLSILSVNATDISRHGKADCESYIKKTVTPKAKTVYSTKRVTVTPTTLLKVTGTTTIPLTASVTSSVVETDVVSYTETDTDFETATTFETDATITVTVTAGPAPDKRTITTAKATPTYASVCKNTQAYLTACKCIDAITRTTTLPCKTVTSTVTKLFTASPKTITSATTIPFSTTVSTETIFETYTTETVSTPIETDTVTVTDSTLTLEATATATETVVPGPPTPTFAMIAGYFPAQQPNPNIYAYNRALNAEAYFMDFTSDPSNAVQFTLNAVDGSVTILNGPAAGDLSFCSKSVGDASFVLVTTTTYAASQGGVPVKCTIADGLFFCEWKTPGVYDATFWLCGGHLNLVQPGFDFTNNCNAGGTAYRITIAAPSA

SEQ ID NO: 22745 - DNA, 1406 bp, Muscodor strobelii
  misc_feature: SGI EST ID NO. CUFF.53391.0
  misc_feature: Variant of the nucleotide sequence at SEQ ID NO 22743
caatttgcaagccaactggtcagccgtctgaactcataggctcagtcatcgatagctcatcacaatcatgaggatatcattcctggcagctcttttgagcgcggccaacttggccagtgccttctctccaaattgtcaccactgcaaggaggatacgtgtctgaagggcaagagacaagagttgaaaattgaagacccaagctgacttcgatagctcttatgggttataatctgccctagcgccatggtaaggccgactgcgaatcttacatcaagaagacggtaacacctaaggccaagactgtgtactctacaaagcgagtcactgtgacgccgacgacacttcttaaagtgaccggcactacgacaatccctctcacagcgtcggttacctcttcagtagtcgagaccgacgttgtctcttataccgagacggacactgacttcgagaccgccaccaccttcgagaccgatgctaccatcaccgtaacagtcactgctggtccagcaccagacaagcgtaccattacaactgccaaagcaactcctacctatgcctctgtctgcaaaaacactcaggcatatctcacggcatgtaaatgcatcgatgccataacccgcacaaccactctcccttgcaaaaccgtgacgtcgactgtcactaaactcttcaccgcatctcccaagacgatcacatcagccaccacgatacctttcagcacgacagtatcgaccgaaaccatcttcgaaacttacacgacagagaccgtctcgacgcctatcgagaccgacaccgtcaccgtcacagattcgactctcacactagaagcgacagcaaccgccactgagaccgtcgttcctggtcctcccacgccgacatttgccatgatcgccggctacttcccagcccaacagcccaaccccaacatctacgcctacaaccgggcgctcaacgcagaagcttacttcatggacttcaccagcgacccgagcaacgccgtccaattcacgctcaacgctgtcgacggatccgtaactatcctcaatggtcccgcggccggcgatctatccttctgctcgaagagcgtcggcgacgcatccttcgtcctcgtgactacgaccacgtatgcagcttcgcaaggaggtgtcccggtcaaatgtacaattgccgacggtcttttcttctgcgagtggaagacccccggcgtatacgacgccactttctggctatgtggtggccacttgaatctcgttcagccgggcttcgatttcaccaataactgcaatgcaggtggtactgcgtatcggattacgattgcggccccgagcgcataaggggttgagcgttatagtccttctggatggatcaatttcacgacccttcattgatagtgagaaggcttatc

SEQ ID NO: 22746 - DNA, 1488 bp, Muscodor strobelii
  misc_feature: SGI cDNA ID NO. 567728
  misc_feature: Reduced expression when VOC is produced
  misc_feature: Encodes the peptide sequence at SEQ ID NO 22747
atgcgttattcgactttactgccattagcggtcgcggctgccactgcctttgtcatccccgacgaagagacagctcaacaggtattcagcaccgaggatcagtccgagaagtcgagcccgaaatggtgggaaggattgcataccaaggctgaggaggctttcgatgtaattggagagcatacgcacaaattgattgaagacctatcggaaatcgacatccttcgatcaatcttcgatatcgaaaccggcattgaggagactgatatctttggctcgaagccaggcaatggccatgtcggaaagccgggccaccacggtaccaccaacctgaccgtgtacgaggcaattcaggcatccaactttactaagaaattcgccaagctcgtcgacgagtttccggatatcgttgacctgctgaacagcacatcggcaaacgtcacggccttcgtacccatcgacaaggcctttgagaagatccccgagcaccatggaaagccacctaaggaattcgtcgaagcgatagtcgggtaccatatcctgcccggatattacccagctggccgcgtattagctagccacactttatccacaagtttgaatcttacctcgctgggtggtcgaccccagagactcagagtcagtgttggactgtttggtcttaggttgaacttctatagcaaggttgttgtcgcgaacttgttcgcgaagaacgggatcgcccacggcgtcgatagcattctggttccaccaccgccagttaagagattgatctctcttttcccctccaagttttcaactctcgagcttgcggcagagaagacaggtttgctcccacaccatgaccacaaacacgaagaccacggccacgaggatcatgatcatgaagatcacgaacacaaagagagcaagcaccaccacggcggccacggcacaactggcttgaccattttcgcaccgactaacctcgcattccgcaagctcggcccagctgccaacgcattcctcttcaacactgagaagggtctaggtttcctgaaggctctcctcaagtatcacatcgtcgtcaacgagacgctgtactccgacgcgtactacggcgttaaatccggaacagttgaggaaattcaggataggcccaagtacaatgggcacttccatgtcgatctgccgaccctcttagacgataagagtctgtcgattgatatcgcacgttggtatggattcatcaacatgcgcattaatggatacacgaatgttgccgtcgaggacggttgcgcgtacgatggtgttgtgcaggtcatgaatagcgtgctcattcccccaaaggagggcaagaaagagacggagtggaccgaggaggaagatggatggatcagtgtggaagagttggtcgagaggttggcgccttttgttgatgagaatgagcttgaaggtgtggaacaagagatgaacgttggcaagaaggaacaggtttggaatgaattgtaa

SEQ ID NO: 22747 - protein, 495 aa, Muscodor strobelii
  misc_feature: SGI Peptide ID NO. 567728
  misc_feature (121)..(249): Pfam Id: PF02469 Pfam Desc: Fasciclin domain
  misc_feature (263)..(440): Pfam Id: PF02469 Pfam Desc: Fasciclin domain
  misc_feature (4)..(473): NCBI GI: 154302567 Blast Desc: BC1G_09860 [Botryotinia fuckeliana B05.10] gi|150855349|gb|EDN30541.1| BC1G_09860 [Botryotinia fuckeliana B05.10]
  misc_feature (1)..(473): NCBI GI: 156055394 Blast Desc: SS1G_05049 [Sclerotinia sclerotiorum 1980] gi|154702833|gb|EDO02572.1| SS1G_05049 [Sclerotinia sclerotiorum 1980]
  misc_feature (1)..(475): NCBI GI: 261357143 Blast Desc: fasciclin domain family protein [Verticillium albo-atrum VaMs.102]
  misc_feature (109)..(474): NCBI GI: 169609228 Blast Desc: SNOG_07701 [Phaeosphaeria nodorum SN15] gi|111064047|gb|EAT85167.1| SNOG_07701 [Phaeosphaeria nodorum SN15]
  misc_feature (27)..(475): NCBI GI: 171684813 Blast Desc: protein product [Podospora anserina] gi|170942367|emb|CAP68019.1| protein product [Podospora anserina]
  misc_feature (102)..(474): NCBI GI: 189200286 Blast Desc: conserved [Pyrenophora tritici-repentis Pt-1C-BFP] gi|187983579|gb|EDU49067.1| conserved [Pyrenophora tritici-repentis Pt-1C-BFP]
  misc_feature (111)..(471): NCBI GI: 256723931 Blast Desc: NECHADRAFT_92290 [Nectria haematococca mpVI 77-13-4]
  misc_feature (102)..(475): NCBI GI: 238492869 Blast Desc: Fasciclin domain family protein [Aspergillus flavus NRRL3357] gi|220696165|gb|EED52507.1| Fasciclin domain family protein [Aspergillus flavus NRRL3357]
  misc_feature (102)..(475): NCBI GI: 169783126 Blast Desc: [Aspergillus oryzae RIB40] gi|83774769|dbj|BAE64892.1| protein product [Aspergillus oryzae]
  misc_feature (102)..(482): NCBI GI: 115492181 Blast Desc: conserved [Aspergillus terreus NIH2624] gi|114197578|gb|EAU39278.1| conserved [Aspergillus terreus NIH2624]
  misc_feature: Useful for introducing or modulating the production of volatile compounds
MRYSTLLPLAVAAATAFVIPDEETAQQVFSTEDQSEKSSPKWWEGLHTKAEEAFDVIGEHTHKLIEDLSEIDILRSIFDIETGIEETDIFGSKPGNGHVGKPGHHGTTNLTVYEAIQASNFTKKFAKLVDEFPDIVDLLNSTSANVTAFVPIDKAFEKIPEHHGKPPKEFVEAIVGYHILPGYYPAGRVLASHTLSTSLNLTSLGGRPQRLRVSVGLFGLRLNFYSKVVVANLFAKNGIAHGVDSILVPPPPVKRLISLFPSKFSTLELAAEKTGLLPHHDHKHEDHGHEDHDHEDHEHKESKHHHGGHGTTGLTIFAPTNLAFRKLGPAANAFLFNTEKGLGFLKALLKYHIVVNETLYSDAYYGVKSGTVEEIQDRPKYNGHFHVDLPTLLDDKSLSIDIARWYGFINMRINGYTNVAVEDGCAYDGVVQVMNSVLIPPKEGKKETEWTEEEDGWISVEELVERLAPFVDENELEGVEQEMNVGKKEQVWNEL

SEQ ID NO: 22748 - DNA, 2419 bp, Muscodor strobelii
  misc_feature: SGI EST ID NO. CUFF.53403.0
  misc_feature: Variant of the nucleotide sequence at SEQ ID NO 22746
gttggagacgcatgtgtaaccaaagatcggagtctcatatgcaggacaactactttaggaacatatccgactcaactctcatccctttcgccagcttcggcctgtctcacagaccaattctttaggcatataaacagcaaatcctaggatcttgatctcggggttgcggacggttctgcgcccgaaggagggcagctaaaactcgccgagatccaatagaagagcggcgtgcaaggcgtgaggcgccaacaggcaacgacttaatcgcaattcatgacgcggacatgacaggactaagtgcaattccgtgtatttctagagtaataaaacatcagttgtccgactgctcattttcagtggactcttctgttttcaaattggttcaattgtcgttgaatcagagaagcacgacaggttacgtgacgtggcgtgacgtcagctaggcatcgggattcagctttcaagagtaccataggcctggatctccgaccgttccgacttcacttcaattccttctcttcttaaacccggagcatctggtcgccaataaatatcgaccaattgcttttcaaaatgcgttattcgactttactgccattagcggtcgcggctgccactgcctttgtcatccccgacgaagagacagctcaacaggtattcagcaccgaggatcagtccgagaagtcgagcccgaaatggtgggaaggattgcataccaaggctgaggaggctttcgatgtaattggagagcatacgcacaaattgattgaagacctatcggaaatcgacatccttcgatcaatcttcgatatcgaaaccggcattgaggagactgatatctttggctcgaagccaggcaatggccatgtcggaaagccgggccaccacggtaccaccaacctgaccgtgtacgaggcaattcaggcatccaactttactaagaaattcgccaagctcgtcgacgagtttccggatatcgttgacctgctgaacagcacatcggcaaacgtcacggccttcgtacccatcgacaaggcctttgagaagatccccgagcaccatggaaagccacctaaggaattcgtcgaagcgatagtcgggtaccatatcctgcccggatattacccagctggccgcgtattagctagccacactttatccacaagtttgaatcttacctcgctgggtggtcgaccccagagactcagagtcagtgttggactgtttggtcttaggttgaacttctatagcaaggttgttgtcgcgaacttgttcgcgaagaacgggatcgcccacggcgtcgatagcattctggttccaccaccgccagttaagagattgatctctcttttcccctccaagttttcaactctcgagcttgcggcagagaagacaggtttgctcccacaccatgaccacaaacacgaagaccacggccacgaggatcatgatcatgaagatcacgaacacaaagagagcaagcaccaccacggcggccacggcacaactggcttgaccattttcgcaccgactaacctcgcattccgcaagctcggcccagctgccaacgcattcctcttcaacactgagaagggtctaggtttcctgaaggctctcctcaagtatcacatcgtcgtcaacgagacgctgtactccgacgcgtactacggcgttaaatccggaacagttgaggaaattcaggataggcccaagtacaatgggcacttccatgtcgatctgccgaccctcttagacgataagagtctgtcgattgatatcgcacgttggtatggattcatcaacatgcgcattaatggatacacgaatgttgccgtcgaggacggttgcgcgtacgatggtgttgtgcaggtcatgaatagcgtgctcattcccccaaaggagggcaagaaagagacggagtggaccgaggaggaagatggatggatcagtgtggaagagttggtcgagaggttggcgccttttgttgatgagaatgagcttgaaggtgtggaacaagagatgaacgttggcaagaaggaacaggtttggaatgaattgtaagaggtggttctatgtgcgagactaagataccggacttgggttgtgatgaacaggttacggaacgaaattgggaacggaattgggactggaaatcggaatgggatttaaggcacctgcatgagaaacgaaaaataaacagcaacgaaagtcatatcgcgagatataaaaagacatgaaacttaggtagcaacgggatcgaacgaataaagcaatcgagctgcaaaaaaccaaatcgatttcacgaatatcaagattttgaagagagattatgttcggacttggatcgatacgagttgatctatgtcttatatgaggtatgtgtgtttcggcagctcattttctagcacgtacaggaact

SEQ ID NO: 22749 - DNA, 1851 bp, Muscodor strobelii
  misc_feature: SGI cDNA ID NO. 567729
  misc_feature: Encodes the peptide sequence at SEQ ID NO 22750
atgtctcacacctccttgcctgatccccttggggccgagttagtagatgatttagacgccgaactgccaccgtgctctggtgctacgctcttccatatggaggtagataggaggcgggatattagggatatggcagcggtctctacggggtgcagtgagattgatgatgcagttttgctgggagggggctttgagaagggcactgttgtcggggtcagtgctgaggtggaggatttcggtctctctcttgggttgcagactgttgctcgcttcctaatctccaacaacgatgccagtaatgccagcgctggggttagagataccaaaaagccgaaagtggcgatcatcactatactcccgacattggcgatatcgctgaggctgcgggatgctctccggagccagttacaggttagacttggcccacaccatgaggatataaatgatgaggctcgacgatgtctggagagtgttgatgtctcgcaggttttcgacgttgatggactttgtcttgtgcttcaggagatggatttcagcttgcaccctccgaggcaaacaacagagcctggcgatgcagatcctggtgagaccacgggtgagcaaggaggtgttggcgcacaagacatcgggatggaaacctcgcagggacaacgggaggactctatcgcgctgccgagttcgggtatggctatggatgcatcagatggtagggccaaggaattacctcctctgcgaatcaagaacgacacggcgcctccaaggatccaaaagacggtgattgaagacagtgaggaagaagagccgttctcctcgtcgccgttgtctagcttggattcagaagatgtggaggagcctgttccgacatctagagctatccaagatgatgaacttcaagcgcatcaatcagacccgaacgcgaatctcaatacagactcgccatccccaatacccgctgcaatagctcaagagccaccttcttcaactcagcagccgccaacgacaattcatgccatcccatcaatctcaaatatagaggaagccacaccacacatgccagaaataatcctaataacacatatctcaaccctcctaacaaccctcttcacaaacacaaaccacgacagaacaagcgcacacacaactctacaacgactatcatctcatctccgatacctagctcgaaccaccgggtgcctaataatgctactgaacaccaccacaacctcccacaccgccaaccctcaaaatcagccccaaaaaaatccaaaccagccgccgaatcccgtttcctatgcccaaaaccctgatcaaagaagagaacacaaacccctcgatccctctctccgctcgatattcaaccccagtactggtggtggaagtggtggaggaggaggactgtacgggcggagaaataaaccgaatttcggacaaacgtttacgcaattcctcgatctccatctgctgtgtacgaaggttcctagatcgagggatgacgccgaggcttatattgcgctgggacagagcgaggaggggattaggatggtttgggttgtcgagtgcttgatggatgagttacagttttgggattgggaggggctgaggagggagagggtgagggaagataggttgagaggatatgggaggggaaaagggatgggtatgcgagggaaggcaaagggggtcgggaggagggaagaggatgagagactcccgctgagggttaatagggagcagagatggggtgctgttgtgcttagagatggggttgttgggaatgcgtttaggaaggagacgccggttgatagggggcctgttagggtcgttgctgggtttgggggacctagggtttga

SEQ ID NO: 22750 - protein, 616 aa, Muscodor strobelii
  misc_feature: SGI Peptide ID NO. 567729
  misc_feature (321)..(594): NCBI GI: 46128695 Blast Desc: FG08725.1 [Gibberella zeae PH-1]
  misc_feature (352)..(540): NCBI GI: 256733996 Blast Desc: NECHADRAFT_35701 [Nectria haematococca mpVI 77-13-4]
  misc_feature (22)..(175): NCBI GI: 39970627 Blast Desc: [Magnaporthe grisea 70-15] gi|145017406|gb|EDK01769.1| [Magnaporthe grisea 70-15]
  misc_feature (22)..(175): NCBI GI: 149210103 Blast Desc: MGCH7_ch7g533 [Magnaporthe grisea 70-15] gi|86196488|gb|EAQ71126.1| MGCH7_ch7g533 [Magnaporthe grisea 70-15]
  misc_feature (342)..(616): NCBI GI: 149210103 Blast Desc: MGCH7_ch7g533 [Magnaporthe grisea 70-15] gi|86196488|gb|EAQ71126.1| MGCH7_ch7g533 [Magnaporthe grisea 70-15]
  misc_feature (22)..(177): NCBI GI: 261353323 Blast Desc: conserved [Verticillium albo-atrum VaMs.102]
  misc_feature (22)..(177): NCBI GI: 256733996 Blast Desc: NECHADRAFT_35701 [Nectria haematococca mpVI 77-13-4]
  misc_feature (351)..(595): NCBI GI: 85074921 Blast Desc: NCU00688 [Neurospora crassa OR74A] gi|28927641|gb|EAA36592.1| [Neurospora crassa OR74A]
  misc_feature (352)..(580): NCBI GI: 171684811 Blast Desc: protein product [Podospora anserina] gi|170942366|emb|CAP68018.1| protein product [Podospora anserina]
  misc_feature (47)..(176): NCBI GI: 156031168 Blast Desc: SS1G_14192 [Sclerotinia sclerotiorum 1980] gi|154700583|gb|EDO00322.1| SS1G_14192 [Sclerotinia sclerotiorum 1980]
MSHTSLPDPLGAELVDDLDAELPPCSGATLFHMEVDRRRDIRDMAAVSTGCSEIDDAVLLGGGFEKGTVVGVSAEVEDFGLSLGLQTVARFLISNNDASNASAGVRDTKKPKVAIITILPTLAISLRLRDALRSQLQVRLGPHHEDINDEARRCLESVDVSQVFDVDGLCLVLQEMDFSLHPPRQTTEPGDADPGETTGEQGGVGAQDIGMETSQGQREDSIALPSSGMAMDASDGRAKELPPLRIKNDTAPPRIQKTVIEDSEEEEPFSSSPLSSLDSEDVEEPVPTSRAIQDDELQAHQSDPNANLNTDSPSPIPAAIAQEPPSSTQQPPTTIHAIPSISNIEEATPHMPEIILITHISTLLTTLFTNTNHDRTSAHTTLQRLSSHLRYLARTTGCLIMLLNTTTTSHTANPQNQPQKNPNQPPNPVSYAQNPDQRREHKPLDPSLRSIFNPSTGGGSGGGGGLYGRRNKPNFGQTFTQFLDLHLLCTKVPRSRDDAEAYIALGQSEEGIRMVWVVECLMDELQFWDWEGLRRERVREDRLRGYGRGKGMGMRGKAKGVGRREEDERLPLRVNREQRWGAVVLRDGVVGNAFRKETPVDRGPVRVVAGFGGPRV

SEQ ID NO: 22751 - DNA, 2545 bp, Muscodor strobelii
  misc_feature: SGI EST ID NO. CUFF.53427.0
  misc_feature: Variant of the nucleotide sequence at SEQ ID NO 22749
tgaaaatgtgcgaaatgacatttcgtttcgattgccacgagtggtttactttcgatgttaaatgctgaaatacacttcatgactgatgaatttcttctgtgagtattgctctactagtgggggaccaccttttgctgggagtctgctcatagttgataggacaggacattaactaaggtattcacccgccttaaggacacagccaaccaacctagtggcaggggatggttgacgcataatgatgtgagattcattctggtgcatctgagatatatgaatgcttcatgatatacgacctaatcttgtaacaaaccgagttgtgcaaaactttgtgtggcgctcgttgtcgctatcctgcgttgctgatctaccttacctacctagtgagcatcgtcatcataccatcataccaccataccatcatcacataacctacgacgcgacactggagcatcatgtctcacacctccttgcctgatccccttggggccgagttagtagatgatttagacgccgaactgccaccgtgctctggtgctacgctcttccatatggaggtagataggaggcgggatattagggatatggcagcggtctctacggggtgcagtgagattgatgatgcagttttgctgggagggggctttgagaagggcactgttgtcggggtcagtgctgaggtggaggatttcggtctctctcttgggttgcagactgttgctcgcttcctaatctccaacaacgatgccagtaatgccagcgctggggttagagataccaaaaagccgaaagtggcgatcatcactatactcccgacattggcgatatcgctgaggctgcgggatgctctccggagccagttacaggttagacttggcccacaccatgaggatataaatgatgaggctcgacgatgtctggagagtgttgatgtctcgcaggttttcgacgttgatggactttgtcttgtgcttcaggagatggatttcagcttgcaccctccgaggcaaacaacagagcctggcgatgcagatcctggtgagaccacgggtgagcaaggaggtgttggcgcacaagacatcgggatggaaacctcgcagggacaacgggaggactctatcgcgctgccgagttcgggtatggctatggatgcatcagatggtagggccaaggaattacctcctctgcgaatcaagaacgacacggcgcctccaaggatccaaaagacggtgattgaagacagtgaggaagaagagccgttctcctcgtcgccgttgtctagcttggattcagaagatgtggaggagcctgttccgacatctagagctatccaagatgatgaacttcaagcgcatcaatcagacccgaacgcgaatctcaatacagactcgccatccccaatacccgctgcaatagctcaagagccaccttcttcaactcagcagccgccaacgacaattcatgccatcccatcaatctcaaatatagaggaagccacaccacacatgccagaaataatcctaataacacatatctcaaccctcctaacaaccctcttcacaaacacaaaccacgacagaacaagcgcacacacaactctacaacgactatcatctcatctccgatacctagctcgaaccaccgggtgcctaataatgctactgaacaccaccacaacctcccacaccgccaaccctcaaaatcagccccaaaaaaatccaaaccagccgccgaatcccgtttcctatgcccaaaaccctgatcaaagaagagaacacaaacccctcgatccctctctccgctcgatattcaaccccagtactggtggtggaagtggtggaggaggaggactgtacgggcggagaaataaaccgaatttcggacaaacgtttacgcaattcctcgatctccatctgctgtgtacgaaggttcctagatcgagggatgacgccgaggcttatattgcgctgggacagagcgaggaggggattaggatggtttgggttgtcgagtgcttgatggatgagttacagttttgggattgggaggggctgaggagggagagggtgagggaagataggttgagaggatatgggaggggaaaagggatgggtatgcgagggaaggcaaagggggtcgggaggagggaagaggatgagagactcccgctgagggttaatagggagcagagatggggtgctgttgtgcttagagatggggttgttgggaatgcgtttaggaaggagacgccggttgatagggggcctgttagggtcgttgctgggtttgggggacctagggtttgatggggacgtttatgtgggtgggtagttggctctacggaagggtattgcgagataagagatacggaatcatgatgaggtgtttgattagacttcgctggttcattttcatggacggtgtctatattatgaactgatatgtgaagtggaagtcttagcgagattccgtgtgcagactaggtggcttatttaaggcgcgctggtcttctggataggacagatgaacatgatgatttgagcat

SEQ ID NO: 22752 - DNA, 1530 bp, Muscodor strobelii
  misc_feature: SGI cDNA ID NO. 567730
  misc_feature: Reduced expression when VOC is produced
  misc_feature: Encodes the peptide sequence at SEQ ID NO 22753
atgtccaccatgcagggcgatctgctcggcctaggccaaaccacctccagcgacccgtcggccaaaaacccagctgccggcctgacgctcaatctagcctccaacaaccctttccgcaaccgcgctgcctcacccaacagtcttgcctctcctccccccaggtcacccttcgatgaccctccccgaccaacatcgcgcaatcccttcctcgaccccgacttcgactcatctgcctcgcgcaccgtagcatcgcccgagaagatggccgacaccaagccgacagccactgccacggcagaagaaatatttggcggtctcactctcgaggacaacacacgcaagacatcgcagtccggcatcagcagcaatggacaaccccctatgaacagacctccccgtgggccccctcgtggtgaaaatgtccctccacgtggacgcggacctcctccgggatcccaccgtcctacccgatcgcaggaagaagcattgagggcacgcagaatgcaggctggctcaaacggagccaagccagctggctcacctcagcgctctgaacagcgccttcgccgcaacagcgagtcttcggtcatggacaagcccatcagtgaagaagagaagagagcacgtgatatgcgacgtcgagatagagagcgacgtgatcgcaatggcaaacccagaactaagaagctggacattatcgatcagttggatgccacgagcatctacggcaccggtctctttcaccacgacggacccttcgatgcgtgcaaccccaaccgaaaccgcaagggcagccgtcgtgcgccaatgcaagcctttgctaaagactcggcaaacaacaccatcggaggctctggccctctcaacaagagacccgaccacacccagttcctggctcaggaacaacacgaagcacagtctatgtatgctggcgagcgcaagagcaagaaggaagagatgatgctctatgaccccaagcgagctgatgtggagcacggtgaggagacacttggtttggggagctcgacattcctcgagggaacacccgctgcgatgaacgcaattgtccgtaatcagaacgagacggctcaagaggctgccgagcgcgataacggaataggccgaaagaagtcagtggtgcagcgcttcaagagcatcaagcgaggaccaagagagcacaacgacggccgtgtggctagccccgaagcctactacacccctcgtcccagtggtgctgccacaggatctaccacgaacgaggctaaccccttcttcgctgagttcgacaagggaggcgaggagcagatcaccgtccgacgtaaggacagcactgccaagtccccgatgagcccacctcctgccattggcaccacccttgagcgtcgatctactgcagatgccacgatggacagccccgtagacgggcaaccaaagcagggtggaggcttcatgtcacgcatgaggagtttgaaaggtggccgacgccagcagcaaccaactgagccgacccatcccggtacagcaatgtga

SEQ ID NO: 22753 - protein, 509 aa, Muscodor strobelii
  misc_feature: SGI Peptide ID NO. 567730
  misc_feature (231)..(357): Pfam Id: PF08316 Pfam Desc: Pal1 cell morphology protein
  misc_feature (25)..(495): NCBI GI: 39970625 Blast Desc: MGG_02779 [Magnaporthe grisea 70-15] gi|149210101|ref|XP_001522425.1| MGCH7_ch7g532 [Magnaporthe grisea 70-15] gi|86196487|gb|EAQ71125.1| MGCH7_ch7g532 grisea
  misc_feature (28)..(497): NCBI GI: 171684809 Blast Desc: protein product [Podospora anserina] gi|170942365|emb|CAP68017.1| protein product [Podospora anserina]
  misc_feature (27)..(494): NCBI GI: 46128697 Blast Desc: FG08726.1 [Gibberella zeae PH-1]
  misc_feature (25)..(509): NCBI GI: 116193273 Blast Desc: CHGG_06354 [Chaetomium globosum CBS 148.51] gi|88182267|gb|EAQ89735.1| CHGG_06354 [Chaetomium globosum CBS 148.51]
  misc_feature (37)..(509): NCBI GI: 256733997 Blast Desc: NECHADRAFT_99589 [Nectria haematococca mpVI 77-13-4]
  misc_feature (23)..(471): NCBI GI: 156056086 Blast Desc: SS1G_05395 [Sclerotinia sclerotiorum 1980] gi|154703179|gb|EDO02918.1| SS1G_05395 [Sclerotinia sclerotiorum 1980]
  misc_feature (153)..(508): NCBI GI: 261353322 Blast Desc: conserved [Verticillium albo-atrum VaMs.102]
  misc_feature (136)..(496): NCBI GI: 154302244 Blast Desc: BC1G_09905 [Botryotinia fuckeliana B05.10] gi|150855394|gb|EDN30586.1| BC1G_09905 [Botryotinia fuckeliana B05.10]
  misc_feature (95)..(495): NCBI GI: 85074919 Blast Desc: NCU00687 [Neurospora crassa OR74A] gi|28927640|gb|EAA36591.1| [Neurospora crassa OR74A]
  misc_feature (28)..(491): NCBI GI: 119490679 Blast Desc: NFIA_063260 [Neosartorya fischeri NRRL 181] gi|119411222|gb|EAW21165.1| NFIA_063260 [Neosartorya fischeri NRRL 181]
  misc_feature: Useful for introducing or modulating the production of volatile compounds
MSTMQGDLLGLGQTTSSDPSAKNPAAGLTLNLASNNPFRNRAASPNSLASPPPRSPFDDPPRPTSRNPFLDPDFDSSASRTVASPEKMADTKPTATATAEEIFGGLTLEDNTRKTSQSGISSNGQPPMNRPPRGPPRGENVPPRGRGPPPGSHRPTRSQEEALRARRMQAGSNGAKPAGSPQRSEQRLRRNSESSVMDKPISEEEKRARDMRRRDRERRDRNGKPRTKKLDIIDQLDATSIYGTGLFHHDGPFDACNPNRNRKGSRRAPMQAFAKDSANNTIGGSGPLNKRPDHTQFLAQEQHEAQSMYAGERKSKKEEMMLYDPKRADVEHGEETLGLGSSTFLEGTPAAMNAIVRNQNETAQEAAERDNGIGRKKSVVQRFKSIKRGPREHNDGRVASPEAYYTPRPSGAATGSTTNEANPFFAEFDKGGEEQITVRRKDSTAKSPMSPPPAIGTTLERRSTADATMDSPVDGQPKQGGGFMSRMRSLKGGRRQQQPTEPTHPGTAM

SEQ ID NO: 22754 - DNA, 4103 bp, Muscodor strobelii
  misc_feature: SGI EST ID NO. CUFF.53630.1
  misc_feature: Variant of the nucleotide sequence at SEQ ID NO 22752
gagaaaagtgactcgttgcatctggcctgcgctggtgaacgctgacagctgctcagctctgcatctctttatgcgtggctgctgctgttcctcctgcacgtgccccggaccggttcgtcgcttccttcgaagcttctttgcatgcaatagcctttcaacatccactggttattactaaaacgcacttgaataggggacagtgctgtcaacagaacaggttcatgggaaacgtgagccctttgactccggtccagtccacctcgcctgacctctatcctgcctcgtcctgcacattcacataatccattcgcattcagcgtggctgaggtctgaccattacgacttcctcccatttatgcttcatgctgggtgcgcgcgcgtgttcctcggacgtgtcggttgctgcccattgaaataatgatttgagggcccttgcatttcgatacacacctggtccattgcccatttgcactaaccgcaagacctccatcttttttttattctcggccaccgtccagtgacctctttgccttttgcacagcatccatcattccacccattttagtcattcggtaaatacctatcctgggacgtgaagtctcctcctcgttccagacattctactccttaccttacccttagcactttatctacctacttccactatcaatcatcacgatacaaccaacccgaccgtgctctttggtgcggttgtactctcatagcatcgccagcagacaggcatcgatcgatcggaacgcggactctcactcatctcgtacctgccaccgtccccgtgactgcccctacgtaccttcgtacccgctctgcataccacgcactcagcaccatctccctggacccttcaattgcgatacccgattgtgccccgttgcttgatctctgctttgggactcacgtcatcaatcgccacagcacagagaagcaatccggagtaaacctacactgcgactactcacgactgcaagatataattctcaataacttgcaaatcatagcaaatcacctttcagatcttgcggctattgcaactctaatactgcacgcaccagtcacggcatctcagagacagtgattttcagcatagcgtagcgcgcgtagcataactcaactcacctcggtcactgcacactgcacacggcacactgcacgacacacacagcataaacagcactctaaaggcagtcgctgttcctggcccagccgaaccttcccaggttgccgactttccaccaaccactggcatcgccaacagcaatagcattatcggggccgctaagtcgatctcgaccctattcgttccaccagtgcaccgttagttgccaccaccaactgtcctcgcagctctcaagccatttgccgtttgccgccgggagcataatcgcctgtgcaggaagaaccatagttcgacgctgatcgcattgaaccactcatctggcaccgtacctgatagctggcccgagaagacgaaaagctagcagactgcgacgctgggctacaaccctgtccggctgcatcccaccgcaaacactaaggttggcgacagaagcagctgtaaacgctgagcacagccgatacacacacgatgtccaccatgcagggcgatctgctcggcctaggtaagaaaaaacaagaattttcattgcattgccagcatctttagcatcgttctttccaatgtaaagcatcgaaagcctggaaactagtgtgtgctatgcaagctatgcagttcaatgcacacaaccacaaagaccgggggcagggaaatgacgacgatgcgaagaggcgatgacggcctatttatctcaatgtcgtcctccctctgctatgcaaaaaaacaggtttctttgtccggcaaattgaggtgtcgcggcccttgtctgtgcacctgggatgcctgccactgccctgccacgcttggatctgcttggctgtgccggcgggtcgaagagataacggtcgcttctgccgcccaaccggaccgtctgcttgtttcatttgtagcgcttgatgtttcacattgcctatcaccatcatcagtcctcgctgcaatcagccgcctgtttctcctgtttctcccctccccatagttaatgctgatctctgtttgccctgcgcataggccaaaccacctccagcgacccgtcggccaaaaacccagctgccggcctgacgctcaatctagcctccaacaaccctttccgcaaccgcgctgcctcacccaacagtcttgcctctcctccccccaggtcacccttcgatgaccctccccgaccaacatcgcgcaatcccttcctcgaccccgacttcgactcatctgcctcgcgcaccgtagcatcgcccgagaagatggccgacaccaagccgacagccactgccacggcagaagaaatatttggcggtctcactctcgaggacaacacacgcaagacatcgcagtccggcatcagcagcaatggacaaccccctatgaacagacctccccgtgggccccctcgtggtgaaaatgtccctccacgtggacgcggacctcctccgggatcccaccgtcctacccgatcgcaggaagaagcattgagggcacgcagaatgcaggctggctcaaacggagccaagccagctggctcacctcagcgctctgaacagcgccttcgccgcaacagcgagtcttcggtcatggacaagcccatcagtgaagaagagaagagagcacgtgatatgcgacgtcgagatagagagcgacgtgatcgcaatggcaaacccagaactaagaagctggacattatcgatcagttggatgccacgagcatctacggcaccggtctctttcaccacgacggacccttcgatgcgtgcaaccccaaccgaaaccgcaagggcagccgtcgtgcgccaatgcaagcctttgctaaagactcggcaaacaacaccatcggaggctctggccctctcaacaagagacccgaccacacccagttcctggctcaggaacaacacgaagcacagtctatgtatgctggcgagcgcaagagcaagaaggaagagatgatgctctatgaccccaagcgagctgatgtggagcacggtgaggagacacttggtttggggagctcgacattcctcgagggaacacccgctgcgatgaacgcaattgtccgtaatcagaacgagacggctcaagaggctgccgagcgcgataacggaataggccgaaagaagtcagtggtgcagcgcttcaagagcatcaagcgaggaccaagagagcacaacgacggccgtgtggctagccccgaagcctactacacccctcgtcccagtggtgctgccacaggatctaccacgaacgaggctaaccccttcttcgctgagttcgacaagggaggcgaggagcagatcaccgtccgacgtaaggacagcactgccaagtccccgatgagcccacctcctgccattggcaccacccttgagcgtcgatctactgcagatgccacgatggacagccccgtagacgggcaaccaaagcagggtggaggcttcatgtcacgcatgaggagtttgaaaggtggccgacgccagcagcaaccaactgagccgacccatcccggtacagcaatgtgaggagttggggtgaacgacgagagttaaccacgggagctactatcttgcttcattgtgattgcattagggagatcaagacacacgatccatgacaatgttaactgtgtgatgcagtatacactagagctacatcggattttagtagatttgatattgagggcatggtacagcatgcagtggattgacgaatgcgaaccaagtttacttacaggaggacaaaagactaccggctcgacaggtcagcttcatcacgctcatttctgaccccaattcctttcgcagagaagaactcatttgccttgcgcggtatggctaccagcatgaggctccagccgcaagacggttatgtaaagaagaagaagaggatcaatacagtgtgatccattggcttttgcccagattcagagcctctttctatagggttaggtactgcatagttgatacagtcacacgcatgagtttaa

SEQ ID NO: 22755 - DNA, 432 bp, Muscodor strobelii
  misc_feature: SGI cDNA ID NO. 567731
  misc_feature: Encodes the peptide sequence at SEQ ID NO 22756
atgactactttctctccaattcctgcttacgcaatcggtggcatgttattaggtctagctacgaactgcttcctcgccccgcgaaaggagtatcctcgatttggcctacctctgccgacagcacagcaagacaaacacaaatccggaaacgcaagcttggaccgtgcatctcgtgccgatgcgtatgttgcgccgtttacgttaatgaaaggaagccgcgagcttagctacggtctcgcgcttgtcgctcttcaatatcaaggctacgaaggtgctgtcacttcgttcctttctatcatttctacggcgggcttcatcgacgggcttatcgtatggcaaaacggcggcgagctgaggcagaaagccttcggtcatttttgcgctgggctagttctcactagctactctctctggcgttggagtcattcttga

SEQ ID NO: 22756 - protein, 143 aa, Muscodor strobelii
  misc_feature: SGI Peptide ID NO. 567731
  misc_feature (1)..(139): NCBI GI: 238492099 Blast Desc: conserved [Aspergillus flavus NRRL3357] gi|220695780|gb|EED52122.1| conserved [Aspergillus flavus NRRL3357]
  misc_feature (1)..(141): NCBI GI: 46116462 Blast Desc: FG04073.1 [Gibberella zeae PH-1]
  misc_feature (1)..(117): NCBI GI: 169782484 Blast Desc: [Aspergillus oryzae RIB40] gi|83774448|dbj|BAE64571.1| protein product [Aspergillus oryzae]
  misc_feature (1)..(137): NCBI GI: 256723111 Blast Desc: NECHADRAFT_81286 [Nectria haematococca mpVI 77-13-4]
  misc_feature (5)..(139): NCBI GI: 261353873 Blast Desc: conserved [Verticillium albo-atrum VaMs.102]
  misc_feature (5)..(130): NCBI GI: 67904396 Blast Desc: AN9185.2 [Aspergillus nidulans FGSC A4] gi|40742286|gb|EAA61476.1| [Aspergillus nidulans FGSC A4] gi|259485385|tpe|CBF82365.1| TPA: conserved [Aspergillus nidulans
MTTFSPIPAYAIGGMLLGLATNCFLAPRKEYPRFGLPLPTAQQDKHKSGNASLDRASRADAYVAPFTLMKGSRELSYGLALVALQYQGYEGAVTSFLSIISTAGFIDGLIVWQNGGELRQKAFGHFCAGLVLTSYSLWRWSHS

SEQ ID NO: 22757 - DNA, 840 bp, Muscodor strobelii
  misc_feature: SGI EST ID NO. CUFF.53417.0
  misc_feature: Variant of the nucleotide sequence at SEQ ID NO 22755
cgtggataacacggactttaaatcagatactaccgacgatatcccttattgccgacaaaacaaacgctccaacattacatagctctactaggttttcaatatggtaatcacatatatctttgatcataccctcgttcattttcaaaaacgtagtttccgacgaccatagcataagctcatcgcaacattctgatttttatgttgactagaaaagccctgtcaagatgactactttctctccaattcctgcttacgcaatcggtggcatgttattaggtctagctacgaactgcttcctcgccccgcgaaaggagtatcctcgatttggcctacctctgccgacagcacagcaagacaaacacaaatccggaaacgcaagcttggaccgtgcatctcgtgccgatgcgtatgttgcgccgtttacgttaatgaaaggaagccgcgagcttagctacggtctcgcgcttgtcgctcttcaatatcaaggctacgaaggtgctgtcacttcgttcctttctatcatttctacggcgggcttcatcgacgggcttatcgtatggcaaaacggcggcgagctgaggcagaaagccttcggtcatttttgcgctgggctagttctcactagctactctctctggcgttggagtcattcttgattacacgctgtgccgcgattgttcggagcaagaagactggcaaatacacatctttatgtataatatttcttcccccttgttttggaagataaaataacatgtaacttgattgtattcgctcgacatatacgattattgcgtcacaaacaatacagatatttacttggcataaacaggatttagc

SEQ ID NO: 22758 - DNA, 285 bp, Muscodor strobelii
  misc_feature: SGI cDNA ID NO. 567732
  misc_feature: Encodes the peptide sequence at SEQ ID NO 22759
atgaagctctccatcgcgacctgcgcaatcctcctgggcccccttgctatggcaaggaactgcaccccgggcctgaactactgtggcaaaaccttgctcaacatcggcaattaccaaccccagatcgaccaatgcctagctgacgaaggcgagaccgaaatcaacgacggccgtaacgatctcttcaaatgcgtcgggggcaacaacggcgtcatcagtttcatctcgcattgccaggtcggatgcgttgacgggggaagcgggctgaacgacttttgcgcataa

SEQ ID NO: 22759 - protein, 94 aa, Muscodor strobelii
  misc_feature: SGI Peptide ID NO. 567732
  misc_feature (19)..(93): NCBI GI: 121719743 Blast Desc: conserved [Aspergillus clavatus NRRL 1] gi|119404782|gb|EAW15144.1| conserved [Aspergillus clavatus NRRL 1]
  misc_feature (20)..(93): NCBI GI: 159122750 Blast Desc: conserved [Aspergillus fumigatus A1163]
  misc_feature (12)..(93): NCBI GI: 256722442 Blast Desc: NECHADRAFT_105943 [Nectria haematococca mpVI 77-13-4]
  misc_feature (12)..(93): NCBI GI: 85095281 Blast Desc: NCU05788 [Neurospora crassa OR74A] gi|28921507|gb|EAA30812.1| conserved [Neurospora crassa OR74A]
  misc_feature (19)..(93): NCBI GI: 119495721 Blast Desc: NFIA_014320 [Neosartorya fischeri NRRL 181] gi|119412801|gb|EAW22742.1| conserved [Neosartorya fischeri NRRL 181]
  misc_feature (1)..(93): NCBI GI: 256725910 Blast Desc: NECHADRAFT_122668 [Nectria haematococca mpVI 77-13-4]
  misc_feature (11)..(93): NCBI GI: 121716168 Blast Desc: conserved [Aspergillus clavatus NRRL 1] gi|119403850|gb|EAW14267.1| conserved [Aspergillus clavatus NRRL 1]
  misc_feature (19)..(93): NCBI GI: 145257658 Blast Desc: An04g04460 [Aspergillus niger] gi|134058726|emb|CAK38710.1| protein product [Aspergillus niger]
  misc_feature (1)..(93): NCBI GI: 240105140 Blast Desc: CPC735_047030 [Coccidioides posadasii C735 delta SOWgp]
  misc_feature (12)..(93): NCBI GI: 119174452 Blast Desc: CIMG_09208 [Coccidioides immitis RS]
MKLSIATCAILLGPLAMARNCTPGLNYCGKTLLNIGNYQPQIDQCLADEGETEINDGRNDLFKCVGGNNGVISFISHCQVGCVDGGSGLNDFCA

SEQ ID NO: 22760 - DNA, 666 bp, Muscodor strobelii
  misc_feature: SGI cDNA ID NO. 567733
  misc_feature: Encodes the peptide sequence at SEQ ID NO 22761
atgatttccattccgtttactttgtttgacattttgttcgacagccccgtcgggattaccttccttctcgctgtcctcgggtgctggttcttcaccaagaacatccgagaatgtccgggattttctactggatccgagcattgttgctgccacacccatccagacttcgaccagaaatcggtgtcttcttcaagcaagatcttcggcaccgtatacacgatattttctcttgttctcatcctatgtctcatgctcggtgaggcatacatcctccttacgaacacaactggaatggttcaatacttcatggcagcaactctccttatttggttctggtgttccttccgcctggcatttcagaagtacttcaatcaccctagtcgttgtgtgtgtgtctgtcactacactgacgactttaaggagactaaaactgcggtagcttggtactatttcgagcataacatcgttccctggctcttcgtctgggtcgctcttctgtccgtcatgtttgtccttggcatcttccagatgatcatcgtgtatctactcggcgtctttcaaatgttgcttatgagcattgtgcattggtcgccagtcgacccggttaccggtaaacgccctgctccttcgccccttcacttcggtcctcgttttgctcgattctag

SEQ ID NO: 22761 - protein, 221 aa, Muscodor strobelii
  misc_feature: SGI Peptide ID NO. 567733
MISIPFTLFDILFDSPVGITFLLAVLGCWFFTKNIRECPGFSTGSEHCCCHTHPDFDQKSVSSSSKIFGTVYTIFSLVLILCLMLGEAYILLTNTTGMVQYFMAATLLIWFWCSFRLAFQKYFNHPSRCVCVCHYTDDFKETKTAVAWYYFEHNIVPWLFVWVALLSVMFVLGIFQMIIVYLLGVFQMLLMSIVHWSPVDPVTGKRPAPSPLHFGPRFARF

SEQ ID NO: 22762 - DNA, 1389 bp, Muscodor strobelii
  misc_feature: SGI cDNA ID NO. 567734
  misc_feature: Encodes the peptide sequence at SEQ ID NO 22763
atggccggctacagcttctcacacgccatcttggctctttttgcccttgttgtcacaaaggtcgcttggggtgcaccatggggtttccacggccctgaattgcacgccaaatacggagagactgtccgcattgcccctgatgagctgtcatatgttcagggacaagcatacaaggacattcttggacgacccggcaagaaggaaatgctcaaggacccggcctttgctggtacgaaggtcaatggtgcctggactatggtcacggcccctcacgacgatcatcgccgaatgcgccgtctctttactcacggcttcagtaccaccgctctccgcgctcaggagccgcttctcgtcaagtactgcgaccggatggtagggaagattgaggaagttgctaaggctgctaagggtgcagtcaacattctcgatgttttgaacttcaccactttcgatatcatggctgagctttctttcggcgaatcattgaacatgttagagactatggagtacagtccctgggtctcaattatcttcaagggtctcaaattcgtctgcttccgtggtgttctcccctcagtgcccgtcatcggtccccttctctcggcatacatggctcctaagatcgagaagcgaagtgccgaccaccagagatttgccaacgagctcgtcgacaagcgaatggcttggactgactgcgacaagcccgatttttggaacttcgtcttgcgccacaatgaggacggcaaaggtctcagccgcgcagaaatgcaaaccaatgctgcagccttcatggttgctggtaccgacaccactgctggaactacttcgggcatcatttggcacttgtgcaaggacagacgcgttctcaacaaacttgtcaaagagattcgcgagacattcaagcacactgatgaaatttctcttggccctctcttggaaatggagtacctgaatgctgttattgctgagggtctgcgtctttacacacctggtggtgctggcatcactcgtatcgttcccgaaggcggcgccgaagtgctcggcgacttcattcctgagggcatgtctgtcactattcaaagttatactgcctatcgccacccatccaactttgctgagggtgacaagatggtccccgagcgatggattgataaggacgaccccaagtgggctaatgatcggaaggatgtttacgaaccatttggttgggggcccagaaactgcattggcaagaatcttgccatgctggaactccgcctgctcctctgcaagacactgtaccattacgatatcagcctacgcccagaatgcgacgaatggattaagcagaagactttcatcacatggcagaaaccagctcttatgatcaatgcggagcgaaaacaatag

SEQ ID NO: 22763 - protein, 462 aa, Muscodor strobelii
  misc_feature: SGI Peptide ID NO. 567734
  misc_feature (1)..(458): Pfam Id: PF00067 Pfam Desc: Cytochrome P450
  misc_feature (246)..(458): Pfam Id: PF00067 Pfam Desc: Cytochrome P450
  misc_feature (86)..(166): Pfam Id: PF00067 Pfam Desc: Cytochrome P450
  misc_feature (33)..(456): NCBI GI: 121707561 Blast Desc: toxin biosynthesis cytochrome P450 monooxygenase, [Aspergillus clavatus NRRL 1] gi|119400022|gb|EAW10448.1| toxin biosynthesis cytochrome P450 monooxygenase, [Aspergillus clavatus
  misc_feature (33)..(457): NCBI GI: 145247518 Blast Desc: An12g09560 [Aspergillus niger] gi|134080747|emb|CAL00861.1| protein product [Aspergillus niger]
  misc_feature (34)..(458): NCBI GI: 46114698 Blast Desc: FG03191.1 [Gibberella zeae PH-1]
  misc_feature (35)..(456): NCBI GI: 39971031 Blast Desc: MGG_02982 [Magnaporthe grisea 70-15] gi|149210571|ref|XP_001522660.1| MGCH7_ch7g760 [Magnaporthe grisea 70-15] gi|86196715|gb|EAQ71353.1| MGCH7_ch7g760 grisea
  misc_feature (33)..(460): NCBI GI: 255948778 Blast Desc: Pc22g12100 [Penicillium chrysogenum Wisconsin 54-1255] gi|211592173|emb|CAP98498.1| Pc22g12100 [Penicillium chrysogenum Wisconsin 54-1255]
  misc_feature (8)..(456): NCBI GI: 169783630 Blast Desc: [Aspergillus oryzae RIB40] gi|83775021|dbj|BAE65144.1| protein product [Aspergillus oryzae]
  misc_feature (34)..(461): NCBI GI: 255945441 Blast Desc: Pc20g09940 [Penicillium chrysogenum Wisconsin 54-1255] gi|211588223|emb|CAP86323.1| Pc20g09940 [Penicillium chrysogenum Wisconsin 54-1255]
  misc_feature (33)..(457): NCBI GI: 121716300 Blast Desc: benzoate 4-monooxygenase cytochrome P450 [Aspergillus clavatus NRRL 1] gi|119403916|gb|EAW14333.1| benzoate 4-monooxygenase cytochrome P450 [Aspergillus clavatus NRRL 1]
  misc_feature (34)..(457): NCBI GI: 115391773 Blast Desc: [Aspergillus terreus NIH2624] gi|114194315|gb|EAU36015.1| [Aspergillus terreus NIH2624]
  misc_feature (33)..(460): NCBI GI: 119500518 Blast Desc: toxin biosynthesis cytochrome P450 monooxygenase, [Neosartorya fischeri NRRL 181] gi|119415181|gb|EAW25119.1| toxin biosynthesis cytochrome P450 monooxygenase, [Neosartorya fischeri
  misc_feature (87)..(432): SWISSPROT Homolog: EC 1.14.14.1 Unspecific monooxygenase
MAGYSFSHAILALFALVVTKVAWGAPWGFHGPELHAKYGETVRIAPDELSYVQGQAYKDILGRPGKKEMLKDPAFAGTKVNGAWTMVTAPHDDHRRMRRLFTHGFSTTALRAQEPLLVKYCDRMVGKIEEVAKAAKGAVNILDVLNFTTFDIMAELSFGESLNMLETMEYSPWVSIIFKGLKFVCFRGVLPSVPVIGPLLSAYMAPKIEKRSADHQRFANELVDKRMAWTDCDKPDFWNFVLRHNEDGKGLSRAEMQTNAAAFMVAGTDTTAGTTSGIIWHLCKDRRVLNKLVKEIRETFKHTDEISLGPLLEMEYLNAVIAEGLRLYTPGGAGITRIVPEGGAEVLGDFIPEGMSVTIQSYTAYRHPSNFAEGDKMVPERWIDKDDPKWANDRKDVYEPFGWGPRNCIGKNLAMLELRLLLCKTLYHYDISLRPECDEWIKQKTFITWQKPALMINAERKQ

SEQ ID NO: 22764 - DNA, 1770 bp, Muscodor strobelii
  misc_feature: SGI EST ID NO. CUFF.53448.0
  misc_feature: Variant of the nucleotide sequence at SEQ ID NO 22762
gggaataccatagccatgagttctcttgcctgtatatagtgtccatgaaccccagttctggatctcggtctttgtcggtctgttccgtttgactgacctttattcacacatatccgtagacggcggaaccatcacagtcatggccggctacagcttctcacacgccatcttggctctttttgcccttgttgtcacaaaggtaatgactaaatgaccatagacccacttcaacatagataatgcgaaagaacagaaacttcttcgcaacaagagactgatcatgcaataggtcgcttggggtgtcatatacaacctcttcttccatcctctaaggaaatatcctggaccgctaatatggagggctactgcatttccttacaagcttgctctcgttcaaggcaccatggggtttccacggccctgaattgcacgccaaatacggagagactgtccgcattgcccctgatgagctgtcatatgttcagggacaagcatacaaggacattcttggacgacccggcaagaaggaaatgctcaaggacccggcctttgctggtacgaaggtcaatggtgcctggactatggtcacggcccctcacgacgatcatcgccgaatgcgccgtctctttactcacggcttcagtaccaccgctctccgcgctcaggagccgcttctcgtcaagtactgcgaccggatggtagggaagattgaggaagttgctaaggctgctaagggtgcagtcaacattctcgatgttttgaacttcaccactttcgatatcatggctgagctttctttcggcgaatcattgaacatgttagagactatggagtacagtccctgggtctcaattatcttcaagggtctcaaattcgtctgcttccgtggtgttctcccctcagtgcccgtcatcggtccccttctctcggcatacatggctcctaagatcgagaagcgaagtgccgaccaccagagatttgccaacgagctcgtcgacaagcgaatggcttggactgactgcgacaagcccgatttttggaacttcgtcttgcgccacaatgaggacggcaaaggtctcagccgcgcagaaatgcaaaccaatgctgcagccttcatggttgctggtaccgacaccactgctggaactacttcgggcatcatttggcacttgtgcaaggacagacgcgttctcaacaaacttgtcaaagagattcgcgagacattcaagcacactgatgaaatttctcttggccctctcttggaaatggagtacctgaatgctgttattgctgagggtctgcgtctttacacacctggtggtgctggcatcactcgtatcgttcccgaaggcggcgccgaagtgctcggcgacttcattcctgagggcatgtctgtcactattcaaagttatactgcctatcgccacccatccaactttgctgagggtgacaagatggtccccgagcgatggattgataaggacgaccccaagtgggctaatgatcggaaggatgtttacgaaccatttggttgggggcccagaaactgcattggcaagaatcttgccatgctggaactccgcctgctcctctgcaagacactgtaccattacgatatcagcctacgcccagaatgcgacgaatggattaagcagaagactttcatcacatggcagaaaccagctcttatgatcaatgcggagcgaaaacaatagacaatagactagcgagttttagtatttaatttgtatatatttctttctaatacct

SEQ ID NO: 22765 - DNA, 1569 bp, Muscodor strobelii
  misc_feature: SGI cDNA ID NO. 567735
  misc_feature: Reduced expression when VOC is produced
  misc_feature: Encodes the peptide sequence at SEQ ID NO 22766
atggccgctcttcgtcaagcgcctgtgccgtccgccaggttgcttcgctatctgcgccatcaaacagagaccttcaacttcttccatcccacccacgatgtctctcctaccgtgaggcggcaggtggcgcgcaaactccaatgcccagctcgcaagcaggtggcttctctacgcgccggcatcttcgatttcgagactctcgtgccagtccagccactgcgcaccagacacgtcccttgccctgcacccgccctgcgccgctactcgtcacagcgtgaacccaccccatgccgaaccacctggaaagactacctctggggcctgggcaccaagcgcatagggcggcccttggaacccgacgatctgcccgagatggacggcgagggcgggaataattccatgttcaacacccgccgccagctcagccagaaggccgccctcgagcccaggctgcgctgcaccgaggtcgacgagaacggcaacgtcatattggtagacagcgagttcaagaagagtgagctgatcgcaaagtttggcttgctccctcgcgatctccgcaagatcgactcctccaacctgccacacatcctcgtccgcccaacatccatactcctcaacctgctccacctcaaggtactgatcaagcacaaccgggtcctcctcttcgacgtctatggcaccaaggcctcctacccgcagtccgcgttcatgtacgacctccaaggcaaactccaacagaagaccgccgccgtcaatggcagtctcccctacgaattccgcgccctcgaagctgtcctccaatccgtaacccaggaactcgaggctgactttgatgccgttcgcgacccggtcattcgcatcctcggcgagctcgaagatgacatcgacagacacaagctgcgcatcttgctcatcctatccaagcgcgtgagcacctttgagcagaaggcaaagctggttcgcgacgcaatcgacgagttgctcgaggcggacgacgatctggccgctatgtacctgactgagaagacacacgatatccaccgccagctcgacgatcacaccgaagtcgagatgctgctggaatcatatcataaactctgcgatgaaattgtccaggaggcgcagaacttggtgtcttctatccggaacaccgaggaaatcatccgcgccatcctcgacgccaatcgcaacgccctcatgcttctcgatctgaagttctccgtcggcacactcggtctagccatgggcactttcatcgccggcctctacggcgccaatcttgagaacttcatcgaagagacgaattggggtttcggcgcagtgacgggtgttagtgtcatcatgtcactgcttgtctgcaaatacggactctcgaaactgagacatctgcaacgaattaagatgcaaggcaacgatgcttcgccgaggaggggtggagattatcattggttccatgacgatggacatgtcggcttactcgacccgaggaatagggagaagttgagacgactgcagagtaataagaagcagggtgagaagcagggccaggggaagaggagttggtggtga

SEQ ID NO: 22766 - protein, 522 aa, Muscodor strobelii
  misc_feature: SGI Peptide ID NO. 567735
  misc_feature (148)..(459): Pfam Id: PF01544 Pfam Desc: CorA-like Mg2+ transporter protein
  misc_feature (148)..(451): Pfam Id: PF01544 Pfam Desc: CorA-like Mg2+ transporter protein
  misc_feature (8)..(521): NCBI GI: 46128565 Blast Desc: FG08660.1 [Gibberella zeae PH-1] gi|83288309|sp|Q4I298.1|MRS2_GIBZE RecName: Full=Mitochondrial inner membrane magnesium transporter mrs2; AltName: protein MRS2;
  misc_feature (3)..(519): NCBI GI: 116193541 Blast Desc: CHGG_06488 [Chaetomium globosum CBS 148.51] gi|88182401|gb|EAQ89869.1| CHGG_06488 [Chaetomium globosum CBS 148.51]
  misc_feature (3)..(522): NCBI GI: 85115629 Blast Desc: inner membrane magnesium transporter MRS2, mitochondrial precursor [Neurospora crassa OR74A] gi|74618497|sp|Q7SFQ9.1|MRS2_NEUCR RecName: Full=Mitochondrial
  misc_feature (3)..(519): NCBI GI: 171684493 Blast Desc: protein product [Podospora anserina] gi|170942207|emb|CAP67859.1| protein product [Podospora anserina]
  misc_feature (8)..(520): NCBI GI: 149210063 Blast Desc: MGCH7_ch7g513 [Magnaporthe grisea 70-15] gi|86196468|gb|EAQ71106.1| MGCH7_ch7g513 [Magnaporthe grisea 70-15]
  misc_feature (8)..(518): NCBI GI: 145610036 Blast Desc: MGG_02763 [Magnaporthe grisea 70-15] gi|145017423|gb|EDK01786.1| MGG_02763 [Magnaporthe grisea 70-15]
  misc_feature (101)..(487): NCBI GI: 154302390 Blast Desc: BC1G_09979 [Botryotinia fuckeliana B05.10] gi|150855467|gb|EDN30659.1| BC1G_09979 [Botryotinia fuckeliana B05.10]
  misc_feature (9)..(478): NCBI GI: 225678142 Blast Desc: inner membrane magnesium transporter mrs2 [Paracoccidioides brasiliensis Pb03]
  misc_feature (9)..(478): NCBI GI: 226287640 Blast Desc: inner membrane magnesium transporter mrs2 [Paracoccidioides brasiliensis Pb18]
  misc_feature (9)..(478): NCBI GI: 226279531 Blast Desc: inner membrane magnesium transporter mrs2 [Paracoccidioides brasiliensis Pb01]
  misc_feature: Useful for introducing or modulating the production of volatile compounds
MAALRQAPVPSARLLRYLRHQTETFNFFHPTHDVSPTVRRQVARKLQCPARKQVASLRAGIFDFETLVPVQPLRTRHVPCPAPALRRYSSQREPTPCRTTWKDYLWGLGTKRIGRPLEPDDLPEMDGEGGNNSMFNTRRQLSQKAALEPRLRCTEVDENGNVILVDSEFKKSELIAKFGLLPRDLRKIDSSNLPHILVRPTSILLNLLHLKVLIKHNRVLLFDVYGTKASYPQSAFMYDLQGKLQQKTAAVNGSLPYEFRALEAVLQSVTQELEADFDAVRDPVIRILGELEDDIDRHKLRILLILSKRVSTFEQKAKLVRDAIDELLEADDDLAAMYLTEKTHDIHRQLDDHTEVEMLLESYHKLCDEIVQEAQNLVSSIRNTEEIIRAILDANRNALMLLDLKFSVGTLGLAMGTFIAGLYGANLENFIEETNWGFGAVTGVSVIMSLLVCKYGLSKLRHLQRIKMQGNDASPRRGGDYHWFHDDGHVGLLDPRNREKLRRLQSNKKQGEKQGQGKRSWW

SEQ ID NO: 22767 - DNA, 2340 bp, Muscodor strobelii
  misc_feature: SGI EST ID NO. CUFF.53439.0
  misc_feature: Variant of the nucleotide sequence at SEQ ID NO 22765
cgctccccaaatctatcccgaatcaagctgtgattgtgattcaggttctagcttcacggcagataccatggacatacacgcaagcaacctagcaatatagcgcccttcctctcgcatagccacagacatggccgctcttcgtcaagcgcctgtgccgtccgccaggttgcttcgctatctgcgccatcaaacagagaccttcaacttcttccatcccacccacgatgtctctcctaccgtgaggcggcaggtggcgcgcaaactccaatgcccagctcgcaagcaggtggcttctctacgcgccggcatcttcgatttcgagactctcgtgccagtccagccactgcgcaccagacacgtcccttgccctgcacccgccctgcgccgctactcgtcacagcgtgaacccaccccatgccgaaccacctggaaagactacctctggggcctgggcaccaagcgcatagggcggcccttggaacccgacgatctgcccgagatggacggcgagggcgggaataattccatgttcaacacccgccgccagctcagccagaaggccgccctcgagcccaggctgcgctgcaccgaggtcgacgagaacggcaacgtcatattggtagacagcgagttcaagaagagtgagctgatcgcaaagtttggcttgctccctcgcgatctccgcaagatcgactcctccaacctgccacacatcctcgtccgcccaacatccatactcctcaacctgctccacctcaaggtactgatcaagcacaaccgggtcctcctcttcgacgtctatggcaccaaggcctcctacccgcagtccgcgttcatgtacgacctccaaggcaaactccaacagaagaccgccgccgtcaatggcagtctcccctacgaattccgcgccctcgaagctgtcctccaatccgtaacccaggaactcgaggctgactttgatgccgttcgcgacccggtcattcgcatcctcggcgagctcgaagatgacatcgacagacacaagctgcgcatcttgctcatcctatccaagcgcgtgagcacctttgagcagaaggcaaagctggttcgcgacgcaatcgacgagttgctcgaggcggacgacgatctggccgctatgtacctgactgagaagacacacgatatccaccgccagctcgacgatcacaccgaagtcgagatgctgctggaatcatatcataaactctgcgatgaaattgtccaggaggcgcagaacttggtgtcttctatccggaacaccgaggaaatcatccgcgccatcctcgacgccaatcgcaacgccctcatgcttctcgatctgaagttctccgtcggcacactcggtctagccatgggcactttcatcgccggcctctacggcgccaatcttgagaacttcatcgaagagacgaattggggtttcggcgcagtgacgggtgttagtgtcatcatgtcactgcttgtctgcaaatacggactctcgaaactgagacatctgcaacgaattaagatgcaaggcaacgatgcttcgccgaggaggggtggagattatcattggttccatgacgatggacatgtcggcttactcgacccgaggaatagggagaagttgagacgactgcagagtaataagaagcagggtgagaagcagggccaggggaagaggagttggtggtgagggaactgacgcttcgaagtggagtgccatttcccatcaagagccggaaaatattggtggatgtgattaccagccataaccagcaacccaatccgaacccatactccttgggaacatcacctacgatgtcctcgacggctcttgccacaggacttcgggaggtcaaatacgatggaaggcaagacgccaatgtccgctcgctagatgccaagacggtcatctggttatgatatgagtccaaaaggcagagcagtgcgtaacgagtccttcaccagagcaaggataactacggaaagtggattgttgcattttgggcgtatggagcatttttggactagatgagtgtactatcatgggtcatataagagaacggcgttgatgatctagcatcggtctttgtacatcaggaaagggatgtgggggtttagatacttgcatgtactgacttcacacctcttattagcgagttccgcgaattctcacctccgaggaaagtctgttatggcgggaagtgtatagatatgatatcatccgcgaggattttgtatactagggatataaatgatatcttgtacttcaaatttgatacgctgccgtggtcgtaagttaaggagggagttaggtgctggtaagtatgggaggta

SEQ ID NO: 22768 - DNA, 1095 bp, Muscodor strobelii
  misc_feature: SGI cDNA ID NO. 567736
  misc_feature: Encodes the peptide sequence at SEQ ID NO 22769
atggagctgacacccatcaaaatccgtggcaaacgccgccgcaaaggcgatccacctcctgtaccccagtctaagcgtccaaaaaacaaagacaacaggaagcgcaacacaaagcctcgccccaaggcttccgatatacagaggtctctgcccctcgagattctcgagcaaatcttctggttcagcgagaacgtcaatttccccaaggccagccccctcatcggctccaagctctccggtcctcccaccctccgcaagaccttcaaccaggcattcggtccaacttgggatgtatggtttggatgttgtgttggtggaccgccaatgctctcggacgatggtcttaggcagctccaaattcacagctatcttggctgtctgggagacgcgcaacgccttggtggaaaccccgatttccagagtgcggtattgaatgaatcttgggtcaccattgacttgattcttgatagctgggacgtctgggttcgaaggtatgcatgggatcggagtctcatccatgcaccactatggatggaccagctaaacgtgactgaaccttacgattcctatgtcgagcgaaaccttgaggttactactggcccgggccaaataaaacaagctagacactacttctaccgcgatttctacctccatcagaagttcctagaggacgcgggaaatcgatactcaccactttggtacggcggatacaattggattcaacttcacatcaacatcaccattccggaagctctcctaatgggaccatgggacgaagcagcaactcaaaagctcttttggatcgttcggggttgcgttctagtgggcggagcacaccccaggacgtcttgggaagtcacgaggcttggttacttgaatgctcttcgtgctttgaacattaccgttctgcatttattgaaaatgcttcatgtcgacagtttctggccaaggcatgttagagacgaactcgcggaagcagtcaatgcgtccagaaaagagatggaacggatacagggtgacacgacgacaatacattggttggagagagagctcgattacgtagatccgcaaagaatgtgggttcggcatcattga

SEQ ID NO: 22769 - protein, 364 aa, Muscodor strobelii
  misc_feature: SGI Peptide ID NO. 567736
  misc_feature (1)..(291): NCBI GI: 85115633 Blast Desc: NCU09092 [Neurospora crassa OR74A] gi|28926706|gb|EAA35673.1| NCU09092 [Neurospora crassa OR74A]
  misc_feature (1)..(322): NCBI GI: 46128567 Blast Desc: FG08661.1 [Gibberella zeae PH-1]
  misc_feature (50)..(331): NCBI GI: 156055872 Blast Desc: SS1G_05288 [Sclerotinia sclerotiorum 1980] gi|154703072|gb|EDO02811.1| SS1G_05288 [Sclerotinia sclerotiorum 1980]
  misc_feature (1)..(271): NCBI GI: 256734133 Blast Desc: NECHADRAFT_35724 [Nectria haematococca mpVI 77-13-4]
  misc_feature (1)..(267): NCBI GI: 154302392 Blast Desc: BC1G_09980 [Botryotinia fuckeliana B05.10] gi|150855468|gb|EDN30660.1| BC1G_09980 [Botryotinia fuckeliana B05.10]
  misc_feature (1)..(287): NCBI GI: 39970595 Blast Desc: MGG_02764 [Magnaporthe grisea 70-15] gi|149210065|ref|XP_001522407.1| MGCH7_ch7g514 [Magnaporthe grisea 70-15] gi|86196469|gb|EAQ71107.1| MGCH7_ch7g514 grisea
  misc_feature (49)..(332): NCBI GI: 171685001 Blast Desc: protein product [Podospora anserina] gi|170942461|emb|CAP68113.1| protein product [Podospora anserina]
  misc_feature (50)..(291): NCBI GI: 116193543 Blast Desc: CHGG_06489 [Chaetomium globosum CBS 148.51] gi|88182402|gb|EAQ89870.1| CHGG_06489 [Chaetomium globosum CBS 148.51]
  misc_feature (1)..(165): NCBI GI: 121703822 Blast Desc: conserved [Aspergillus clavatus NRRL 1] gi|119398319|gb|EAW08749.1| conserved [Aspergillus clavatus NRRL 1]
  misc_feature (3)..(97): NCBI GI: 145235169 Blast Desc: An03g03510 [Aspergillus niger] gi|134057914|emb|CAK47791.1| protein product [Aspergillus niger]
MELTPIKIRGKRRRKGDPPPVPQSKRPKNKDNRKRNTKPRPKASDIQRSLPLEILEQIFWFSENVNFPKASPLIGSKLSGPPTLRKTFNQAFGPTWDVWFGCCVGGPPMLSDDGLRQLQIHSYLGCLGDAQRLGGNPDFQSAVLNESWVTIDLILDSWDVWVRRYAWDRSLIHAPLWMDQLNVTEPYDSYVERNLEVTTGPGQIKQARHYFYRDFYLHQKFLEDAGNRYSPLWYGGYNWIQLHINITIPEALLMGPWDEAATQKLFWIVRGCVLVGGAHPRTSWEVTRLGYLNALRALNITVLHLLKMLHVDSFWPRHVRDELAEAVNASRKEMERIQGDTTTIHWLERELDYVDPQRMWVRHH

SEQ ID NO: 22770 - DNA, 1764 bp, Muscodor strobelii
  misc_feature: SGI EST ID NO. CUFF.53441.0
  misc_feature: Variant of the nucleotide sequence at SEQ ID NO 22768
tgagaatcacctctcagtcgattcgactgtgtacatgagcgttaatcagagcgttatgtgattctgttgtgaaaagattatgcgcttcattaactgtagagtcacctcaggctttatgctgaatttgttgcctgctaatcaaaattacctggtattctgtattgcaacttccatcttgacgaataattcccacattggcagtagttgttgccatctctgaagccattgctgggcaagaaccaatttgcgatttccatcactacctgcctaccttgtcaaccccaacaaccagaagtcggtattgcccttggctaaactttgttgaccgtaccgtgccgcgattttcacgttcttcccaccaagtccaagctcatacacaaccaacacttactctctatccatcattctcctgtcaagttttctgcgcaatggagctgacacccatcaaaatccgtggcaaacgccgccgcaaaggcgatccacctcctgtaccccagtctaagcgtccaaaaaacaaagacaacaggaagcgcaacacaaagcctcgccccaaggcttccgatatacagaggtctctgcccctcgagattctcgagcaaatcttctggttcagcgagaacgtcaatttccccaaggccagccccctcatcggctccaagctctccggtcctcccaccctccgcaagaccttcaaccaggcattcggtccaacttgggatgtatggtttggatgttgtgttggtggaccgccaatgctctcggacgatggtcttaggcagctccaaattcacagctatcttggctgtctgggagacgcgcaacgccttggtggaaaccccgatttccagagtgcggtattgaatgaatcttgggtcaccattgacttgattcttgatagctgggacgtctgggttcgaaggtatgcatgggatcggagtctcatccatgcaccactatggatggaccagctaaacgtgactgaaccttacgattcctatgtcgagcgaaaccttgaggttactactggcccgggccaaataaaacaagctagacactacttctaccgcgatttctacctccatcagaagttcctagaggacgcgggaaatcgatactcaccactttggtacggcggatacaattggattcaacttcacatcaacatcaccattccggaagctctcctaatgggaccatgggacgaagcagcaactcaaaagctcttttggatcgttcggggttgcgttctagtgggcggagcacaccccaggacgtcttgggaagtcacgaggcttggttacttgaatgctcttcgtgctttgaacattaccgttctgcatttattgaaaatgcttcatgtcgacagtttctggccaaggcatgttagagacgaactcgcggaagcagtcaatgcgtccagaaaagagatggaacggatacagggtgacacgacgacaatacattggttggagagagagctcgattacgtagatccgcaaagaatgtgggttcggcatcattgattggaagctataaatttaaacatcaccaatgtatgatagtttatatcctaacttgcccactgcaggcgaaaaagacagaatcgatgttaatgcagataccggcttaaagcattgtacaaatggccgattaacaagccgaagaagaaactgcataatatcttgactaagctgtgttttggataccatagtaattagcaggataattctcagaggtagatattgaatcgcacctcataataca

SEQ ID NO: 22771 - DNA, 1674 bp, Muscodor strobelii
  misc_feature: SGI cDNA ID NO. 567737
  misc_feature: Encodes the peptide sequence at SEQ ID NO 22772
atggggggtttgtttggcgatgtgtcgccagccggcactctcgcgattggtatcatagtcggcctcatatctacgagcgtccaatctctcggcctcaccctccagcgaaagtcacacatgctcgaagatgaaaaaggcccccacgaaatccagagaccaccctatcgccggcgcaggtggcagctgggcatgggcatgttcgtcatatccaacgtcctcggcagcaccatccagatctctacgctcccactccccgtcctctccacactccaggccgctggcctagtcttcaactcgatatgcgcgaccctcatactcggcgagcccttcacaagatggtcattctggggcactgctctcgtcgccattggcgctggactcatcgctgtcttcggcgctataccctcgcctgcgcatagcctgcgcgagctactagaactgttggggcgttggcagttcattctttggatggcctttcaaggcgtcatcgtcctggccatgaccatcaccgtcgagcttgttgcacgcttcaagaacatatcgcaaaaccccaagttccgtctcgcgcggggcttagcatatggatgcatttccggcattctctccgcccattctcttttattcgcaaagtcagccgtcgaactcatcctgcgtactattgcagacagcgacaaccagtttgtccattggcaatcctggatcttagtacttggtcttgtggctcttgcgctgagccaattgtattatctacatcgcggcctgaaactggtctcgacctccgttttatacccacttgttttctgcatttacaacatcattgccattctagacgggctcatatacttccgccagacagacctcatttcgcctcttcacggcggtctaatcacgcttggcactgcgattttactttcaggtgttctagcactaagttggagactgagcgacgagcaacatccacccgccgtgggtcagagtctcgttacgccggggttgggactcgtcgaggataccgagggagaggagagcacagtagattctgacgacctggatgaggaggccgatgcgccaacgagttacgatacgttcgcgccgagggaaccattgagcaggaaacagagtctgaggtggcaggacgatatctgggatgagctcgacgatcagaatgggagccgtccacttcttggcggcggtagagcacgctccagtaccatgccttcgagagccatgactgaggggaccccgttacttgcaagccaccgtctggtttctggggagagtacgacttctctcacaacgccgggcagagagaacccgaggaggatcttcaggaagaggaggaaatctactggattccctgggttccaagccaggaaacatgaccgaaagacttcatcaggggctcatgatgcgcttggtggtctcttgaagttaagatggtggaagcataaacatggaaacggagaacatgatgtcgccgttgacagcccgccgggttctagttcgagcgcgcgcccatttggcaggagaagtggcgaaggacgcactccgcggttcgcagatgacccagagcagggactgagcaggcatcaggatgaacctagtcccggtacgaggccgagtgatagcggtggtgatagacctcctggtccaacaggcgatgatgcagtatga

SEQ ID NO: 22772 - protein, 557 aa, Muscodor strobelii
  misc_feature: SGI Peptide ID NO. 567737
  misc_feature (3)..(551): NCBI GI: 116193511 Blast Desc: CHGG_06473 [Chaetomium globosum CBS 148.51] gi|88182386|gb|EAQ89854.1| CHGG_06473 [Chaetomium globosum CBS 148.51]
  misc_feature (15)..(502): NCBI GI: 256733974 Blast Desc: [Nectria haematococca mpVI 77-13-4]
  misc_feature (13)..(483): NCBI GI: 46128429 Blast Desc: FG08592.1 [Gibberella zeae PH-1]
  misc_feature (21)..(551): NCBI GI: 171684895 Blast Desc: protein product [Podospora anserina] gi|170942408|emb|CAP68060.1| protein product [Podospora anserina]
  misc_feature (3)..(484): NCBI GI: 85114079 Blast Desc: NCU07447 [Neurospora crassa OR74A] gi|28926423|gb|EAA35398.1| conserved [Neurospora crassa OR74A]
  misc_feature (3)..(555): NCBI GI: 39970609 Blast Desc: MGG_02771 [Magnaporthe grisea 70-15] gi|149210079|ref|XP_001522414.1| MGCH7_ch7g521 [Magnaporthe grisea 70-15] gi|86196476|gb|EAQ71114.1| MGCH7_ch7g521 grisea
  misc_feature (3)..(367): NCBI GI: 258572466 Blast Desc: conserved [Uncinocarpus reesii 1704] gi|237905265|gb|EEP79666.1| conserved [Uncinocarpus reesii 1704]
  misc_feature (1)..(470): NCBI GI: 121704128 Blast Desc: DUF803 domain protein [Aspergillus clavatus NRRL 1] gi|119398472|gb|EAW08902.1| DUF803 domain protein [Aspergillus clavatus NRRL 1]
  misc_feature (1)..(349): NCBI GI: 159122651 Blast Desc: DUF803 domain protein [Aspergillus fumigatus A1163]
  misc_feature (3)..(427): NCBI GI: 239610195 Blast Desc: DUF803 domain-containing protein [Ajellomyces dermatitidis ER-3]
MGGLFGDVSPAGTLAIGIIVGLISTSVQSLGLTLQRKSHMLEDEKGPHEIQRPPYRRRRWQLGMGMFVISNVLGSTIQISTLPLPVLSTLQAAGLVFNSICATLILGEPFTRWSFWGTALVAIGAGLIAVFGAIPSPAHSLRELLELLGRWQFILWMAFQGVIVLAMTITVELVARFKNISQNPKFRLARGLAYGCISGILSAHSLLFAKSAVELILRTIADSDNQFVHWQSWILVLGLVALALSQLYYLHRGLKLVSTSVLYPLVFCIYNIIAILDGLIYFRQTDLISPLHGGLITLGTAILLSGVLALSWRLSDEQHPPAVGQSLVTPGLGLVEDTEGEESTVDSDDLDEEADAPTSYDTFAPREPLSRKQSLRWQDDIWDELDDQNGSRPLLGGGRARSSTMPSRAMTEGTPLLASHRLVSGESTTSLTTPGRENPRRIFRKRRKSTGFPGFQARKHDRKTSSGAHDALGGLLKLRWWKHKHGNGEHDVAVDSPPGSSSSARPFGRRSGEGRTPRFADDPEQGLSRHQDEPSPGTRPSDSGGDRPPGPTGDDAV

SEQ ID NO: 22773 - DNA, 2766 bp, Muscodor strobelii
  misc_feature: SGI EST ID NO. CUFF.53499.1
  misc_feature: Variant of the nucleotide sequence at SEQ ID NO 22771
tagcgacagtgcagccggtacctgtcaggcgcgagcttgtcccagtcgcaccacgtcaactccacaccaactcccgcctgccgagtgggcatcagtgccattgtacatctccccaacacacaacaccgtgaccattgccacctgccgacgtcgtacattgactgccctgccccgactcacaaccacgccgacaaagaccattgtcaccggcctccttctcttatacaattgtattctagattatatagttggaagagacaatttccaatctccaggtcgatcccgccgccgaccgacaccgacaccgctactacctgaggtatcttcaagggtctcgttggataaagtacacgcagcccagcccgacgcagctccatgcgctgccgccgaggcatactctccttcgccgacgacatcaccagatgaaccgttgacccctattttgcctccatggggggtttgtttggcgatgtgtcgccagccggcactctcgcgattggtatcatagtcggcctcatatctacgagcgtccaatctctcggcctcaccctccagcgaaagtcacacatgctcgaagatgaaaaaggcccccacgaaatccagagaccaccctatcgccggcgcaggtggcagctgggcatgggcatgttcgtcatatccaacgtcctcggcagcaccatccagatctctacgctcccactccccgtcctctccacactccaggccgctggcctagtcttcaactcgatatgcgcgaccctcatactcggcgagcccttcacaagatggtcattctggggcactgctctcgtcgccattggcgctggactcatcgctgtcttcggcgctataccctcgcctgcgcatagcctgcgcgagctactagaactgttggggcgttggcagttcattctttggatggcctttcaaggcgtcatcgtcctggccatgaccatcaccgtcgagcttgttgcacgcttcaagaacatatcgcaaaaccccaagttccgtctcgcgcggggcttagcatatggatgcatttccggcattctctccgcccattctcttttattcgcaaagtcagccgtcgaactcatcctgcgtactattgcagacagcgacaaccagtttgtccattggcaatcctggatcttagtacttggtcttgtggctcttgcgctgagccaattgtattatctacatcgcggcctgaaactggtctcgacctccgttttatacccacttgttttctgcatttacaacatcattgccattctagacgggctcatatacttccgccagacagacctcatttcgcctcttcacggcggtctaatcacgcttggcactgcgattttactttcaggtgttctagcactaagttggagactgagcgacgagcaacatccacccgccgtgggtcagagtctcgttacgccggggttgggactcgtcgaggataccgagggagaggagagcacagtagattctgacgacctggatgaggaggccgatgcgccaacgagttacgatacgttcgcgccgagggaaccattgagcaggaaacagagtctgaggtggcaggacgatatctgggatgagctcgacgatcagaatgggagccgtccacttcttggcggcggtagagcacgctccagtaccatgccttcgagagccatgactgaggggaccccgttacttgcaagccaccgtctggtttctggggagagtacgacttctctcacaacgccgggcagagagaacccgaggaggatcttcaggaagaggaggaaatctactggattccctgggttccaagccaggaaacatgaccgaaagacttcatcaggggctcatgatgcgcttggtggtctcttgaagttaagatggtggaagcataaacatggaaacggagaacatgatgtcgccgttgacagcccgccgggttctagttcgagcgcgcgcccatttggcaggagaagtggcgaaggacgcactccgcggttcgcagatgacccagagcagggactgagcaggcatcaggatgaacctagtcccggtacgaggccgagtgatagcggtggtgatagacctcctggtccaacaggcgatgatgcagtatgaagcaagtaaggcatttaaagaataaagcatgaagagggctacatggagtttgggagcgaggattgatatttggcctggaagttgggtttttatggactacccacgttacaagaacttgaagcatcggcatacatttgatacaccaacacctctgacatcatacattgcggctggatacctatagtagctaggttgcctgggtggcgggaataaagatcattgtgttccgtatactctctctcaccatgcgaggtagagtcttcatggctcacatagtgttagttggtgtccgtcttccgactctcaatggtgcccgtcacgtaacgtggagcgcggattgtggattcgttagaagcattgtataacctatgttgttggaactgtataaactactgctgtacatgagaggagggccggatgcgcactatctatctctgatcagaaaacaaaatgactgtatgagttgcattgagaaaaggttagaaactggaggaaacgaaaagaaaaaaaggatatgagcactaactacacgctttgatcaccatcccctatcacgtatttcggaatgtcgttgccattactggtagtcatggcaatgcagatcatacgtcacgagtacatgtccctcgatgaccctatcaa

SEQ ID NO: 22774 - DNA, 693 bp, Muscodor strobelii
  misc_feature: SGI cDNA ID NO. 567738
  misc_feature: Encodes the peptide sequence at SEQ ID NO 22775
atgtcgcagatccacgctctgtccgacgaccaggtcggctcagagcttcgcaagatgacagcattcatcaagcaagaagccctcgaaaaagcgcgcgagatcgaaatcaaagccaacgaggaattctccatcgagaagtccaagctagtacgacaagaaaccgacgccatcgacgccacctacgccaagaaattcaagcaagcctccatgacgcagcagatcacccggtctacggtcgccaacaagacgagactgcgcgtcttgggcgctagacaagaattgttggatgatatcttcgaggaggctagcaagaagctgagcgaggccgccaaggacaagaagaagtatgccgaggtgctgaagggacttctgttggagggcatgtatgcgttgagtgagagtgaggtcgttgttaggtgcaggaaggcggataagggtgttgtggagagtgcggcgagggaggcggagaagacgtatgagaaggagacgggtagttcggctaaggtttcgcttgatgaggatgattacctgcctgagggaggagctggcggcgtcatgatcgtaggtggaaagggcaagatcgagatcaacaacacattcgaggagcgtctgcggctcctgcagtccagcgccctgcccgccgtgcgcaaggctttgttcggagccaacccgaaccgcaaattcttcgactga

SEQ ID NO: 22775 - protein, 230 aa, Muscodor strobelii
  misc_feature: SGI Peptide ID NO. 567738
  misc_feature (22)..(220): Pfam Id: PF01991 Pfam Desc: ATP synthase (E/31 kDa) subunit
  misc_feature (1)..(230): NCBI GI: 39970607 Blast Desc: MGG_02770 [Magnaporthe grisea 70-15] gi|149210077|ref|XP_001522413.1| MGCH7_ch7g520 [Magnaporthe grisea 70-15] gi|86196475|gb|EAQ71113.1| MGCH7_ch7g520 grisea
  misc_feature (1)..(230): NCBI GI: 256733475 Blast Desc: [Nectria haematococca mpVI 77-13-4]
  misc_feature (1)..(230): NCBI GI: 46128431 Blast Desc: FG08593.1 [Gibberella zeae PH-1]
  misc_feature (1)..(230): NCBI GI: 119467168 Blast Desc: ATP synthase subunit E, [Neosartorya fischeri NRRL 181] gi|119405542|gb|EAW15493.1| ATP synthase subunit E, [Neosartorya fischeri NRRL 181]
  misc_feature (1)..(230): NCBI GI: 255951114 Blast Desc: Pc22g24360 [Penicillium chrysogenum Wisconsin 54-1255] gi|211593341|emb|CAP99724.1| Pc22g24360 [Penicillium chrysogenum Wisconsin 54-1255]
  misc_feature (1)..(230): NCBI GI: 115386774 Blast Desc: vacuolar ATP synthase subunit E [Aspergillus terreus NIH2624] gi|114190926|gb|EAU32626.1| vacuolar ATP synthase subunit E [Aspergillus terreus NIH2624]
  misc_feature (5)..(230): NCBI GI: 261353249 Blast Desc: vacuolar ATP synthase subunit E [Verticillium albo-atrum VaMs.102]
  misc_feature (1)..(230): NCBI GI: 169608760 Blast Desc: SNOG_07465 [Phaeosphaeria nodorum SN15] gi|111063811|gb|EAT84931.1| SNOG_07465 [Phaeosphaeria nodorum SN15]
  misc_feature (1)..(230): NCBI GI: 171684893 Blast Desc: protein product [Podospora anserina] gi|170942407|emb|CAP68059.1| protein product [Podospora anserina]
  misc_feature (3)..(230): NCBI GI: 70984723 Blast Desc: ATP synthase subunit E [Aspergillus fumigatus Af293] gi|66845495|gb|EAL85830.1| ATP synthase subunit E, [Aspergillus fumigatus Af293] gi|159122652|gb|EDP47773.1| ATP synthase subunit
MSQIHALSDDQVGSELRKMTAFIKQEALEKAREIEIKANEEFSIEKSKLVRQETDAIDATYAKKFKQASMTQQITRSTVANKTRLRVLGARQELLDDIFEEASKKLSEAAKDKKKYAEVLKGLLLEGMYALSESEVVVRCRKADKGVVESAAREAEKTYEKETGSSAKVSLDEDDYLPEGGAGGVMIVGGKGKIEINNTFEERLRLLQSSALPAVRKALFGANPNRKFFD

SEQ ID NO: 22776 - DNA, 2438 bp, Muscodor strobelii
  misc_feature: SGI EST ID NO. CUFF.53666.1
  misc_feature: Variant of the nucleotide sequence at SEQ ID NO 22774
ggaatgtaaagacaagtaaggaggcagctcatatgtgacacttatcatcttccatctgcttgggttcaagctgcgagagggggggaccgggacctcgactgaggtagagccccaagccacatgtggatggtgctctggtaaaacgaaatctagcacccttgagctacctaggctgtggctcacgcagctgcgtcactctgcctttgagacctggagcttccaccagtctatgacctgcctgcctgttggagctatcaccaccagcgtcagctccaccatacctcatctcgactcgacatcgctccttaccgccgctttccctagccgcagtgtctggactgcttgaacatcttgcccggtgctgacaacttcgagctccctacaataatatcccccgaagtccacaaccacaaccctcaccatgtcgcagatccacgctctgtccgacgaccaggtcggctcagagcttcgcaagatgacagcattcatcaagcaagaagccctcgaaaaagcgcgcgagatcgaaatcaaagccaacgaggaattctccatcgagaagtccaagctagtacgacaagaaaccgacgccatcgacgccacctacgccaagaaattcaagcaagcctccatgacgcagcagatcacccggtctacggtcgccaacaagacgagactgcgcgtcttgggcgctagacaagaattgttggatgatatcttcgaggaggctagcaagaagctgagcgaggccgccaaggacaagaagaagtatgccgaggtgctgaagggacttctgttggagggcatgtatgcgttgagtgagagtgaggtcgttgttaggtgcaggaaggcggataagggtgttgtggagagtgcggcgagggaggcggagaagacgtatgagaaggagacgggtagttcggctaaggtttcgcttgatgaggatgattacctgcctgagggaggagctggcggcgtcatgatcgtaggtggaaagggcaagatcgagatcaacaacacattcgaggagcgtctgcggctcctgcagtccagcgccctgcccgccgtgcgcaaggctttgttcggagccaacccgaaccgcaaattcttcgactgaggaagctcaacgatttatttgtctcgactacgagtcatcactcgggcagcgatatgggcatttatatctccccttcgtcggaactcagtcttcgggcccaaaggggaaaggagtcttgtgtggatgcaaggacacggggagagactgatggttgaaaacatcagtttcgctatgtgacatggcatggaggtagacaggttgaagcagcagactgttcttgtcacatttttttcgcgagtttcgcattcgttaggtagacggctgtatcataacggtaggcggtacggttcctaagctccagcagcgaggtattgtcatacataatccatcatacatcattcctgctctggtctagttcataatgtgacatcgtgccccattccccttgatcctttccgtgacacgatatcatataacctacgagtggcacaacaagtctgtagaatgatatcgtgccggctctagtttcacccacggttttcccgtatcaagaccccaacaatcaacccgtatcaaacagcaaccccaacccaggcagcacaacctcaggctcatcagcatcaacgaaaacatcactctcatccgccaaactctcatctccctctcccccattcagcccatctagttcatccttcatttgcttcctcgcccaattattcataaacttcttctgttttatcttactattctcctcttcctcgtgacgaactgtcaagccctcatcaaaagcgaaaatctccgtcttaggcggcgggatggtccggacgctgtatttcagtctcttctcgatgacgtcgactagcgctttgagcggcttatgctctgtcttgttggggattttgtcgtggattgtttttatgcgttttgctaggagatcgatttggttgttgaattcgcggtcgggttgtgattctttgagtgggttgggcttgagaattgggggcttggtgggtggttttgattttgtggttggtgggattggggagggggagtgtgaggttgatgaggaggcgcctgtggatgtagaaagttgggtgtgggtgggtgaacgcatgaaagatgcattgttggtgacgatgtcgaagagtattgttaaaactcctaactgctcgaagtttgagctgtgacggggctgaaagtcggcctcatgtagacgggtgtagatcttctcgaagctgagctgaggatctactggtttactaccgagacctggagtgtgaaagagtgtctccattgcaaggcgacggcggagatcaatgagatgattgctggaacaggaaaggatttggatggggagtatgcgaagctcgatgtctgggatgtt

SEQ ID NO: 22777 - DNA, 2091 bp, Muscodor strobelii
  misc_feature: SGI cDNA ID NO. 567739
  misc_feature: Encodes the peptide sequence at SEQ ID NO 22778
atgccaccagcttctcagtcgtcaaaatcacggaatggagatattaggggtttcttcatgtccgcgggacaacagatcaagtcgccgtcacccaaaaagtcagcctcgccagggttgtcttcgctagacatcccatcatcgccaagaacaccaccgaaatcagcaccccgggtatttcgccctaatgaggagatcaaaggatctgacgaagaggacgatgatgactccgatgattccctcgcctccatcacagatgctcttggctatcgagctaggccatctccgcatcagcgggatgccaacatcctctcaacgccccaggccaaaaggatagcttcaataggcaatgttcaccgatcacctctaaccttacaacccaagaggcacaagttcgacatgaaggcacttatcaaccacaccaaggagcatgagcggacggaagaaagcgcgaggcaggctaatgcattgatcgctgaagccgacgggcgcagtgatgcagaggatgagtcaggactagaagatgaccccaagcgcttcgaggaggctgcgcaaaacttcctcattggcgatgaggatgagggcaaagtggacaaactgcgcaaggctattaaaagaacgaaagaacatagcgcgcacaagcaatgctacttcttcgacgccgaactcccagagaaacaagctaaacacccattcccagcgaagacggcaaagggtccttggaagtgtctctcacaggccaatgcaagacgacaggctttcataatgagcctaccgcacagtctcctgaaacttggccagacgctgcccgatgagttattcctatggcttctggaagaggtctgtattgagaagaatgcagagctacggatgcagtatatcgatttggtcagtctgtgtgatgaacagaccggtcgcttggtcacggatatgcggctatatggcattctagagaggatcggcggaccgaagtatgcacgcgaccatagtaagctcaagtgtactacagaggtgcggccggagtatcttgaaagagattggtcttgtttgactgcgtttctgcagttgatcgaagggctggcgcctagtctggagactgcgtcagcaatcagcgctgttcaacttctcttgcgcctgagtctggatccagtcgttgttggtgtagtacgtgagaaccatatgctcgctatgaacgccctaatttcgaacttggctccgtacagaactcgatgggacacagcttgtgaggcaatatgttcctacgtctacgagaacatcccagacatcgagcttcgcatactccccatccaaatcctttcctgttccagcaatcatctcattgatctccgccgtcgccttgcaatggagacactctttcacactccaggtctcggtagtaaaccagtagatcctcagctcagcttcgagaagatctacacccgtctacatgaggccgactttcagccccgtcacagctcaaacttcgagcagttaggagttttaacaatactcttcgacatcgtcaccaacaatgcatctttcatgcgttcacccacccacacccaactttctacatccacaggcgcctcctcatcaacctcacactccccctccccaatcccaccaaccacaaaatcaaaaccacccaccaagcccccaattctcaagcccaacccactcaaagaatcacaacccgaccgcgaattcaacaaccaaatcgatctcctagcaaaacgcataaaaacaatccacgacaaaatccccaacaagacagagcataagccgctcaaagcgctagtcgacgtcatcgagaagagactgaaatacagcgtccggaccatcccgccgcctaagacggagattttcgcttttgatgagggcttgacagttcgtcacgaggaagaggagaatagtaagataaaacagaagaagtttatgaataattgggcgaggaagcaaatgaaggatgaactagatgggctgaatgggggagagggagatgagagtttggcggatgagagtgatgttttcgttgatgctgatgagcctgaggttgtgctgcctgggttggggttgctgtttgatacgggttga

SEQ ID NO: 22778 - protein, 696 aa, Muscodor strobelii
  misc_feature: SGI Peptide ID NO. 567739
  misc_feature (7)..(651): NCBI GI: 256733975 Blast Desc: NECHADRAFT_36021 [Nectria haematococca mpVI 77-13-4]
  misc_feature (99)..(648): NCBI GI: 116193515 Blast Desc: CHGG_06475 [Chaetomium globosum CBS 148.51] gi|88182388|gb|EAQ89856.1| CHGG_06475 [Chaetomium globosum CBS 148.51]
  misc_feature (7)..(651): NCBI GI: 46128433 Blast Desc: FG08594.1 [Gibberella zeae PH-1]
  misc_feature (100)..(654): NCBI GI: 171684891 Blast Desc: protein product [Podospora anserina] gi|170942406|emb|CAP68058.1| protein product [Podospora anserina]
  misc_feature (103)..(625): NCBI GI: 145610032 Blast Desc: MGG_02769 [Magnaporthe grisea 70-15] gi|145017419|gb|EDK01782.1| MGG_02769 [Magnaporthe grisea 70-15]
  misc_feature (103)..(625): NCBI GI: 149210075 Blast Desc: MGCH7_ch7g519 [Magnaporthe grisea 70-15] gi|86196474|gb|EAQ71112.1| MGCH7_ch7g519 [Magnaporthe grisea 70-15]
  misc_feature (26)..(458): NCBI GI: 85114071 Blast Desc: NCU07445 [Neurospora crassa OR74A] gi|28926421|gb|EAA35396.1| NCU07445 [Neurospora crassa OR74A]
  misc_feature (7)..(633): NCBI GI: 156056472 Blast Desc: SS1G_05590 [Sclerotinia sclerotiorum 1980] gi|154703372|gb|EDO03111.1| SS1G_05590 [Sclerotinia sclerotiorum 1980]
  misc_feature (131)..(673): NCBI GI: 261353250 Blast Desc: conserved [Verticillium albo-atrum VaMs.102]
  misc_feature (188)..(652): NCBI GI: 226279541 Blast Desc: conserved [Paracoccidioides brasiliensis Pb01]
MPPASQSSKSRNGDIRGFFMSAGQQIKSPSPKKSASPGLSSLDIPSSPRTPPKSAPRVFRPNEEIKGSDEEDDDDSDDSLASITDALGYRARPSPHQRDANILSTPQAKRIASIGNVHRSPLTLQPKRHKFDMKALINHTKEHERTEESARQANALIAEADGRSDAEDESGLEDDPKRFEEAAQNFLIGDEDEGKVDKLRKAIKRTKEHSAHKQCYFFDAELPEKQAKHPFPAKTAKGPWKCLSQANARRQAFIMSLPHSLLKLGQTLPDELFLWLLEEVCIEKNAELRMQYIDLVSLCDEQTGRLVTDMRLYGILERIGGPKYARDHSKLKCTTEVRPEYLERDWSCLTAFLQLIEGLAPSLETASAISAVQLLLRLSLDPVVVGVVRENHMLAMNALISNLAPYRTRWDTACEAICSYVYENIPDIELRILPIQILSCSSNHLIDLRRRLAMETLFHTPGLGSKPVDPQLSFEKIYTRLHEADFQPRHSSNFEQLGVLTILFDIVTNNASFMRSPTHTQLSTSTGASSSTSHSPSPIPPTTKSKPPTKPPILKPNPLKESQPDREFNNQIDLLAKRIKTIHDKIPNKTEHKPLKALVDVIEKRLKYSVRTIPPPKTEIFAFDEGLTVRHEEEENSKIKQKKFMNNWARKQMKDELDGLNGGEGDESLADESDVFVDADEPEVVLPGLGLLFDTG

SEQ ID NO: 22779 - DNA, 4286 bp, Muscodor strobelii
  misc_feature: SGI EST ID NO. CUFF.53667.0
  misc_feature: Variant of the nucleotide sequence at SEQ ID NO 22777
caacactttaatgatcaaggcatcagaggttatcatttctgatgatgaacagttagcaatactcctcaagagtacgtggtgatgcaatttcatcatacaaaacttgtatgagttcttgtggttgacagccgcgacaaagctttgacgtgacgtgacgcacctgtggcgtgttgacgcgacctgtcaccctgaactgtacgccaccacttgttgagaagcaacgcacttcgggaggcggcataggaacgctttgctgctgcccgtggaatagggcactttatcaaaatgccaccagcttctcagtcgtcaaaatcacggaatggagatattaggggtttcttcatgtccgcgggacaacagatcaagtcgccgtcacccaaaaagtcagcctcgccagggttgtcttcgctagacatcccatcatcgccaagaacaccaccgaaatcagcaccccgggtatttcgccctaatgaggagatcaaaggatctgacgaagaggacgatgatgactccgatgattccctcgcctccatcacagatgctcttggctatcgagctaggccatctccgcatcagcgggatgccaacatcctctcaacgccccaggccaaaaggatagcttcaataggcaatgttcaccgatcacctctaaccttacaacccaagaggcacaagttcgacatgaaggcacttatcaaccacaccaaggagcatgagcggacggaagaaagcgcgaggcaggctaatgcattgatcgctgaagccgacgggcgcagtgatgcagaggatgagtcaggactagaagatgaccccaagcgcttcgaggaggctgcgcaaaacttcctcattggcgatgaggatgagggcaaagtggacaaactgcgcaaggctattaaaagaacgaaagaacatagcgcgcacaagcaatgctacttcttcgacgccgaactcccagagaaacaagctaaacacccattcccagcgaagacggcaaagggtccttggaagtgtctctcacaggccaatgcaagacgacaggctttcataatgagcctaccgcacagtctcctgaaacttggccagacgctgcccgatgagttattcctatggcttctggaagaggtctgtattgagaagaatgcagagctacggatgcagtatatcgatttggtcagtctgtgtgatgaacagaccggtcgcttggtcacggatatgcggctatatggcattctagagaggatcggcggaccgaagtatgcacgcgaccatagtaagctcaagtgtactacagaggtgcggccggagtatcttgaaagagattggtcttgtttgactgcgtttctgcagttgatcgaagggctggcgcctagtctggagactgcgtcagcaatcagcgctgttcaacttctcttgcgcctgagtctggatccagtcgttgttggtgtagtacgtgagaaccatatgctcgctatgaacgccctaatttcgaacttggctccgtacagaactcgatgggacacagcttgtgaggcaatatgttcctacgtctacgagaacatcccagacatcgagcttcgcatactccccatccaaatcctttcctgttccagcaatcatctcattgatctccgccgtcgccttgcaatggagacactctttcacactccaggtctcggtagtaaaccagtagatcctcagctcagcttcgagaagatctacacccgtctacatgaggccgactttcagccccgtcacagctcaaacttcgagcagttaggagttttaacaatactcttcgacatcgtcaccaacaatgcatctttcatgcgttcacccacccacacccaactttctacatccacaggcgcctcctcatcaacctcacactccccctccccaatcccaccaaccacaaaatcaaaaccacccaccaagcccccaattctcaagcccaacccactcaaagaatcacaacccgaccgcgaattcaacaaccaaatcgatctcctagcaaaacgcataaaaacaatccacgacaaaatccccaacaagacagagcataagccgctcaaagcgctagtcgacgtcatcgagaagagactgaaatacagcgtccggaccatcccgccgcctaagacggagattttcgcttttgatgagggcttgacagttcgtcacgaggaagaggagaatagtaagataaaacagaagaagtttatgaataattgggcgaggaagcaaatgaaggatgaactagatgggctgaatgggggagagggagatgagagtttggcggatgagagtgatgttttcgttgatgctgatgagcctgaggttgtgctgcctgggttggggttgctgtttgatacgggttgattgttggggtcttgatacgggaaaaccgtgggtgaaactagagccggcacgatatcattctacagacttgttgtgccactcgtaggttatatgatatcgtgtcacggaaaggatcaaggggaatggggcacgatgtcacattatgaactagaccagagcaggaatgatgtatgatggattatgtatgacaatacctcgctgctggagcttaggaaccgtaccgcctaccgttatgatacagccgtctacctaacgaatgcgaaactcgcgaaaaaaatgtgacaagaacagtctgctgcttcaacctgtctacctccatgccatgtcacatagcgaaactgatgttttcaaccatcagtctctccccgtgtccttgcatccacacaagactcctttcccctttgggcccgaagactgagttccgacgaaggggagatataaatgcccatatcgctgcccgagtgatgactcgtagtcgagacaaataaatcgttgagcttcctcagtcgaagaatttgcggttcgggttggctccgaacaaagccttgcgcacggcgggcagggcgctggactgcaggagccgcagacgctcctcgaatgtgttgttgatctcgatcttgccctttccacctacgatcatgacgccgccagctctgttgaacatgtttcgtcagtaagaagacaggtgaacttgtattcgagacaaccatagtcgaagatagggggaaatgaagaaaggcaaaatagacataccctccctcaggcaggtaatcatcctcatcaagcgaaaccttagccgaactacccgtctccttctcatacgtcttctccgcctccctcgccgcactctccacaacacccttatccgccttcctgcacctaacaacgacctcactctcactcaacgcatacatgccctccaacagaagtcccttcagcacctcggcatacttcttcttgtccttggcggcctcgctcagcttcttgctagcctcctcgaagatatcatccaacaattcttgtctagcgcccaagacgcgcagtctcgtcttgttggcgaccgtagaccgggtgatctgctgcgtcatggaggcttgcttgaatttcttggcgtaggtggcgtcgatggcgtcggtttcttgtcgtactagcttggacttctcgatggagaattcctcgttggctttgatttcgatctcgcgcgctttttcgagggcttcttgcttgatgaatgctgtcatcttgcgaagctctgagccgacctgtccgagggtcgcatcttgtcagtttttgtgacatcgtgcctggggtttgagagcgtgggtgtgttgttggcagttggtgatatggttggggatggaggaggggactggggtaggtaaggcaggtaactcgactcacctggtcgtcggacagagcgtggatctgcgacatggtgagggttgtggttgtggacttcgggggatattattgtagggagctcgaagttgtcagcaccgggcaagatgttcaagcagtccagacactgcggctagggaaagcggcggtaaggagcgatgtcgagtcgagatgaggtatggtggagctgacgctggtggtgatagctccaacaggcaggcaggtcatagactggtggaagctccaggtctcaaaggcagagtgacgcagctgcgtgagccacagcctaggtagctcaagggtgctagatttcgttttaccagagcaccatccacatgtggcttggggctctacctcagtcgaggtcccggtccccccctctcgcagcttgaacccaagcagatggaagatgataagtgtcacatatgagctgcctccttacttgtctttacattccacgactcacaccttaattgtcaacaatacatgagcagattctactgacattgcta

SEQ ID NO: 22780 - DNA, 4584 bp, Muscodor strobelii
  misc_feature: SGI cDNA ID NO. 567740
  misc_feature: Reduced expression when VOC is produced
  misc_feature: Encodes the peptide sequence at SEQ ID NO 22781
atgagcagagaaggggaaaataatggccagcaggatgctgcgctcaagcggacacgatgggccacccgcaagctcacggtgaagagcagcggcgtcaagcgggtaggcatcatggacaggatacacaaaagaactgcctcgtgggaaaagaaaaggacgtcaggaggctcgaatggctctagcaacagaagttcaacgcctggccacgaccacgacacgatcccagaggaggacgagaacggcgatgcaaacagcaccacatcctccgaagagggcgagagccgcaccctcttcttcaaccagccactgccgcaagaacacaaggacgaggagggcaaccctatacagacatacgcgaggaacaagatcaggacagccaagtacacaccactgtctttcatacctaagaacatctggtttcagttccacaacatagccaacatcttcttccttttcaatgttattttagtctttttccccattttcggaggagtaaatccggggctcaacgcggtgcctctcatcttcatcattaccgtcacagccatcaaagacgccatcgaagactaccgtcgaaccgttctcgataacgaactcaacaatgcccccgtgcaccgactcctgggctgggacaatgtaaatgtggctgatgataacgtctcgacgtggaggaggatcaagaaggccacctcgagattcttcggctctctgtggcacctcattcaaagtttgtggaagaaagatgacaagcgggggatacttaagaactcctcggatcctcgaccctcgatcgaaactaaggctggccatcgagagtccattgcttcggcttatgaagacgtcgaaatgacccccgtcacctccccgcttccgcgccctgacaacgcccccgtgcacaccacaaataccgacgtcctcgcacgagacaaaggcgatctcatcaactatcagctcgaaagcaccggtcaagctcgattccacaaggatgcctggaaaagcctgcaggtaggcgactttgtccggctgtacaacgacgacgaactcccggccgatatcatcgtcttggctacgtctgattctgacggagcctgctacgtcgagaccaagaacttggatggcgagaccaatctgaaggtgcgctcagcgctgcgctgcggacgcagtctcaagcacgccagagattgtgagagggcacagttctctatccagagcgagcctccgcagcccaacttgtacaaatacaacggcgccattcaatgggaacagagcttccccaacattggaacgaaagagatgtcagaacctatttccatcgacaacctgcttctcagaggttgcaacttgagaaacacagaatgggtccttggtgtcgtcatctttaccggccacgacacgaagatcatgatgaacgcgggcgtgacgcctagtaagcgagcacgcattgctcgagagctcaacatcaatgtgctccacaacttcgcatttcttgccgtcatctgcctcctatcagccattgtcaacggtttcttctggtccaggaacgatacatccagcgccaaatttgactatggtgctcttggtggcacccctgggctgactggctttatcacctttttcgctgccctgatcgtctaccagaatttggtcccgatttccctctacatttcactcgaaattgtgcgaaccctgcaggctgtcttcatctacagcgatgtgcagatgtattacgagccgatcgactatccctgtgtccccaagtcgtggaacatatctgatgatctgggccaaatcgagtacatcttttctgacaagacaggtaccctgacgcaaaacgtcatggagttcaagaaggcaacaatcaatggtcagccatacggagaggcgtacaccgaggcacaagccggtatgcagaaacgcttgggcgttgatgttgtcaaggaagcggctcaggcccggcaacagattgccgaagccaaagttcaagctctcgcaggacttcgagcgatccacgacaacgaatatctacacgacgacgacatgactttcatcgcacccgatttcgtcagcgatctgcgtggagagtcgggccaggaacagaaggacgctaatttccagttcatgctggccttggctctttgccatactgtcatttctgaacatatacctggggagcgccccaagatcgagttcaaggctcaatctccggatgaagctgcactcgtcgccacggctcgggacatgggcttcgtagttctaggatctacttccgatggtatcaagctcaacatccagggtgaggaagtagagtacactatcttgaacactatcgaattcaactctagccgaaagaggatgagtgccatcatgaagatgcccgacggtcgtgtcatgttgttctgtaaaggtgccgacagtatcatctactcacggctcaaacgtggcgaacaggcggagcttcgtaagacgaccgctgagcacctcgagatgttcgcccgtgaaggtttgcgtacgctgtgtatcgcacagcgtgaactctccgagcaggaatatctcgagttccgcaccgagcatgacaaggccgctacggctctgacggacagagaagacaagctggaagaggttgcggacagaatcgaacagaacctgactttgctgggtggtaccgctatcgaagatcgtctccaagatggcgtcccagaatcgatcgaactgcttgcacaggccggtatcaaattgtgggtgctcactggtgacaaggttgaaacagctatcaacattggtttctcctgcaatgttctcagcaacgacatggagctcgtccacctcaaagtgacggaggacgagagtggcaatacgaccaatgagcaattcatcgagatgcttgacaagcagctcactgaaaggctcttgcatttcaatctgacaggcagcgacgaagatcttgccgcagcacgcaagaaccacgaggccccaggacctacgcatgctattgtcgtcgacggcttctctctcaagtttgtacttgaagatgctctgaagcagaaattcctgctgctctgcaagcaatgcgctgccgttctctgctgccgagtcagcccagcccagaaagctgccgtcgtttctatggtcaagaatggtctagatgtgatgaccctgtcgattggagatggtgccaacgatgtcgccatgattcaggaggcagacgtcggtgtcggtattgctggtgtcgaaggtcgacaggctgtcatgtccgcagattatgccattggtcaattccgtttccttcaacgcttggttctggtgcatggccgctggtcttatcggagaatggcggaagccattgccaacttcttctacaagaacatgatctggacgttcagcattttctggttccaaatcttttgcgatttcgatatcgcctacctcttcgaatacacatacatcatcttgttcaatctcgtcttcacttcgttacctcccattatcattggggttctcgaccaagacgtgtcggatgaagtgtcgctggctgtcccgcaattataccgtagaggcatagagcgcttggaatggacacagcggaagttctggacatatatgatcgatggtatctaccaaagtgtcattacctttttcgttccctacttggctgtcgccggtaccgcagccgtgacgggtaacggtaaggatcttatgagtgactaccgtctcggtgctctggttgcacatcccgcggttatcaccatcaatctctatatcctcatcaacacctatcgttgggattggcttacagttctcatcatcgtcatcagtgatctgttcatcttcttctggaccggcgtgtacactgcggggacatttgccgggactttcgtgggtaccgccaaagagatctatggacaggccaatttctgggctatcctggtactggctccgatcatctccctggcgcccagattcgccgcgaagacgatccaccggatgtggtggccgcgtgacgtcgacattatccgagagcagattgccatgggcaagttcaccacagctcccaaggaagaaactgcatcagcgagagacgacgctaaggaaagcttgtcgagctccatttcttctaagagaaggcatcagcatcaacccgggctaagcgtcgatgaggacctgcggcctatctacccgccatcggtcgccgccacgtccaactacccccgcagtcaacgaggcagcgatggcaccaactacacgaaacacgacatcaacatggagacgccagtcgagcagcccgtcgacgtcccggatgtgccgattcgaccgtcgatggaccgggtgcgcccgtcgtatgaccgcatgcgagcttcgatggaccggtcgcgtaacgagcgggtacgacagagcttcgaagcctccaacgacttcacgagtgcggccatgttgagccgcttcgagtccacgcgctccgacgttggggaacttccggagagcagtggcatcgtcggcaagatccggagacggacgcggggcaagtcgttcaagtcggccttcacgtttcacaaagacaacaacaataacatagaagaacatgactaa

SEQ ID NO: 22781 - protein, 1527 aa, Muscodor strobelii
  misc_feature: SGI Peptide ID NO. 567740
  misc_feature (1)..(1491): NCBI GI: 171684889 Blast Desc: protein product [Podospora anserina] gi|170942405|emb|CAP68057.1| protein product [Podospora anserina]
  misc_feature (7)..(1496): NCBI GI: 46128435 Blast Desc: FG08595.1 [Gibberella zeae PH-1]
  misc_feature (4)..(1512): NCBI GI: 256733476 Blast Desc: [Nectria haematococca mpVI 77-13-4]
  misc_feature (14)..(1485): NCBI GI: 85114063 Blast Desc: NCU07443 [Neurospora crassa OR74A] gi|28926419|gb|EAA35394.1| NCU07443 [Neurospora crassa OR74A]
  misc_feature (25)..(1516): NCBI GI: 149210071 Blast Desc: MGCH7_ch7g517 [Magnaporthe grisea 70-15] gi|86196472|gb|EAQ71110.1| MGCH7_ch7g517 [Magnaporthe grisea 70-15]
  misc_feature (9)..(1508): NCBI GI: 261353251 Blast Desc: phospholipid-transporting ATPase [Verticillium albo-atrum VaMs.102]
  misc_feature (13)..(1503): NCBI GI: 116193519 Blast Desc: CHGG_06477 [Chaetomium globosum CBS 148.51] gi|88182390|gb|EAQ89858.1| CHGG_06477 [Chaetomium globosum CBS 148.51]
  misc_feature (5)..(1483): NCBI GI: 261192751 Blast Desc: phospholipid-translocating P-type ATPase domain-containing protein [Ajellomyces dermatitidis SLH14081] gi|239589264|gb|EEQ71907.1| phospholipid-translocating P-type
  misc_feature (7)..(1483): NCBI GI: 240108941 Blast Desc: phospholipid-translocating P-type ATPase domain-containing protein, [Coccidioides posadasii C735 delta SOWgp]
  misc_feature (5)..(1486): NCBI GI: 240273303 Blast Desc: phospholipid-translocating P-type ATPase domain-containing protein [Ajellomyces capsulatus H143]
  misc_feature (97)..(1350): SWISSPROT Homolog: EC 3.6.3.1 Phospholipid-translocating ATPase
  misc_feature: Useful for introducing or modulating the production of volatile compounds
MSREGENNGQQDAALKRTRWATRKLTVKSSGVKRVGIMDRIHKRTASWEKKRTSGGSNGSSNRSSTPGHDHDTIPEEDENGDANSTTSSEEGESRTLFFNQPLPQEHKDEEGNPIQTYARNKIRTAKYTPLSFIPKNIWFQFHNIANIFFLFNVILVFFPIFGGVNPGLNAVPLIFIITVTAIKDAIEDYRRTVLDNELNNAPVHRLLGWDNVNVADDNVSTWRRIKKATSRFFGSLWHLIQSLWKKDDKRGILKNSSDPRPSIETKAGHRESIASAYEDVEMTPVTSPLPRPDNAPVHTTNTDVLARDKGDLINYQLESTGQARFHKDAWKSLQVGDFVRLYNDDELPADIIVLATSDSDGACYVETKNLDGETNLKVRSALRCGRSLKHARDCERAQFSIQSEPPQPNLYKYNGAIQWEQSFPNIGTKEMSEPISIDNLLLRGCNLRNTEWVLGVVIFTGHDTKIMMNAGVTPSKRARIARELNINVLHNFAFLAVICLLSAIVNGFFWSRNDTSSAKFDYGALGGTPGLTGFITFFAALIVYQNLVPISLYISLEIVRTLQAVFIYSDVQMYYEPIDYPCVPKSWNISDDLGQIEYIFSDKTGTLTQNVMEFKKATINGQPYGEAYTEAQAGMQKRLGVDVVKEAAQARQQIAEAKVQALAGLRAIHDNEYLHDDDMTFIAPDFVSDLRGESGQEQKDANFQFMLALALCHTVISEHIPGERPKIEFKAQSPDEAALVATARDMGFVVLGSTSDGIKLNIQGEEVEYTILNTIEFNSSRKRMSAIMKMPDGRVMLFCKGADSIIYSRLKRGEQAELRKTTAEHLEMFAREGLRTLCIAQRELSEQEYLEFRTEHDKAATALTDREDKLEEVADRIEQNLTLLGGTAIEDRLQDGVPESIELLAQAGIKLWVLTGDKVETAINIGFSCNVLSNDMELVHLKVTEDESGNTTNEQFIEMLDKQLTERLLHFNLTGSDEDLAAARKNHEAPGPTHAIVVDGFSLKFVLEDALKQKFLLLCKQCAAVLCCRVSPAQKAAVVSMVKNGLDVMTLSIGDGANDVAMIQEADVGVGIAGVEGRQAVMSADYAIGQFRFLQRLVLVHGRWSYRRMAEAIANFFYKNMIWTFSIFWFQIFCDFDIAYLFEYTYIILFNLVFTSLPPIIIGVLDQDVSDEVSLAVPQLYRRGIERLEWTQRKFWTYMIDGIYQSVITFFVPYLAVAGTAAVTGNGKDLMSDYRLGALVAHPAVITINLYILINTYRWDWLTVLIIVISDLFIFFWTGVYTAGTFAGTFVGTAKEIYGQANFWAILVLAPIISLAPRFAAKTIHRMWWPRDVDIIREQIAMGKFTTAPKEETASARDDAKESLSSSISSKRRHQHQPGLSVDEDLRPIYPPSVAATSNYPRSQRGSDGTNYTKHDINMETPVEQPVDVPDVPIRPSMDRVRPSYDRMRASMDRSRNERVRQSFEASNDFTSAAMLSRFESTRSDVGELPESSGIVGKIRRRTRGKSFKSAFTFHKDNNNNIEEHD

SEQ ID NO: 22782 - DNA, 5871 bp, Muscodor strobelii
  misc_feature: SGI EST ID NO. CUFF.53626.0
  misc_feature: Variant of the nucleotide sequence at SEQ ID NO 22780
cagagatgtgagctagtacttccgtaggtgggctctgtgtgtaatccgcaccaaggttggcagtgaaccccggtcgacccgaacgaatacagcaggccgtcactcaaatctttcccgctccctctcccactcgcactcgccgtgccctttcctggcctcgctgtcatcaacactcttccaacacttgcctccggtaataacctacacaccccgtctcgaatcacgccggaagcacgcattgggatctctatcgcctgcgtctgcctgtacatattagatgatagccgattgaagattcatgcttgcttccaattgctgccgcgacgccgagtgccagaccctgtccccatcgctacgcccgtagcagccactccgtcatcacaccctccaccggcactgactcgaccccccgaaagccccgaaacagcgagacgacaaacagcgagaacgcgactcactctggcaccgggacgagcgtttgacgggcgtcgcccgacccgcccctcaaaatgagcagagaaggggaaaataatggccagcaggatgctgcgctcaagcggacacgatgggccacccgcaagctcacggtgaagagcagcggcgtcaagcgggtaggcatcatggacaggatacacaaaagaactgcctcgtgggaaaagaaaaggacgtcaggaggctcgaatggctctagcaacagaagttcaacgcctggccacgaccacgacacgatcccagaggaggacgagaacggcgatgcaaacagcaccacatcctccgaagagggcgagagccgcaccctcttcttcaaccagccactgccgcaagaacacaaggacgaggagggcaaccctatacagacatacgcgaggaacaagatcaggacagccaagtacacaccactgtctttcatacctaagaacatctggtttcagttccacaacatagccaacatcttcttccttttcaatgttattttagtctttttccccattttcggaggagtaaatccggggctcaacgcggtgcctctcatcttcatcattaccgtcacagccatcaaagacgccatcgaagactaccgtcgaaccgttctcgataacgaactcaacaatgcccccgtgcaccgactcctgggctgggacaatgtaaatgtggctgatgataacgtctcgacgtggaggaggatcaagaaggccacctcgagattcttcggctctctgtggcacctcattcaaagtttgtggaagaaagatgacaagcgggggatacttaagaactcctcggatcctcgaccctcgatcgaaactaaggctggccatcgagagtccattgcttcggcttatgaagacgtcgaaatgacccccgtcacctccccgcttccgcgccctgacaacgcccccgtgcacaccacaaataccgacgtcctcgcacgagacaaaggcgatctcatcaactatcagctcgaaagcaccggtcaagctcgattccacaaggatgcctggaaaagcctgcaggtaggcgactttgtccggctgtacaacgacgacgaactcccggccgatatcatcgtcttggctacgtctgattctgacggagcctgctacgtcgagaccaagaacttggatggcgagaccaatctgaaggtgcgctcagcgctgcgctgcggacgcagtctcaagcacgccagagattgtgagagggcacagttctctatccagagcgagcctccgcagcccaacttgtacaaatacaacggcgccattcaatgggaacagagcttccccaacattggaacgaaagagatgtcagaacctatttccatcgacaacctgcttctcagaggttgcaacttgagaaacacagaatgggtccttggtgtcgtcatctttaccggccacgacacgaagatcatgatgaacgcgggcgtgacgcctagtaagcgagcacgcattgctcgagagctcaacatcaatgtgctccacaacttcgcatttcttgccgtcatctgcctcctatcagccattgtcaacggtttcttctggtccaggaacgatacatccagcgccaaatttgactatggtgctcttggtggcacccctgggctgactggctttatcacctttttcgctgccctgatcgtctaccagaatttggtcccgatttccctctacatttcactcgaaattgtgcgaaccctgcaggctgtcttcatctacagcgatgtgcagatgtattacgagccgatcgactatccctgtgtccccaagtcgtggaacatatctgatgatctgggccaaatcgagtacatcttttctgacaagacaggtaccctgacgcaaaacgtcatggagttcaagaaggcaacaatcaatggtcagccatacggagaggcgtacaccgaggcacaagccggtatgcagaaacgcttgggcgttgatgttgtcaaggaagcggctcaggcccggcaacagattgccgaagccaaagttcaagctctcgcaggacttcgagcgatccacgacaacgaatatctacacgacgacgacatgactttcatcgcacccgatttcgtcagcgatctgcgtggagagtcgggccaggaacagaaggacgctaatttccagttcatgctggccttggctctttgccatactgtcatttctgaacatatacctggggagcgccccaagatcgagttcaaggctcaatctccggatgaagctgcactcgtcgccacggctcgggacatgggcttcgtagttctaggatctacttccgatggtatcaagctcaacatccagggtgaggaagtagagtacactatcttgaacactatcgaattcaactctagccgaaagaggatgagtgccatcatgaagatgcccgacggtcgtgtcatgttgttctgtaaaggtgccgacagtatcatctactcacggctcaaacgtggcgaacaggcggagcttcgtaagacgaccgctgagcacctcgagatgttcgcccgtgaaggtttgcgtacgctgtgtatcgcacagcgtgaactctccgagcaggaatatctcgagttccgcaccgagcatgacaaggccgctacggctctgacggacagagaagacaagctggaagaggttgcggacagaatcgaacagaacctgactttgctgggtggtaccgctatcgaagatcgtctccaagatggcgtcccagaatcgatcgaactgcttgcacaggccggtatcaaattgtgggtgctcactggtgacaaggttgaaacagctatcaacattggtttctcctgcaatgttctcagcaacgacatggagctcgtccacctcaaagtgacggaggacgagagtggcaatacgaccaatgagcaattcatcgagatgcttgacaagcagctcactgaaaggctcttgcatttcaatctgacaggcagcgacgaagatcttgccgcagcacgcaagaaccacgaggccccaggacctacgcatgctattgtcgtcgacggcttctctctcaagtttgtacttgaagatgctctgaagcagaaattcctgctgctctgcaagcaatgcgctgccgttctctgctgccgagtcagcccagcccagaaagctgccgtcgtttctatggtcaagaatggtctagatgtgatgaccctgtcgattggagatggtgccaacgatgtcgccatgattcaggaggcagacgtcggtgtcggtattgctggtgtcgaaggtcgacaggctgtcatgtccgcagattatgccattggtcaattccgtttccttcaacgcttggttctggtgcatggccgctggtcttatcggagaatggcggaagccattgccaacttcttctacaagaacatgatctggacgttcagcattttctggttccaaatcttttgcgatttcgatatcgcctacctcttcgaatacacatacatcatcttgttcaatctcgtcttcacttcgttacctcccattatcattggggttctcgaccaagacgtgtcggatgaagtgtcgctggctgtcccgcaattataccgtagaggcatagagcgcttggaatggacacagcggaagttctggacatatatgatcgatggtatctaccaaagtgtcattacctttttcgttccctacttggctgtcgccggtaccgcagccgtgacgggtaacggtaaggatcttatgagtgactaccgtctcggtgctctggttgcacatcccgcggttatcaccatcaatctctatatcctcatcaacacctatcgttgggattggcttacagttctcatcatcgtcatcagtgatctgttcatcttcttctggaccggcgtgtacactgcggggacatttgccgggactttcgtgggtaccgccaaagagatctatggacaggccaatttctgggctatcctggtactggctccgatcatctccctggcgcccagattcgccgcgaagacgatccaccggatgtggtggccgcgtgacgtcgacattatccgagagcagattgccatgggcaagttcaccacagctcccaaggaagaaactgcatcagcgagagacgacgctaaggaaagcttgtcgagctccatttcttctaagagaaggcatcagcatcaacccgggctaagcgtcgatgaggacctgcggcctatctacccgccatcggtcgccgccacgtccaactacccccgcagtcaacgaggcagcgatggcaccaactacacgaaacacgacatcaacatggagacgccagtcgagcagcccgtcgacgtcccggatgtgccgattcgaccgtcgatggaccgggtgcgcccgtcgtatgaccgcatgcgagcttcgatggaccggtcgcgtaacgagcgggtacgacagagcttcgaagcctccaacgacttcacgagtgcggccatgttgagccgcttcgagtccacgcgctccgacgttggggaacttccggagagcagtggcatcgtcggcaagatccggagacggacgcggggcaagtcgttcaagtcggccttcacgtttcacaaagacaacaacaataacatagaagaacatgactaagggcatgtgctgtacacaatcattttacgacatgacatatgagaagtcgacgatcgatgacggctgtcctctcttctttttttaactcagacgatgatatcctaattgcatgggccgctatacgatactcaaccgccattgtatgatggcctatgttttttttcataattgtgcattatgtgtgcattccagcagtgagacgcagtgtgcatcttatccgcaaaacacggcgttacgaaggcgtttgatcccggtgcatggtacaggcgtgggcaattgtacgagacgatgatggaagatcctggattttgggaacttcattgcttttttggggacatatttctagaccgatgcgtatttgacattcgagatactataccgccatgtttcatctgccgttatagcatttatccttgcaccaaccatgggggctgccttttcccgcactttggattatgtttatttgatggaagccgcacgagaaagagccgggaagagggcgtttggtagtcaagatacaaccgcaacataagacgcatcactacgaaaggaatgggagaaaggagaagtccaagcattactatgtatataccttgcgggttctgcggtggaagagttcgaagggtgaatggaatgcagagttgtttattcccgttcctgcagagtagagcgactagatgctacggtattattccactatatgaaaaaggttaacaaatcttatgagtattagtcttgatagactgtgatgtgatgtccacgctcgacatggaagttg

SEQ ID NO: 22783 - DNA, 2823 bp, Muscodor strobelii
  misc_feature: SGI cDNA ID NO. 567741
  misc_feature: Encodes the peptide sequence at SEQ ID NO 22784
atgagctttcctgataacatgcagtataatatgtgggttccaagcggtttcactttaagtcaaaaagctgcaactgtatgcactatggactatgaattagcagacacagttttgacctacgatctggtcaccagccagactagtttgaatactgggctacatagggcggctagtcgcaggtttaataacttgactggatttgaaattggtgaggcgatattcgccctcgctgctgcttatggtgcgggtaccagaatgcctgacttgatggtagccattatcgacaatccattgccagattatttttcacttttggatgaaaaaaatcttgggtcgtcagctcctaagatcttaaaggggttgatggtccatgtgataaagcaatttaccgtggttcctgacgcaacgattactaatggcacggccatttccttagagaacagactacatgtaaactcagtatccctctggactatgattgcggcatccatggtattgagtatgctcccgttggtagtcattgtgtcttcgatcaatcgagtggtatcacaggaccccaccaccatcgcggcccaagcggccatactttcatcgagcccagctgtcagatctctgttacaacgtaccgcagtcttaaagacaagcgaactatcagagtggcttgaggggtacactttcagaacgtttgtagacgacacaggatctttcaacgtcgaagcactcggcaaagaaccattgtcttgtaagtcatcagcaccgaagctgcgaagcgcatcacaatctccgcggacaaggaacccaacatcgagtatctcctcttttctgtcaccagaggatacacacttcaaagacaagttttgggtacccagcgcagttcgacattggttcattactgtcgccttcaccgtgcttgttatttcaatctgtgtattagaagctatatatcagctgtctaacaaaaactcggggctcgccgataccaacagcattataagaccgtacatcggatatttgaccggcattttcattatgactatctcatcgataactggcagcatagacttcacgtttgcttcatttgccccattcagcgccctttgccatcctggaaagtcacgaccatattctatgcaagtgaatatgtttgggaagctgcctccaatggcgctttatcacgctctccaaacccgacaaatcggtgctgctctatcaagtctggctgctctcatcggaagcatcctgatgattattgcgtctgctctgtgggtagatcgtacttttggctgcgaggcaggcttgaatgcgacatcagtttctgcatggaacttcagtcagctagatgttgccaatgacgatccctatgttgcctatgatgatgcctatgatggcggagctgcaactacgctaaaggtactccagccgctgaacagtgagcagcccgccgggacatggaataatctcgttttcccaacgatttccgatgtcaccatagagccgaacagcaatgggactgatgttagcactatctgtaataacgcaacgaattcagtgccttgccactaccatctcaatttatccgcgcttcgtcctgtattacaatgcgagtcactttcagcaagcgaagttcagcagtcactcgcaatctcggtcgacccagactccgaccccaacgaccccggggcggcaacatctatagactttctggcttccacattgagacttccgtatggatgtagcactctgggaacaaattatgcacttggacccgtcacaccaggatggtacggcgtgttcgtcaacattgctcaatcgtcgtgtctttcgcaaaagaactgcacgggtgcaaataatacttcgccgctgcaggacgctaagggttgcccttctatcgcgatcatctttggctctagactcgatggcccgatcaagaagcaggacttcacggtgttgctgtgccgtcagaagattcaaaaagttgacaccatggtcggtttcacaaaacagaccgaacgtcaagttcaaattgggtctaggaatctgcttcaatctccctccgtcaaagagtcctcggctgaatatgtgatgaacagcatggacggcactgatacattctattatcgtgttgattatgcaattcagaggaagtttcctagcgatcttggttatgaaacgaggggtgattatgcgatgcatttggatccggtatttgtggcctgtattaatggcacaaacgtcaccacgttgaacgaactttcagggccagatcaggcaataaaactcgagagaattgcttcgaaattctacgaaacttacatggttttacttttaaactctccggtggttcgcaagcttggaggtattaacagcaatgcttcgcacagtactgagatcttcgaaggatcagtgagggcagagtgttcgaggctcacagtcgattttacgtctaaacttacgctgcaagtagctctggtgatcatcatgttgctcataggacttgttctcgggtttacaaaactcaggggcttgctgccacgaaacccctgcttagctgcaagcgtcatggcgcttctggcggacagcacaatttgtgatggctacttcatgccccaaggagcagaatggaaagataacagtgagttatctaagttattcaaggaagataacccacatcttggttggtggaactcgcaaggcgagtatggtactgtcaggcgcaagcactttggcatcgatgttggcgaaccaatcagtttcggtttccagatgagagagaagcagagaaagattggactttggaaatatcgcacattgaaacagcaatga

SEQ ID NO: 22784 - protein, 940 aa, Muscodor strobelii
  misc_feature: SGI Peptide ID NO. 567741
  misc_feature (104)..(899): NCBI GI: 225557913 Blast Desc: conserved [Ajellomyces capsulatus G186AR]
  misc_feature (99)..(914): NCBI GI: 261198575 Blast Desc: conserved [Ajellomyces dermatitidis SLH14081] gi|239594841|gb|EEQ77422.1| conserved [Ajellomyces dermatitidis SLH14081]
  misc_feature (104)..(914): NCBI GI: 239610037 Blast Desc: conserved [Ajellomyces dermatitidis ER-3]
  misc_feature (104)..(899): NCBI GI: 240273977 Blast Desc: conserved [Ajellomyces capsulatus H143]
  misc_feature (104)..(837): NCBI GI: 154271544 Blast Desc: [Ajellomyces capsulatus NAm1] gi|150409295|gb|EDN04745.1| [Ajellomyces capsulatus NAm1]
  misc_feature (104)..(899): NCBI GI: 256721372 Blast Desc: NECHADRAFT_82379 [Nectria haematococca mpVI 77-13-4]
  misc_feature (7)..(912): NCBI GI: 261359225 Blast Desc: conserved [Verticillium albo-atrum VaMs.102]
  misc_feature (294)..(916): NCBI GI: 256726134 Blast Desc: NECHADRAFT_81730 [Nectria haematococca mpVI 77-13-4]
  misc_feature (90)..(914): NCBI GI: 145248079 Blast Desc: An13g01490 [Aspergillus niger] gi|134081037|emb|CAK41549.1| protein product [Aspergillus niger]
  misc_feature (188)..(708): NCBI GI: 46118178 Blast Desc: FG04690.1 [Gibberella zeae PH-1]
MSFPDNMQYNMWVPSGFTLSQKAATVCTMDYELADTVLTYDLVTSQTSLNTGLHRAASRRFNNLTGFEIGEAIFALAAAYGAGTRMPDLMVAIIDNPLPDYFSLLDEKNLGSSAPKILKGLMVHVIKQFTVVPDATITNGTAISLENRLHVNSVSLWTMIAASMVLSMLPLVVIVSSINRVVSQDPTTIAAQAAILSSSPAVRSLLQRTAVLKTSELSEWLEGYTFRTFVDDTGSFNVEALGKEPLSCKSSAPKLRSASQSPRTRNPTSSISSFLSPEDTHFKDKFWVPSAVRHWFITVAFTVLVISICVLEAIYQLSNKNSGLADTNSIIRPYIGYLTGIFIMTISSITGSIDFTFASFAPFSALCHPGKSRPYSMQVNMFGKLPPMALYHALQTRQIGAALSSLAALIGSILMIIASALWVDRTFGCEAGLNATSVSAWNFSQLDVANDDPYVAYDDAYDGGAATTLKVLQPLNSEQPAGTWNNLVFPTISDVTIEPNSNGTDVSTICNNATNSVPCHYHLNLSALRPVLQCESLSASEVQQSLAISVDPDSDPNDPGAATSIDFLASTLRLPYGCSTLGTNYALGPVTPGWYGVFVNIAQSSCLSQKNCTGANNTSPLQDAKGCPSIAIIFGSRLDGPIKKQDFTVLLCRQKIQKVDTMVGFTKQTERQVQIGSRNLLQSPSVKESSAEYVMNSMDGTDTFYYRVDYAIQRKFPSDLGYETRGDYAMHLDPVFVACINGTNVTTLNELSGPDQAIKLERIASKFYETYMVLLLNSPVVRKLGGINSNASHSTEIFEGSVRAECSRLTVDFTSKLTLQVALVIIMLLIGLVLGFTKLRGLLPRNPCLAASVMALLADSTICDGYFMPQGAEWKDNSELSKLFKEDNPHLGWWNSQGEYGTVRRKHFGIDVGEPISFGFQMREKQRKIGLWKYRTLKQQ

SEQ ID NO: 22785 - DNA, 404 bp, Muscodor strobelii
  misc_feature: SGI EST ID NO. CUFF.53511.0
  misc_feature: Variant of the nucleotide sequence at SEQ ID NO 22783
ccggcattttcattatgactatctcatcgataactggcagcatagacttcacgtttgcttcatttgccccattcagcgccctttgccatcctggaaagtcacgaccatattctatgcaagtgaatatgtttgggaagctgcctccaatggcgctttatcacgctctccaaacccgacaaatcggtgctgctctatcaagtctggctgctctcatcggaagcatcctgatgattattgcgtctgctctgtgggtagatcgtacttttggctgcgaggcaggcttgaatgcgacatcagtttctgcatggaacttcagtcagctagatgttgccaatgacgatccctatgttgcctatgatgatgcctatgatggcggagctgcaactacgctaaaggtactccag

SEQ ID NO: 22786 - DNA, 1842 bp, Muscodor strobelii
  misc_feature: SGI cDNA ID NO. 567742
  misc_feature: Encodes the peptide sequence at SEQ ID NO 22787
atggacaagatgtctcttcctccagacgtcgagcagtggctctcagagttgactgtccacctgcgatctttcccaatcaaagatatggcacccatagcctctctcgtcacactccccgtcctcatcacagccattggcactctgctgttcctacgcagcatcttcagctcctccgaagggcccaccctccgctaccgaatccccgagcccaaactcccagaggaacacaagatcctcgagaacccaagcataaagacaccaggcagcacggccatccaatgctacgcccccgccacgggccaattcctcggcttcgtcaacccctccacgcccgccggactcgaccgatccatcgcccaggccacagaggcgcagaagtcatgggctaagacgaccttcgcccagcggagagcagtgctgcagagcatgctgcagcacgtcctcgacaaccaggagaccatctgcaacatctcttctctcgatagcggcaagacgatgatagacgcacagctgggcgagatcatggtgacggcagagaaactgcaatggaccatcaagcacggcgagaccgcactcaagccctccacgcgtcccacgaacttactcctctcttacaagaagggaaaagtcatctacgagcccctgggagtcgtggcgaccctcgtgtcgtggaactaccccttccacaacctcatgggccccatcatatccgccatcttcgcagggaacggcatcgtcgtcaaagtatcagagcagacctgctggtcctcggcatactacacgtccatcgcccggggagccctcgtagcgcacgaccacgaccctgccttgatccagaccgtcgtctgctggccccagaccgctaatcacctaacctcccacccgggaatcgcacacataaccttcatcggctcccgccccgtctgccactccgtcgccgcatccgcagcgaaaagcctaacccccgtcgtcgcggaactaggcggcaaagacgcagccatggtcctcgactccgcttcccacgacctgccgcgaatcgccgacattttgttacgcggcacattccaagcctcaggacaaaactgcataggcatcgagcgcatcatagcaacaccaggcgtctactctaccttactctctatgcttacacccaaagtccaagcactacgcatgggcctcgataaagacgtcggggcaatgatatccaacacctccttcacccgactcgaatccctcgtcgaagacgccgtatcaaagggcgcacgactattagctgggggcaagagatacatacacccggatcatcccaatggttattatttcacgcctacgcttcttgcagatgtgacgaccgatatgcaagttgcgaacgaggaatgtttcgggccgatcatgacacttatgcaagccccctcttcaagcgcgaaagatgtcctggcgctggcaaatgcgccgcattttggactgggagcgtcagtctatgggaaagactctgatcccgaactcaaagctatagtagccggtgtcagagcgggtggggtagcggtaaatgactttgcggtgttctacgctattcaactgccattcggcggcgtaggagggtcaggttacgggaggtttgcgggcgaggagggattaagggggttgtgcaacgcgaagagtatttgtgaggatcggtttggatggctggggattcgtacggctattccgccgcctgcgcagtatcctgtgccgagccaggagaaggggtggaggtttacgaggggggttgtggggattgggtatgggattggaatctgggacaaggcttgggctttgcttgatgtgctgcggaatatgtga

SEQ ID NO: 22787 - protein, 613 aa, Muscodor strobelii
  misc_feature: SGI Peptide ID NO. 567742
  misc_feature (85)..(555): Pfam Id: PF00171 Pfam Desc: Aldehyde dehydrogenase family
  misc_feature (10)..(612): NCBI GI: 116193521 Blast Desc: CHGG_06478 [Chaetomium globosum CBS 148.51] gi|88182391|gb|EAQ89859.1| CHGG_06478 [Chaetomium globosum CBS 148.51]
  misc_feature (55)..(612): NCBI GI: 164424247 Blast Desc: NCU07442 [Neurospora crassa OR74A] gi|157070436|gb|EAA35393.2| conserved [Neurospora crassa OR74A]
  misc_feature (65)..(613): NCBI GI: 171684887 Blast Desc: protein product [Podospora anserina] gi|170942404|emb|CAP68056.1| protein product [Podospora anserina]
  misc_feature (14)..(612): NCBI GI: 39970599 Blast Desc: MGG_02766 [Magnaporthe grisea 70-15] gi|149210069|ref|XP_001522409.1| MGCH7_ch7g516 [Magnaporthe grisea 70-15] gi|86196471|gb|EAQ71109.1| MGCH7_ch7g516 grisea
  misc_feature (64)..(613): NCBI GI: 46128437 Blast Desc: FG08596.1 [Gibberella zeae PH-1]
  misc_feature (56)..(613): NCBI GI: 256733477 Blast Desc: [Nectria haematococca mpVI 77-13-4]
  misc_feature (45)..(613): NCBI GI: 154302372 Blast Desc: BC1G_09970 [Botryotinia fuckeliana B05.10] gi|150855458|gb|EDN30650.1| BC1G_09970 [Botryotinia fuckeliana B05.10]
  misc_feature (73)..(596): NCBI GI: 169609498 Blast Desc: SNOG_07841 [Phaeosphaeria nodorum SN15] gi|160701855|gb|EAT85307.2| SNOG_07841 [Phaeosphaeria nodorum SN15]
  misc_feature (27)..(511): NCBI GI: 156055890 Blast Desc: SS1G_05297 [Sclerotinia sclerotiorum 1980] gi|154703081|gb|EDO02820.1| SS1G_05297 [Sclerotinia sclerotiorum 1980]
  misc_feature (70)..(613): NCBI GI: 67540932 Blast Desc: AN6636.2 [Aspergillus nidulans FGSC A4] gi|40738975|gb|EAA58165.1| AN6636.2 [Aspergillus nidulans FGSC A4] gi|259480216|tpe|CBF71144.1| TPA: oxidoreductase (Msc7), FGSC
  misc_feature (92)..(611): SWISSPROT Homolog: EC 1.2.1.3 Aldehyde dehydrogenase (NAD(+))
  misc_feature: Useful for introducing or modulating the production of volatile compounds
  misc_feature: Useful for fungicidal and/or biocontrol applications
MDKMSLPPDVEQWLSELTVHLRSFPIKDMAPIASLVTLPVLITAIGTLLFLRSIFSSSEGPTLRYRIPEPKLPEEHKILENPSIKTPGSTAIQCYAPATGQFLGFVNPSTPAGLDRSIAQATEAQKSWAKTTFAQRRAVLQSMLQHVLDNQETICNISSLDSGKTMIDAQLGEIMVTAEKLQWTIKHGETALKPSTRPTNLLLSYKKGKVIYEPLGVVATLVSWNYPFHNLMGPIISAIFAGNGIVVKVSEQTCWSSAYYTSIARGALVAHDHDPALIQTVVCWPQTANHLTSHPGIAHITFIGSRPVCHSVAASAAKSLTPVVAELGGKDAAMVLDSASHDLPRIADILLRGTFQASGQNCIGIERIIATPGVYSTLLSMLTPKVQALRMGLDKDVGAMISNTSFTRLESLVEDAVSKGARLLAGGKRYIHPDHPNGYYFTPTLLADVTTDMQVANEECFGPIMTLMQAPSSSAKDVLALANAPHFGLGASVYGKDSDPELKAIVAGVRAGGVAVNDFAVFYAIQLPFGGVGGSGYGRFAGEEGLRGLCNAKSICEDRFGWLGIRTAIPPPAQYPVPSQEKGWRFTRGVVGIGYGIGIWDKAWALLDVLRNM

SEQ ID NO: 22788 - DNA, 2272 bp, Muscodor strobelii
  misc_feature: SGI EST ID NO. CUFF.53551.0
  misc_feature: Variant of the nucleotide sequence at SEQ ID NO 22786
cagtctaagggtatgggaaattcaaattaattgtttagcaggcaattgcccccctctcagctaggcaatcgcgacaagttgtatgcttggggcattctcctgacttgtggccatgacatcgtggaccaaactgcgtctatgagtctcagaggagtcaattgatcggacacagcaccgttgggcaccatggacaagatgtctcttcctccagacgtcgagcagtggctctcagagttgactgtccacctgcgatctttcccaatcaaagatatggcacccatagcctctctcgtcacactccccgtcctcatcacagccattggcactctgctgttcctacgcagcatcttcagctcctccgaagggcccaccctccgctaccgaatccccgagcccaaactcccagaggaacacaagatcctcgagaacccaagcataaagacaccaggcagcacggccatccaatgctacgcccccgccacgggccaattcctcggcttcgtcaacccctccacgcccgccggactcgaccgatccatcgcccaggccacagaggcgcagaagtcatgggctaagacgaccttcgcccagcggagagcagtgctgcagagcatgctgcagcacgtcctcgacaaccaggagaccatctgcaacatctcttctctcgatagcggcaagacgatgatagacgcacagctgggcgagatcatggtgacggcagagaaactgcaatggaccatcaagcacggcgagaccgcactcaagccctccacgcgtcccacgaacttactcctctcttacaagaagggaaaagtcatctacgagcccctgggagtcgtggcgaccctcgtgtcgtggaactaccccttccacaacctcatgggccccatcatatccgccatcttcgcagggaacggcatcgtcgtcaaagtatcagagcagacctgctggtcctcggcatactacacgtccatcgcccggggagccctcgtagcgcacgaccacgaccctgccttgatccagaccgtcgtctgctggccccagaccgctaatcacctaacctcccacccgggaatcgcacacataaccttcatcggctcccgccccgtctgccactccgtcgccgcatccgcagcgaaaagcctaacccccgtcgtcgcggaactaggcggcaaagacgcagccatggtcctcgactccgcttcccacgacctgccgcgaatcgccgacattttgttacgcggcacattccaagcctcaggacaaaactgcataggcatcgagcgcatcatagcaacaccaggcgtctactctaccttactctctatgcttacacccaaagtccaagcactacgcatgggcctcgataaagacgtcggggcaatgatatccaacacctccttcacccgactcgaatccctcgtcgaagacgccgtatcaaagggcgcacgactattagctgggggcaagagatacatacacccggatcatcccaatggttattatttcacgcctacgcttcttgcagatgtgacgaccgatatgcaagttgcgaacgaggaatgtttcgggccgatcatgacacttatgcaagccccctcttcaagcgcgaaagatgtcctggcgctggcaaatgcgccgcattttggactgggagcgtcagtctatgggaaagactctgatcccgaactcaaagctatagtagccggtgtcagagcgggtggggtagcggtaaatgactttgcggtgttctacgctattcaactgccattcggcggcgtaggagggtcaggttacgggaggtttgcgggcgaggagggattaagggggttgtgcaacgcgaagagtatttgtgaggatcggtttggatggctggggattcgtacggctattccgccgcctgcgcagtatcctgtgccgagccaggagaaggggtggaggtttacgaggggggttgtggggattgggtatgggattggaatctgggacaaggcttgggctttgcttgatgtgctgcggaatatgtgatgtgatgtgagatgatgtgagatggtatgatgggatgggatgggatgtggagggggtagtagaggtgatagatgaagtcatacatagataaagagagcacgatatggtgtttacgaagggagaattatctcttatgtcctgcacctttctctcggtatataatatcaccacaacatacctacatgcttacctcacccatgaaaaacaatatagagatctaaaataactagacacacaatacata

SEQ ID NO: 22789 - DNA, 1836 bp, Muscodor strobelii
  misc_feature: SGI cDNA ID NO. 567743
  misc_feature: Encodes the peptide sequence at SEQ ID NO 22790
atgtcgggctgggacatggccgacgtcaaagccgccctccccgaggagggccacgacaatggtggtgagaccaccgctccggctgctgtcccggagcgccgcactggacccatcgaggcttgggtcactccgcaggccaacgactactccgaggaccgcgagaacacccagtggatgggcagcagcgctgtctatgagtgggacggcgaggagggcgaccttggccctgagcagcccgagctcgaggctcaactgttcggtgcccccgaggagcgcgacccccaaggcatcaatttcaacaagatcaccaccattgatgtcctccaggagggtatggagcgcgtcatccccatcggtcagttcaaggacgctggcctgcatcctgccatgctcaagaacgtcgagctcgccggctacaagacgcccacgcctatccagcgctactgctttcccgccatcaagatgggatacgacctcattgccattgctcagactggttctggcaagaccgccgcttacatggtcccgatcctgaaccatctgatgggcaaagccaagaagctcgctgcaccccgtccgactgccaaggcttatgccgatggtactgccgaccgtgttcgtgctgagcctttggtcgtcgtggttgtccccacccgcgagttggccatccagatcttcaacgaggcccgcaagttctgctaccgcacaatgctacgtccagctactgcctacggtggcgcccccatgggtgagcagatcaacaacttgcagcgtggttgtgatgtcctcatcgcctcccctggccgtcttattgacatgatggagagacccgacgttctctccctccgtcgtgtgaagtacatggttgtcgacgaagccgatgagatgcttgacgatgattgggctgaggagttctccaagattctgactggtggtgaacaggaggagggcaacgtgaagtacatgctcttctcggcaactttcccaactgccgttcgcaagctggccaagactcacctcgccgagacccacgttcgcatcaaggtcggccgcgttggcagcactcatgagaatatccgccaggatatcatttataccgaatcgcacatgaagaagcaggcactgctcgaccttctctggtcccgcaagcccactcgcacaatcatctttgtgaacagcaagcgcactgctgatgacattgatgacttcctcttcaataacggtatgccttgcacctccatgcatgctgatcgtacccagcgcgagcgtgaagatgccatgcgagccttccgcagcggccgaacgcctatccttatcgccaccggtgtctctgctcgaggcattgacgtacgtaatgtgatgcacgtaattaactacgatctgccttccatggatcatggtggcattcaggagtacattcatcgaatcggccgaactggacgcatcggccatcaaggcactgccacttctttttacaatgaccgcgatgagcccatcgccaaccttctgaccatgactctcatggagactggtcaggacgttcctgatttcctggatgctttcaagcctgaggattcgaagctcaagtttgaatacgacagtgacgaggaggaggccgaggagggcgctgatggtggcgctggcggttggggcaatgatgccgctgccggtgctactactggcggaggcggagatggagatggttggggcaatggtggctctgctgcttccgctactcccgctgctcccgctgacgacggttggggttctggtggtgctcagcaggctgatgctggcaacgccgccaacgatgcctgggccaagtctgattggtga

SEQ ID NO: 22790 - protein, 611 aa, Muscodor strobelii
  misc_feature: SGI Peptide ID NO. 567743
  misc_feature (143)..(335): Pfam Id: PF00270 Pfam Desc: DEAD/DEAH box helicase
  misc_feature (403)..(483): Pfam Id: PF00271 Pfam Desc: Helicase conserved C-terminal domain
  misc_feature (4)..(538): NCBI GI: 85115638 Blast Desc: NCU09093 [Neurospora crassa OR74A] gi|28926707|gb|EAA35674.1| NCU09093 [Neurospora crassa OR74A]
  misc_feature (1)..(544): NCBI GI: 171685013 Blast Desc: protein product [Podospora anserina] gi|170942467|emb|CAP68119.1| protein product [Podospora anserina]
  misc_feature (1)..(589): NCBI GI: 156057183 Blast Desc: SS1G_04322 [Sclerotinia sclerotiorum 1980] gi|154702108|gb|EDO01847.1| SS1G_04322 [Sclerotinia sclerotiorum 1980]
  misc_feature (1)..(524): NCBI GI: 154293477 Blast Desc: BC1G_13890 [Botryotinia fuckeliana B05.10] gi|150845271|gb|EDN20464.1| BC1G_13890 [Botryotinia fuckeliana B05.10]
  misc_feature (8)..(538): NCBI GI: 116193555 Blast Desc: CHGG_06495 [Chaetomium globosum CBS 148.51] gi|88182408|gb|EAQ89876.1| CHGG_06495 [Chaetomium globosum CBS 148.51]
  misc_feature (4)..(535): NCBI GI: 46128439 Blast Desc: FG08597.1 [Gibberella zeae PH-1]
  misc_feature (57)..(591): NCBI GI: 39970591 Blast Desc: MGG_02762 [Magnaporthe grisea 70-15] gi|149210055|ref|XP_001522402.1| MGCH7_ch7g509 [Magnaporthe grisea 70-15] gi|86196464|gb|EAQ71102.1| MGCH7_ch7g509 grisea
  misc_feature (18)..(535): NCBI GI: 256733976 Blast Desc: [Nectria haematococca mpVI 77-13-4]
  misc_feature (1)..(530): NCBI GI: 119492913 Blast Desc: DEAD/DEAH box RNA helicase, [Neosartorya fischeri NRRL 181] gi|119411891|gb|EAW21834.1| DEAD/DEAH box RNA helicase, [Neosartorya fischeri NRRL 181]
  misc_feature (1)..(573): NCBI GI: 145234228 Blast Desc: An02g13540 [Aspergillus niger] gi|134057429|emb|CAK47767.1| protein product [Aspergillus niger]
MSGWDMADVKAALPEEGHDNGGETTAPAAVPERRTGPIEAWVTPQANDYSEDRENTQWMGSSAVYEWDGEEGDLGPEQPELEAQLFGAPEERDPQGINFNKITTIDVLQEGMERVIPIGQFKDAGLHPAMLKNVELAGYKTPTPIQRYCFPAIKMGYDLIAIAQTGSGKTAAYMVPILNHLMGKAKKLAAPRPTAKAYADGTADRVRAEPLVVVVVPTRELAIQIFNEARKFCYRTMLRPATAYGGAPMGEQINNLQRGCDVLIASPGRLIDMMERPDVLSLRRVKYMVVDEADEMLDDDWAEEFSKILTGGEQEEGNVKYMLFSATFPTAVRKLAKTHLAETHVRIKVGRVGSTHENIRQDIIYTESHMKKQALLDLLWSRKPTRTIIFVNSKRTADDIDDFLFNNGMPCTSMHADRTQREREDAMRAFRSGRTPILIATGVSARGIDVRNVMHVINYDLPSMDHGGIQEYIHRIGRTGRIGHQGTATSFYNDRDEPIANLLTMTLMETGQDVPDFLDAFKPEDSKLKFEYDSDEEEAEEGADGGAGGWGNDAAAGATTGGGGDGDGWGNGGSAASATPAAPADDGWGSGGAQQADAGNAANDAWAKSDW

SEQ ID NO: 22791 - DNA, 1077 bp, Muscodor strobelii
  misc_feature: SGI cDNA ID NO. 567744
  misc_feature: Encodes the peptide sequence at SEQ ID NO 22792
atggggtccagcagcaagaaaaagaaggagaagaagaaggacttccagaagcccaagctgaaggtcggcaaggccaaacccaaggccgccaatgccaccagcaccagcttcaaggccaagtccatcgtcttgcagcagcagctgtccgaggtcgcccccgatgtcgtcgagcggttcaagcacaacctctctctcactacctcccgcaacgacacccagcgaaaagaggccctcgcccatctcaccggccagctctcgacgagcccgcccacgaaccccgtcggcacatccaccctgcttcagaagctgctcccccgcatgaccgactcatcctctggcgtacgaacacagctgctcaaagtcctccaacaaatccccaagcgcgaaatcaggcctcatgtacagaaagctatgctctacgtccgcggcgcattgacgcatctatcacaagatatcaaggacgacggattgaactacatggagtggctgctagacgccgcgggcgaggacgtcgtgtcgagtcctgggtgctgggtcaagcccctcaaggacttcatggccgtgctcggctggtccatcgctcccgcccccacaaccgcacagtccaagtcggccaaatccacaaaaggcggctggacatccgcaccccggacgacgttcggctccaagaaattcggccagtcgtttcccaggcagatgcgcgtccttgcgacgtttctggagcatggcttcagacccgaggatcccatcccctggagtcccaaccaatacgtcaacaacttcacgcaattgcccaaggagcccaatccttatggctatctggggctctttgcgctgccgagggacgaagaaggggagatctacagaaatagggaggatagactagtgatttttgccaagagattcagggcaaccatcgaggccggggtggactcggcgaagaaggagggcggtgaggccggacgggctgctgctatgcttgacaaagtggttagggatggcttggatggatttgatggggactcaggacttcttgaagatggtgacgacgctttttggtatggctatatcctgtaa

SEQ ID NO: 22792 - protein, 358 aa, Muscodor strobelii
  misc_feature: SGI Peptide ID NO. 567744
  misc_feature (1)..(339): NCBI GI: 39970589 Blast Desc: MGG_02761 [Magnaporthe grisea 70-15] gi|149210053|ref|XP_001522401.1| MGCH7_ch7g508 [Magnaporthe grisea 70-15] gi|160011355|sp|A4RBW8.1|IPI1_MAGGR RecName: IPI1
  misc_feature (1)..(344): NCBI GI: 46128441 Blast Desc: FG08598.1 [Gibberella zeae PH-1]
  misc_feature (1)..(339): NCBI GI: 261353254 Blast Desc: pre-rRNA-processing protein IPI1 [Verticillium albo-atrum VaMs.102]
  misc_feature (1)..(344): NCBI GI: 256733977 Blast Desc: [Nectria haematococca mpVI 77-13-4]
  misc_feature (1)..(333): NCBI GI: 212537475 Blast Desc: rRNA processing protein Ipi1, [Penicillium marneffei ATCC 18224] gi|210068635|gb|EEA22726.1| rRNA processing protein Ipi1, [Penicillium marneffei ATCC 18224]
  misc_feature (1)..(333): NCBI GI: 240108988 Blast Desc: CPC735_024930 [Coccidioides posadasii C735 delta SOWgp]
  misc_feature (1)..(337): NCBI GI: 85115642 Blast Desc: NCU09094 [Neurospora crassa OR74A] gi|74618494|sp|Q7SFQ6.1|IPI1_NEUCR RecName: Full=Pre-rRNA-processing protein ipi-1 gi|28926708|gb|EAA35675.1|
  misc_feature (1)..(340): NCBI GI: 156055368 Blast Desc: SS1G_05035 [Sclerotinia sclerotiorum 1980] gi|160011358|sp|A7EI93.1|IPI1_SCLS1 RecName: Full=Pre-rRNA-processing protein ipi1 gi|154702820|gb|EDO02559.1|
  misc_feature (1)..(333): NCBI GI: 258572378 Blast Desc: [Uncinocarpus reesii 1704] gi|237905221|gb|EEP79622.1| [Uncinocarpus reesii 1704]
  misc_feature (67)..(337): NCBI GI: 171685011 Blast Desc: protein product [Podospora anserina] gi|170942466|emb|CAP68118.1| protein product [Podospora anserina]
MGSSSKKKKEKKKDFQKPKLKVGKAKPKAANATSTSFKAKSIVLQQQLSEVAPDVVERFKHNLSLTTSRNDTQRKEALAHLTGQLSTSPPTNPVGTSTLLQKLLPRMTDSSSGVRTQLLKVLQQIPKREIRPHVQKAMLYVRGALTHLSQDIKDDGLNYMEWLLDAAGEDVVSSPGCWVKPLKDFMAVLGWSIAPAPTTAQSKSAKSTKGGWTSAPRTTFGSKKFGQSFPRQMRVLATFLEHGFRPEDPIPWSPNQYVNNFTQLPKEPNPYGYLGLFALPRDEEGEIYRNREDRLVIFAKRFRATIEAGVDSAKKEGGEAGRAAAMLDKVVRDGLDGFDGDSGLLEDGDDAFWYGYIL

SEQ ID NO: 22793 - DNA, 1715 bp, Muscodor strobelii
  misc_feature: SGI EST ID NO. CUFF.53548.0
  misc_feature: Variant of the nucleotide sequence at SEQ ID NO 22791
cccaattctgccgggacccaccgccaaaaagttgggaatgctgctagtattttccatatgattgcaggtaccgcccctcgacgacgtgaattcattcttgatcttgtcgctttgcgcgcgtgtagatgtagattcgacgtcgccgccccaatgttacaactatggggtccagcagcaagaaaaagaaggagaagaagaaggacttccagaagcccaagctgaaggtcggcaaggccaaacccaaggccgccaatgccaccagcaccagcttcaaggccaagtccatcgtcttgcagcagcagctgtccgaggtcgcccccgatgtcgtcgagcggttcaagcacaacctctctctcactacctcccgcaacgacacccagcgaaaagaggccctcgcccatctcaccggccagctctcgacgagcccgcccacgaaccccgtcggcacatccaccctgcttcagaagctgctcccccgcatgaccgactcatcctctggcgtacgaacacagctgctcaaagtcctccaacaaatccccaagcgcgaaatcaggcctcatgtacagaaagctatgctctacgtccgcggcgcattgacgcatctatcacaagatatcaaggacgacggattgaactacatggagtggctgctagacgccgcgggcgaggacgtcgtgtcgagtcctgggtgctgggtcaagcccctcaaggacttcatggccgtgctcggctggtccatcgctcccgcccccacaaccgcacagtccaagtcggccaaatccacaaaaggcggctggacatccgcaccccggacgacgttcggctccaagaaattcggccagtcgtttcccaggcagatgcgcgtccttgcgacgtttctggagcatggcttcagacccgaggatcccatcccctggagtcccaaccaatacgtcaacaacttcacgcaattgcccaaggagcccaatccttatggctatctggggctctttgcgctgccgagggacgaagaaggggagatctacagaaatagggaggatagactagtgatttttgccaagagattcagggcaaccatcgaggccggggtggactcggcgaagaaggagggcggtgaggccggacgggctgctgctatgcttgacaaagtggttagggatggcttggatggatttgatggggactcaggacttcttgaagatggtgacgacgctttttggtatggctatatcctgtaaataatgaacgaattgatgcgtgaaatagccatttcacctgccttcgggatgctgggtgacgacggcttgggctcaattctgtgaagactcactgacaacgacgatatcgcaattcgcgcttggaagacgacaatcgggacatagatctagatgcctcgtccgccattcactgattgagatagctgttggatttgggcgattccacatcccacctcttcgttaaggtacctatttatcccagaccaactccactgccggattcagacgttcggcctcaagctaagcactcacgagacactgcctggagggctacctcgagcccttcagttgtagccagaattttcaggtttagatattgatcagttccctaagccgcgttggtagtgtcgcctttaaaaaaaaggctcctgagatctccttgaaatatggttcaattttctgtatggaggtttacatccaccaacacatatacattcc

SEQ ID NO: 22794 - DNA, 441 bp, Muscodor strobelii
  misc_feature: SGI cDNA ID NO. 567745
  misc_feature: Encodes the peptide sequence at SEQ ID NO 22795
atggccgagaaaggactaggctccgtaaacctcgaatcgatggaagagtctctccacagactgtccaagaagccaggcgtcaaagcctggctcatgctcgaccgatcaaatggcaccgttctcaagaccagcggccagatagctgctatccggcccccaaagtcgacctcgaccacgacccagcaaccacagtcgcagcccacccctggcgcttcattttcaagcgacgccggcacggagatagacagcgagacacaggcagcacaacagctggccaggatggtgtacagttttgtcgtcgcgtctgggagttttgtagatgagatagatacagaggacgagctgaagctactacgcctacgaaccagaaagcaggaattcgtcatcgtgcctgagcccaagtacctactcgtcgtcatccacgatacaccacccgcatga

SEQ ID NO: 22795 - protein, 146 aa, Muscodor strobelii
  misc_feature: SGI Peptide ID NO. 567745
  misc_feature (12)..(146): NCBI GI: 46128443 Blast Desc: FG08599.1 [Gibberella zeae PH-1]
  misc_feature (1)..(143): NCBI GI: 116193551 Blast Desc: CHGG_06493 [Chaetomium globosum CBS 148.51] gi|88182406|gb|EAQ89874.1| CHGG_06493 [Chaetomium globosum CBS 148.51]
  misc_feature (12)..(143): NCBI GI: 149210051 Blast Desc: MGCH7_ch7g507 [Magnaporthe grisea 70-15] gi|86196462|gb|EAQ71100.1| MGCH7_ch7g507 [Magnaporthe grisea 70-15]
  misc_feature (12)..(146): NCBI GI: 154302537 Blast Desc: BC1G_09845 [Botryotinia fuckeliana B05.10] gi|150855334|gb|EDN30526.1| BC1G_09845 [Botryotinia fuckeliana B05.10]
  misc_feature (12)..(146): NCBI GI: 261353255 Blast Desc: conserved [Verticillium albo-atrum VaMs.102]
  misc_feature (18)..(146): NCBI GI: 189198630 Blast Desc: conserved [Pyrenophora tritici-repentis Pt-1C-BFP] gi|187982751|gb|EDU48239.1| conserved [Pyrenophora tritici-repentis Pt-1C-BFP]
  misc_feature (12)..(143): NCBI GI: 145610040 Blast Desc: MGG_02760 [Magnaporthe grisea 70-15] gi|145017427|gb|EDK01790.1| MGG_02760 [Magnaporthe grisea 70-15]
  misc_feature (10)..(144): NCBI GI: 171685009 Blast Desc: protein product [Podospora anserina] gi|170942465|emb|CAP68117.1| protein product [Podospora anserina]
  misc_feature (86)..(146): NCBI GI: 85115646 Blast Desc: NCU09095 [Neurospora crassa OR74A] gi|28926709|gb|EAA35676.1| [Neurospora crassa OR74A]
  misc_feature (18)..(131): NCBI GI: 169609010 Blast Desc: SNOG_07590 [Phaeosphaeria nodorum SN15] gi|111063936|gb|EAT85056.1| SNOG_07590 [Phaeosphaeria nodorum SN15]
MAEKGLGSVNLESMEESLHRLSKKPGVKAWLMLDRSNGTVLKTSGQIAAIRPPKSTSTTTQQPQSQPTPGASFSSDAGTEIDSETQAAQQLARMVYSFVVASGSFVDEIDTEDELKLLRLRTRKQEFVIVPEPKYLLVVIHDTPPA

SEQ ID NO: 22796 - DNA, 1874 bp, Muscodor strobelii
  misc_feature: SGI EST ID NO. CUFF.53563.0
  misc_feature: Variant of the nucleotide sequence at SEQ ID NO 22794
cgattttaaaattcacgaggctttgtctaatcaagaccgtaggtcatgactgatgccattagatcaaaatcaaccaagtatgccccttttttctacgagcccctagcggcgtcatcgcctaaatgacccgctaaggacgcgccctgacaccggaacccgccaacgcctgttgtttctttaggctcaacaatcaacatcggcgcaagtaccaaatctcaagaaacactcagatcctcatgcacacattccacatatcctcctagcgatacatagagaagcgcctcaagatggccgagaaaggactaggctccgtaaacctcgaatcgatggaagagtctctccacagactgtccaagaagccaggcgtcaaagcctggctcatgctcgaccgatcaaatggcaccgttctcaagaccagcggccagatagctgctatccggcccccaaagtcgacctcgaccacgacccagcaaccacagtcgcagcccacccctggcgcttcattttcaagcgacgccggcacggagatagacagcgagacacaggcagcacaacagctggccaggatggtgtacagttttgtcgtcgcgtctgggagttttgtagatgagatagatacagaggacgagctgaagctactacgcctacgaaccagaaagcaggaattcgtcatcgtgcctgagcccaagtacctactcgtcgtcatccacgatacaccacccgcatgacggacggaaccgaagcaagatggagggatggtggttgcgaccctgcctcgaacaccccggcagtgggtgggtggaccatggcgataatctgtcgatagacagagagcgaaaagcgaaaatcgcatggtgtcgtgtcagctgggttctggtttggcctatcgaacggaagataggctggttgcttgcatgcttgttagtatcggcactggaatggtatggtaggcgttctggcgaaggcgaaaaaagatgataccccccgcgacttagcgaacgcgaatggaaagaaagaaagaaagataatgcagttgatacacgaatccttcagactgtctgttagtctgtgcttgaaactcgggtgcctagcattatctcagacgcgcgataggccctccctctgcatctccccgctctcacccgccttgctagtcagggcttgttctctgagataggcagtctctcccaagaatccctgggaccgttgagcgctagtgctgatgggcgatgagatacccgctgtggtagaagtgttgagtggcgttgagaggtgttgagagtgggtgaagggggcgcctcagctgcacgggcaaggaggagatcgtgccgtataccccatacgtcaagatgatggcatggtggcctcctcgctatagggtgaagtatacggcgagcgttgcgagtaggatgggttgtagacgaggtgatgacatggcatgggacctacatacctcctcaactatttgggaataccaggtaatagatagacagataggtaatgaatccgaacagcatggtctcgaacccggatatcatgacgaatcccccgcttccagagatccgaagctttgtaaaatcggtgcgcatggacttacaaatggatgaacctggtctaggaggaagagtctggcaaggtaaaaagtgccactgccatgtcctcgggcccagaaccgctgtcgcttccgaacgatccgcctgggaagccacgagtactttgaagactctctggggcaaagtatctcgagtcggggtggttttagaaccatcccagccatcgtcaattatgcataatacttgtagagtctgtctgtcagtctcgactagggcaataagcccggaggatggtactcaaaacgcgagggtagtcagtca

SEQ ID NO: 22797 - DNA, 3348 bp, Muscodor strobelii
  misc_feature: SGI cDNA ID NO. 567746
  misc_feature: Encodes the peptide sequence at SEQ ID NO 22798
atgcagcttacgacgagagtctcccttcacgccattaactggacgaaggaggtccaggacacgacagatatgccgtcactcacctcgctcaaacgttctgcacgtggtctaatgaatgacatgcgtgccagtagcggaagtggggaacataacactagccacaccggactgagagacgaggagcggcacagaggagctgagccagcgaccgaggatgtcccggaaagatctcgtcagagttcgtccaaaagagctttcctacgaggtctaattgtcacgacgaaggacaagttggagggtcgtcgcatcctcgatcgcaatctggggaccgagaccgagggcaatggaaatggcgtcgtcagtgaccatgatcggggtccaagtcaggccgatagtagcactgtctcatccacttccccgtcatccgagacgcctctgtcaccccggtcaaccaccaactccaacaagcctctgccgtccccgcccccgggcacggttgattctcaagttgatggccgtcctcgtcgacctacgctcaggttgaaccgtatcatgtctaacctaaccgaggccgagatcgagaagttgttttctggagctccacagttctttgcacgctcacaaggccacggttcaggggcgcctaacccttcagtggcattcccattcaacgaggaattgactattcgtgacctcactgaccatgctgcaattgaagatgacgcctggggctgtatgaccgccattcctcgtctcatccaacgtgaccctttgtctgcagtctcaccaaccagtaaggcccggccccatttcaattcgagatgtcgggagagacctggcatggtaagcatgcagggcctggaaaagggaactcttggatatcaagctgcgttagaattatctgttgccgacgctctccaggaagaacagtatggcttcgacagtataggatctaaagcaaacgtcattgttgagcaacggcagaggctcataacctctaaggaagggttgcggcacatcgatgactccagtatcatggaacagctcattaaaatacaagaacgatatgaatctggccaattctcatggcgatccaaatcgcaagagctgtatcaggatctatttaagaaagtgctatatccacccgccagagtaatcgattcgaagaacccctatagtctttcggtacagatacacgcccttgtcaaagttctcgccgcgtcaaacgcttggattgacttctctcgcgtggaatggcgcatccgtcttggtcaaatcttgtggggcttcccccttgatgatgaattgtttgacggctcttcgatcaaggatggcaacgatgcacaagaccggagcgaagagcgatattggctgttgatacaaatccttttggcctgcgagctgctaacgcgactcgatgccatcactgagggagacgattttacctctgacaagttgaaatcctccgatatccacagattcgaaaaagaggccaacacatctgtaaaatggtcactcgtactcgcacgatcatggcttgaaaacattgcagtaactaaaaccagcaatatgccttctgaaccctctacacctgttagttggctaacaaacctgactaataaagtcacactgaagcatgaacatatgcatgggtcccatcacaccgatcacactcagcaccgccataacactaacgccgaatacctatattcaattagggggagatatgccgagcggcaggttagcggcctaatgcactttgctcggaagctgcgctggcccggcctcgaacttcgtggtcaaaagatatttgcagacgcgataactctagatgaggcaacacctatcaacactgcagtgccaactacggatggccgccggtcgtcatactttggcggtgaccgagcgtctgatgagatgaagaggcaacctgtcagaagacgtaaaattgaagccgccttgcacccatcaggctggctttcgaaatcctatgtttcaggactgatactgccaggcgagacattgtctcacttcctcatgtccgccttaattgaaaacgacgagtctgcaatcgcaagacttggcccactcacaagcttgtgtggaggcttcgtctatagcaataagagtttttggagcgtggcttgtattgtcggtcgcgttttggccgcgggaaggggctcggctgagtgcatgggctggatatctaccgatgtgatccctcatagattcgatgaaggctgggtaaatatcagagtggaagatatccgtgacgatgtcacgaagattgggaagaaagcccgcatatggggaaagacttctgtcgaacgagagtcaaaagtactaggcgactccgacatagcagacgtgcttcccgccgacttcatcattccacatgaggctacatacaccaagagacccccatcaaatgtccgcatcgaaatgagatcgttgaatctctctgcaccacttggtaaacctcaatcacccaccttacagagccgtttctcgacattctccccttccagaaacaagaccaaagagattgagacctacccagcttctctttcattttctatgtgctatgatggcaatgatcacgagacagtatttgattttcagctatcgaatgatgtatactttgtgacggctcatccttgtgttgcttcgagttatgtcaagtacttgaaatcgccaacaagtcccactatacagcagattgatgttggtggtcgtgacttcgacggcaggcaatcgagtgctgcccatgtcacaggtcacccattacatcgtttctactcttacaccgccatccatctcgcacatctactgagccggtcatcgtcaacaacattcgaagaactattaaatgacactcccaatactcattcccgatcgactagtacatcatcaaaagcttccgcctcaaaccgcccgccccgagtactcgtcattgactgtatcactggtttcgctccacccgcgtctccagacttgccttcactctctcgcatgtcatccttgtcctcctcattcggtctggaacccacaaactctcctcctgtccaactgtcaacctctccaggtgctgaacgccgaccaaaatcggcacgctcaagctccaacacaatcgaacgaattgaccctccaagtgcaacgccagaggccaagatgcagcttccaactcggaggcgccaattcggttcggacctcgaaatcctcgtccgtgcgtactgcgctcagaggggatggaatgctatcatcagtcgtcgtaggaggggctgtctatcctgtgccattcgcgaggctggcgcgttaggatggagagttgttatccgcgtggattga

SEQ ID NO: 22798 - protein, 1115 aa, Muscodor strobelii
  misc_feature: SGI Peptide ID NO. 567746
  misc_feature (185)..(1115): NCBI GI: 261353257 Blast Desc: conserved [Verticillium albo-atrum VaMs.102]
  misc_feature (185)..(1115): NCBI GI: 171685007 Blast Desc: protein product [Podospora anserina] gi|170942464|emb|CAP68116.1| protein product [Podospora anserina]
  misc_feature (185)..(1115): NCBI GI: 145610042 Blast Desc: MGG_02759 [Magnaporthe grisea 70-15] gi|145017428|gb|EDK01791.1| MGG_02759 [Magnaporthe grisea 70-15]
  misc_feature (185)..(1092): NCBI GI: 149210049 Blast Desc: MGCH7_ch7g506 [Magnaporthe grisea 70-15] gi|86196461|gb|EAQ71099.1| MGCH7_ch7g506 [Magnaporthe grisea 70-15]
  misc_feature (185)..(1115): NCBI GI: 256733479 Blast Desc: NECHADRAFT_58970 [Nectria haematococca mpVI 77-13-4]
  misc_feature (174)..(1115): NCBI GI: 46128445 Blast Desc: FG08600.1 [Gibberella zeae PH-1]
  misc_feature (65)..(966): NCBI GI: 116193549 Blast Desc: CHGG_06492 [Chaetomium globosum CBS 148.51] gi|88182405|gb|EAQ89873.1| CHGG_06492 [Chaetomium globosum CBS 148.51]
  misc_feature (185)..(1115): NCBI GI: 164423333 Blast Desc: NCU09097 [Neurospora crassa OR74A] gi|157070048|gb|EAA35678.2| conserved [Neurospora crassa OR74A]
  misc_feature (127)..(1114): NCBI GI: 154302529 Blast Desc: BC1G_09841 [Botryotinia fuckeliana B05.10] gi|150855330|gb|EDN30522.1| BC1G_09841 [Botryotinia fuckeliana B05.10]
  misc_feature (24)..(913): NCBI GI: 156055360 Blast Desc: SS1G_05031 [Sclerotinia sclerotiorum 1980] gi|154702816|gb|EDO02555.1| SS1G_05031 [Sclerotinia sclerotiorum 1980]
MQLTTRVSLHAINWTKEVQDTTDMPSLTSLKRSARGLMNDMRASSGSGEHNTSHTGLRDEERHRGAEPATEDVPERSRQSSSKRAFLRGLIVTTKDKLEGRRILDRNLGTETEGNGNGVVSDHDRGPSQADSSTVSSTSPSSETPLSPRSTTNSNKPLPSPPPGTVDSQVDGRPRRPTLRLNRIMSNLTEAEIEKLFSGAPQFFARSQGHGSGAPNPSVAFPFNEELTIRDLTDHAAIEDDAWGCMTAIPRLIQRDPLSAVSPTSKARPHFNSRCRERPGMVSMQGLEKGTLGYQAALELSVADALQEEQYGFDSIGSKANVIVEQRQRLITSKEGLRHIDDSSIMEQLIKIQERYESGQFSWRSKSQELYQDLFKKVLYPPARVIDSKNPYSLSVQIHALVKVLAASNAWIDFSRVEWRIRLGQILWGFPLDDELFDGSSIKDGNDAQDRSEERYWLLIQILLACELLTRLDAITEGDDFTSDKLKSSDIHRFEKEANTSVKWSLVLARSWLENIAVTKTSNMPSEPSTPVSWLTNLTNKVTLKHEHMHGSHHTDHTQHRHNTNAEYLYSIRGRYAERQVSGLMHFARKLRWPGLELRGQKIFADAITLDEATPINTAVPTTDGRRSSYFGGDRASDEMKRQPVRRRKIEAALHPSGWLSKSYVSGLILPGETLSHFLMSALIENDESAIARLGPLTSLCGGFVYSNKSFWSVACIVGRVLAAGRGSAECMGWISTDVIPHRFDEGWVNIRVEDIRDDVTKIGKKARIWGKTSVERESKVLGDSDIADVLPADFIIPHEATYTKRPPSNVRIEMRSLNLSAPLGKPQSPTLQSRFSTFSPSRNKTKEIETYPASLSFSMCYDGNDHETVFDFQLSNDVYFVTAHPCVASSYVKYLKSPTSPTIQQIDVGGRDFDGRQSSAAHVTGHPLHRFYSYTAIHLAHLLSRSSSTTFEELLNDTPNTHSRSTSTSSKASASNRPPRVLVIDCITGFAPPASPDLPSLSRMSSLSSSFGLEPTNSPPVQLSTSPGAERRPKSARSSSNTIERIDPPSATPEAKMQLPTRRRQFGSDLEILVRAYCAQRGWNAIISRRRRGCLSCAIREAGALGWRVVIRVD

SEQ ID NO: 22799 - DNA, 4054 bp, Muscodor strobelii
  misc_feature: SGI EST ID NO. CUFF.53614.0
  misc_feature: Variant of the nucleotide sequence at SEQ ID NO 22797
ctttgtaccacaaaatctgggtgaatactgcaaggccttacagccgtcgccttggccaatacccattattccggcaatgggatggtgtgattgactgacttatactaacgtctcgctctcccttccattcgcaaaccgccgtcttacacgcgcctggcctcatttctagactgactttgccgtcatcatatttttatctaacatatttcttctctccattttgtatttcagcaaagatctatcataatgacacccggatgccgcgatattcttccggcagacgattattcttgacctcaacgacagatgaaccttaccttgccaatcggcaacgtgaccaatgcagcttacgacgagagtctcccttcacgccattaactggacgaaggaggtccaggacacgacagatatgccgtcactcacctcgctcaaacgttctgcacgtggtctaatgaatgacatgcgtgccagtagcggaagtggggaacataacactagccacaccggactgagagacgaggagcggcacagaggagctgagccagcgaccgaggatgtcccggaaagatctcgtcagagttcgtccaaaagagctttcctacgaggtctaattgtcacgacgaaggacaagttggagggtcgtcgcatcctcgatcgcaatctggggaccgagaccgagggcaatggaaatggcgtcgtcagtgaccatgatcggggtccaagtcaggccgatagtagcactgtctcatccacttccccgtcatccgagacgcctctgtcaccccggtcaaccaccaactccaacaagcctctgccgtccccgcccccgggcacggttgattctcaagttgatggccgtcctcgtcgacctacgctcaggttgaaccgtatcatgtctaacctaaccgaggccgagatcgagaagttgttttctggagctccacagttctttgcacgctcacaaggccacggttcaggggcgcctaacccttcagtggcattcccattcaacgaggaattgactattcgtgacctcactgaccatgctgcaattgaagatgacgcctggggctgtatgaccgccattcctcgtctcatccaacgtgaccctttgtctgcagtctcaccaaccagtaaggcccggccccatttcaattcgagatgtcgggagagacctggcatggtaagcatgcagggcctggaaaagggaactcttggatatcaagctgcgttagaattatctgttgccgacgctctccaggaagaacagtatggcttcgacagtataggatctaaagcaaacgtcattgttgagcaacggcagaggctcataacctctaaggaagggttgcggcacatcgatgactccagtatcatggaacagctcattaaaatacaagaacgatatgaatctggccaattctcatggcgatccaaatcgcaagagctgtatcaggatctatttaagaaagtgctatatccacccgccagagtaatcgattcgaagaacccctatagtctttcggtacagatacacgcccttgtcaaagttctcgccgcgtcaaacgcttggattgacttctctcgcgtggaatggcgcatccgtcttggtcaaatcttgtggggcttcccccttgatgatgaattgtttgacggctcttcgatcaaggatggcaacgatgcacaagaccggagcgaagagcgatattggctgttgatacaaatccttttggcctgcgagctgctaacgcgactcgatgccatcactgagggagacgattttacctctgacaagttgaaatcctccgatatccacagattcgaaaaagaggccaacacatctgtaaaatggtcactcgtactcgcacgatcatggcttgaaaacattgcagtaactaaaaccagcaatatgccttctgaaccctctacacctgttagttggctaacaaacctgactaataaagtcacactgaagcatgaacatatgcatgggtcccatcacaccgatcacactcagcaccgccataacactaacgccgaatacctatattcaattagggggagatatgccgagcggcaggttagcggcctaatgcactttgctcggaagctgcgctggcccggcctcgaacttcgtggtcaaaagatatttgcagacgcgataactctagatgaggcaacacctatcaacactgcagtgccaactacggatggccgccggtcgtcatactttggcggtgaccgagcgtctgatgagatgaagaggcaacctgtcagaagacgtaaaattgaagccgccttgcacccatcaggctggctttcgaaatcctatgtttcaggactgatactgccaggcgagacattgtctcacttcctcatgtccgccttaattgaaaacgacgagtctgcaatcgcaagacttggcccactcacaagcttgtgtggaggcttcgtctatagcaataagagtttttggagcgtggcttgtattgtcggtcgcgttttggccgcgggaaggggctcggctgagtgcatgggctggatatctaccgatgtgatccctcatagattcgatgaaggctgggtaaatatcagagtggaagatatccgtgacgatgtcacgaagattgggaagaaagcccgcatatggggaaagacttctgtcgaacgagagtcaaaagtactaggcgactccgacatagcagacgtgcttcccgccgacttcatcattccacatgaggctacatacaccaagagacccccatcaaatgtccgcatcgaaatgagatcgttgaatctctctgcaccacttggtaaacctcaatcacccaccttacagagccgtttctcgacattctccccttccagaaacaagaccaaagagattgagacctacccagcttctctttcattttctatgtgctatgatggcaatgatcacgagacagtatttgattttcagctatcgaatgatgtatactttgtgacggctcatccttgtgttgcttcgagttatgtcaagtacttgaaatcgccaacaagtcccactatacagcagattgatgttggtggtcgtgacttcgacggcaggcaatcgagtgctgcccatgtcacaggtcacccattacatcgtttctactcttacaccgccatccatctcgcacatctactgagccggtcatcgtcaacaacattcgaagaactattaaatgacactcccaatactcattcccgatcgactagtacatcatcaaaagcttccgcctcaaaccgcccgccccgagtactcgtcattgactgtatcactggtttcgctccacccgcgtctccagacttgccttcactctctcgcatgtcatccttgtcctcctcattcggtctggaacccacaaactctcctcctgtccaactgtcaacctctccaggtgctgaacgccgaccaaaatcggcacgctcaagctccaacacaatcgaacgaattgaccctccaagtgcaacgccagaggccaagatgcagcttccaactcggaggcgccaattcggttcggacctcgaaatcctcgtccgtgcgtactgcgctcagaggggatggaatgctatcatcagtcgtcgtaggaggggctgtctatcctgtgccattcgcgaggctggcgcgttaggatggagagttgttatccgcgtggattgataccactcaggcccgactgtcatgctcaaaagcctctccttaaagcgcccgtaacacacaacaatagatgactttaatgaatagaagtcgagttgggctcgccaggctcaagttctggcttgccgaggctttctcatacccgaggggacttgaatcttctgtaccgatcctgtagccttagaccacgttgagacggagcctacgaaaagaacaagtggaaacggatacaacggctggcgcaatagacacttacgaattaaaatttgtatatacaaaatttgaaaacagagcaccgctcatctgtacatagcccgatacccgactcaaattttcaaaataacgacaagacatcactctctcaacgcg

SEQ ID NO: 22800 - DNA, 1629 bp, Muscodor strobelii
  misc_feature: SGI cDNA ID NO. 567747
  misc_feature: Encodes the peptide sequence at SEQ ID NO 22801
atggctactacagagaccattctccaaggtgtctccgtctcggggaaagtcggcgctgaacacaagaagattctcacaccacaagcattggcatttctggcgctgctgaacagatcattcaatgcgcagcgcaagaagttattagagcgccgtgttttacggcaggctgagatcgatcgcggtaccttgccagacttcttgcccgagacccgccatattcgcgagaatgcgacatggaagggcgctcctcctgctcctggcctcgtcgatcgccgtgtcgagatcactggccctacggaccgcaaaatggttgtcaatgcgctcaactctgacgtatggacgtatatggccgactttgaagattctagcgccccgacatgggataacatgattaatggccaagtcaatttgtatgatgctgtgcgcaaacaggtagacttcaaacaggggcctaaggagtataagttgcgcaaagatcgcaaactcccgacattaattgtacgacctcgaggctggcacctggaggaaaagcatgtcactgttgatggcgaacccatgtccgcctctctcttcgatttcggtctgtacttcttccacaatgcattcgaatatcaacgccagggatatggaccttacttctacctgccaaagatggagtcgcatctcgaggcacgattgtggaacgacgccttcaacttagcgcaagactatattggcatgcctcgtggtaccattcgtggcactgtcctaatcgagaccatcctcgcagccttcgagatggacgagattatctatgagttgcgcgaccacagctctggcttaaactgcggtcgctgggattacatctttagcacaatcaagaagttccgcaacaactccagctttgtcctacctgatagaagcgccgtcaccatgacggtacctttcatggatgcatacgtcaagctccttattcagacttgtcataagcgtggtgttcatgctatgggcggtatggcggcccagattccaattaaggatgacaaagccgcgaatgacaaggcgatggagggtgtgcgggccgataagcttcgtgaggttcgtgctggtcatgacggaacatgggtcgcccatcctgctctcgcaattattgcaacagagatcttcaacaagcacatgccaacaccaaaccagctgttcgtgcgtcgcgaagacgtcaagatcggcgcccaggacctgctcaacatgaacgtccctggcaagatcacagaggaaggtattcggaagaacctgaatatcggccttggctacatggaggcttggatccgaggggtgggctgtgtgcccatcaactatttgatggaagatgcagctaccgccgaagtatctcggtctcagctctggcagtgggtgaagcatggtgtcacaaccgcagagggcaagaaggtcgacaaggcatacgccctgaagctactcaaggagtcgacggagcagcttgcttccaaggccccagcgggcaacaaatacgcgcttgctagtcagtacttcggtacccaggttactggtgaagactacgccgatttcttgacgagcctgctttatgatgagatcactgcctccggcccagcggtgggggccagcaagttgtag

SEQ ID NO: 22801 - protein, 542 aa, Muscodor strobelii
  misc_feature: SGI Peptide ID NO. 567747
  misc_feature (11)..(531): Pfam Id: PF01274 Pfam Desc: Malate synthase
  misc_feature (1)..(536): NCBI GI: 154277552 Blast Desc: HCAG_05084 [Ajellomyces capsulatus NAm1] gi|150413202|gb|EDN08585.1| HCAG_05084 [Ajellomyces capsulatus NAm1]
  misc_feature (1)..(536): NCBI GI: 240280386 Blast Desc: malate synthase AcuE [Ajellomyces capsulatus H143]
  misc_feature (2)..(542): NCBI GI: 46394835 Blast Desc: malate synthase [Phaeosphaeria nodorum]
  misc_feature (1)..(536): NCBI GI: 119173175 Blast Desc: CIMG_10106 [Coccidioides immitis RS] gi|240111768|gb|EER29913.1| Malate synthase, glyoxysomal, [Coccidioides posadasii C735 delta SOWgp]
  misc_feature (1)..(536): NCBI GI: 225561056 Blast Desc: malate synthase [Ajellomyces capsulatus G186AR]
  misc_feature (1)..(536): NCBI GI: 258570535 Blast Desc: malate synthase A [Uncinocarpus reesii 1704] gi|237904341|gb|EEP78742.1| malate synthase A [Uncinocarpus reesii 1704]
  misc_feature (1)..(537): NCBI GI: 238840599 Blast Desc: malate synthase [Microsporum canis CBS 113480]
  misc_feature (1)..(536): NCBI GI: 255946133 Blast Desc: Pc20g13550 [Penicillium chrysogenum Wisconsin 54-1255] gi|211588569|emb|CAP86684.1| Pc20g13550 [Penicillium chrysogenum Wisconsin 54-1255]
  misc_feature (2)..(542): NCBI GI: 169608928 Blast Desc: malate synthase [Phaeosphaeria nodorum SN15] gi|111063894|gb|EAT85014.1| malate synthase [Phaeosphaeria nodorum SN15]
  misc_feature (2)..(531): NCBI GI: 205364092 Blast Desc: malate synthase [Phaeosphaeria nodorum] gi|205364094|gb|ACI04511.1| malate synthase [Phaeosphaeria nodorum]
  misc_feature (1)..(542): SWISSPROT Homolog: EC 2.3.3.9 Malate synthase
MATTETILQGVSVSGKVGAEHKKILTPQALAFLALLNRSFNAQRKKLLERRVLRQAEIDRGTLPDFLPETRHIRENATWKGAPPAPGLVDRRVEITGPTDRKMVVNALNSDVWTYMADFEDSSAPTWDNMINGQVNLYDAVRKQVDFKQGPKEYKLRKDRKLPTLIVRPRGWHLEEKHVTVDGEPMSASLFDFGLYFFHNAFEYQRQGYGPYFYLPKMESHLEARLWNDAFNLAQDYIGMPRGTIRGTVLIETILAAFEMDEIIYELRDHSSGLNCGRWDYIFSTIKKFRNNSSFVLPDRSAVTMTVPFMDAYVKLLIQTCHKRGVHAMGGMAAQIPIKDDKAANDKAMEGVRADKLREVRAGHDGTWVAHPALAIIATEIFNKHMPTPNQLFVRREDVKIGAQDLLNMNVPGKITEEGIRKNLNIGLGYMEAWIRGVGCVPINYLMEDAATAEVSRSQLWQWVKHGVTTAEGKKVDKAYALKLLKESTEQLASKAPAGNKYALASQYFGTQVTGEDYADFLTSLLYDEITASGPAVGASKL

SEQ ID NO: 22802 - DNA, 2621 bp, Muscodor strobelii
  misc_feature: SGI EST ID NO. CUFF.53600.0
  misc_feature: Variant of the nucleotide sequence at SEQ ID NO 22800
aaggtcaattggtcttatctgttattataagatggtatgtccaaagagcaattgaattcgctgtcttgaaaatgtacgttcgaaacgaagcaaataatcacatacatcaccacgtcggaccacggtagaccgtcgtcatagcaagcgctactccacgttccagagagagacacccgaatttccccacactttcacaagcttccctcgcatgtcatcgccacgccgaccagtgaacgaccatccttctacccgagcttaaggctacgctcaagcgcgcttcaacgctgcttcacgactcaaacagagcaaaaagggcagccaacatccacctgcccgcctggtacagcttgccgacctcctgagccgatcgtgcagctccatgccctggtcattttcgtgattgggtgatacgtgcttcaaagtcaaagtgtttgaatcttaactgtaaaaggtggacaacgagattcaggcagttcgtgtaggttactatttagactgcttgctcccccaccagagacttctagtcaatttatttgaatttctttcccgagcatttgggttagattgtatgttttagaacctatccgtaaccccgtcacttatataccaagccttcaggaccccttgcaacatcctcggcaactcatccacaccaacatctgacttacacgcatcatagccgtccaattgcaattatctccaacaaccttacgtcaacgtcacatccttagtatactgtttactgtagagcgctgaactcgacatatcatccgcgcccttgcgtctgctacacttacaattaccgcttcacatacatcagatacacaaacaagatggctactacagagaccattctccaaggtgtctccgtctcggggaaagtcggcgctgaacacaagaagattctcacaccacaagcattggcatttctggcgctgctgaacagatcattcaatgcgcagcgcaagaagttattagagcgccgtgttttacggcaggctgagatcgatcgcggtaccttgccagacttcttgcccgagacccgccatattcgcgagaatgcgacatggaagggcgctcctcctgctcctggcctcgtcgatcgccgtgtcgagatcactggccctacggaccgcaaaatggttgtcaatgcgctcaactctgacgtatggacgtatatggccgactttgaagattctagcgccccgacatgggataacatgattaatggccaagtcaatttgtatgatgctgtgcgcaaacaggtagacttcaaacaggggcctaaggagtataagttgcgcaaagatcgcaaactcccgacattaattgtacgacctcgaggctggcacctggaggaaaagcatgtcactgttgatggcgaacccatgtccgcctctctcttcgatttcggtctgtacttcttccacaatgcattcgaatatcaacgccagggatatggaccttacttctacctgccaaagatggagtcgcatctcgaggcacgattgtggaacgacgccttcaacttagcgcaagactatattggcatgcctcgtggtaccattcgtggcactgtcctaatcgagaccatcctcgcagccttcgagatggacgagattatctatgagttgcgcgaccacagctctggcttaaactgcggtcgctgggattacatctttagcacaatcaagaagttccgcaacaactccagctttgtcctacctgatagaagcgccgtcaccatgacggtacctttcatggatgcatacgtcaagctccttattcagacttgtcataagcgtggtgttcatgctatgggcggtatggcggcccagattccaattaaggatgacaaagccgcgaatgacaaggcgatggagggtgtgcgggccgataagcttcgtgaggttcgtgctggtcatgacggaacatgggtcgcccatcctgctctcgcaattattgcaacagagatcttcaacaagcacatgccaacaccaaaccagctgttcgtgcgtcgcgaagacgtcaagatcggcgcccaggacctgctcaacatgaacgtccctggcaagatcacagaggaaggtattcggaagaacctgaatatcggccttggctacatggaggcttggatccgaggggtgggctgtgtgcccatcaactatttgatggaagatgcagctaccgccgaagtatctcggtctcagctctggcagtgggtgaagcatggtgtcacaaccgcagagggcaagaaggtcgacaaggcatacgccctgaagctactcaaggagtcgacggagcagcttgcttccaaggccccagcgggcaacaaatacgcgcttgctagtcagtacttcggtacccaggttactggtgaagactacgccgatttcttgacgagcctgctttatgatgagatcactgcctccggcccagcggtgggggccagcaagttgtaggtggcggagtgagcaaggaataggcgaattaggaatatttgaaacaacaaaggaaggagatgtgatcttggataaaagtgcattgtattacatagctaagcactaatttctaacgatttcgaatttttgaatgaaatgtaatgatctgactttctcgaa

SEQ ID NO: 22803 - DNA, 1518 bp, Muscodor strobelii
  misc_feature: SGI cDNA ID NO. 567748
  misc_feature: Encodes the peptide sequence at SEQ ID NO 22804
atggcacttcttgattcgaataccaagttgcctgtcatgtctgagactcatatgaacactgatatatctgtcattgataccaagtctagcaagaacttatctacaaatgaagccaacttcggtgctgatgagatacagaagacaatatcgaaatatattacgaaccctgagaaattagatcaggaagcccctgcaacggatgagacagacccttacgtcgtcagttgggacggtccagatgatcccatgaacccgtacaactggtcccagttaaggaaatgggttgttacactcctagtgtctctcggtggtctagtaacacttatgtcttcgacaacaatcgcgcccgcacttcccactatatcaagcgaccttcacgttgacgatacaacaacccagttgacactgtcaatcttcgttcttagctccgcaattggacctatgatactggcgcctatgagcgaagtctttggtaggaagccggtgtggctgctgtctggagcattctatgttgtatggactattgtctctggagttgcgaaatcaaacgctgtcctcatcgttggtcgatttttctcggggtttggagcgagtgctcaatatgcggccctgcaagtcggccctatactgggtggtgttctgacaggtacgatcggctggcaatggatattctacgttctcgctatcttcgacgccctactactaattttcgcattcttcttcttccctgagacatttgcaaagaagatcttggctcgcaaagctaagaagctgcgcaaagaaacgagcatgacctactacactgaagaagaaaaggatggcaagactcttccacaactcttggccgtctctttagcccgtccttgtcggttgctcctgacacatccccacattcagctaatgtctctgtttcttgcactcaagtacggcatcctatacatcgttcagtcgacatttgcggagctctggatcgaggtctatcaccaaagcgtgacgatctctggtcttcactacatcgcaattgcgctcggctcattactcgcagcccagatcggtgcaaggttcatggatcgtatttggaagcgtttgaaacaacgcgcaaagggcgagacacagccagaataccgtgtcccgctgcttgtaccaggtgcgttgctgatgccaattggtctcttctggtatggatggactgcgcaagcacaggagccctggattctccccgatattggtgttgcgatctatagttgcggcactatcatttcaacccaggccatgcaggcgtatgtcatggactcttatcccgaattcgtcgccagcgcaacggcggcaagccagctcttccgaaacatcactgcattcgccttcccattgttcggtccaagactgtacaagtcgctcggttatggctggggcaatagtgtactggcattcttgctgatcggtttcggctttccagcaccgctgattttatggaaacttggcgcgaagctgcggtccctaaaggccgagaatccttga

SEQ ID NO: 22804 - protein, 505 aa, Muscodor strobelii
  misc_feature: SGI Peptide ID NO. 567748
  misc_feature (100)..(456): Pfam Id: PF07690 Pfam Desc: Major Facilitator Superfamily
  misc_feature (96)..(497): Pfam Id: PF00083 Pfam Desc: Sugar (and other) transporter
  misc_feature (206)..(456): Pfam Id: PF07690 Pfam Desc: Major Facilitator Superfamily
  misc_feature (100)..(205): Pfam Id: PF07690 Pfam Desc: Major Facilitator Superfamily
  misc_feature (96)..(203): Pfam Id: PF00083 Pfam Desc: Sugar (and other) transporter
  misc_feature (55)..(504): NCBI GI: 225562434 Blast Desc: conserved [Ajellomyces capsulatus G186AR]
  misc_feature (54)..(499): NCBI GI: 225680941 Blast Desc: membrane transport protein [Paracoccidioides brasiliensis Pb03]
  misc_feature (57)..(498): NCBI GI: 70984531 Blast Desc: MFS multidrug transporter [Aspergillus fumigatus Af293] gi|66845399|gb|EAL85734.1| MFS multidrug transporter, [Aspergillus fumigatus Af293] gi|159122556|gb|EDP47677.1| MFS
  misc_feature (70)..(498): NCBI GI: 119467378 Blast Desc: MFS multidrug transporter, [Neosartorya fischeri NRRL 181] gi|119405647|gb|EAW15598.1| MFS multidrug transporter, [Neosartorya fischeri NRRL 181]
  misc_feature (74)..(500): NCBI GI: 116204075 Blast Desc: CHGG_09921 [Chaetomium globosum CBS 148.51] gi|88176049|gb|EAQ83517.1| CHGG_09921 [Chaetomium globosum CBS 148.51]
  misc_feature (12)..(500): NCBI GI: 145247084 Blast Desc: An12g07400 [Aspergillus niger] gi|134080519|emb|CAK46366.1| protein product [Aspergillus niger]
  misc_feature (44)..(500): NCBI GI: 238495919 Blast Desc: efflux pump antibiotic resistance protein, [Aspergillus flavus NRRL3357] gi|220694075|gb|EED50419.1| efflux pump antibiotic resistance protein, [Aspergillus flavus NRRL3357]
  misc_feature (38)..(501): NCBI GI: 169775433 Blast Desc: [Aspergillus oryzae RIB40] gi|83770047|dbj|BAE60182.1| protein product [Aspergillus oryzae]
  misc_feature (6)..(498): NCBI GI: 121703922 Blast Desc: MFS multidrug transporter, [Aspergillus clavatus NRRL 1] gi|119398369|gb|EAW08799.1| MFS multidrug transporter, [Aspergillus clavatus NRRL 1]
  misc_feature (12)..(498): NCBI GI: 255934024 Blast Desc: Pc12g14890 [Penicillium chrysogenum Wisconsin 54-1255] gi|211582912|emb|CAP81116.1| Pc12g14890 [Penicillium chrysogenum Wisconsin 54-1255]
MALLDSNTKLPVMSETHMNTDISVIDTKSSKNLSTNEANFGADEIQKTISKYITNPEKLDQEAPATDETDPYVVSWDGPDDPMNPYNWSQLRKWVVTLLVSLGGLVTLMSSTTIAPALPTISSDLHVDDTTTQLTLSIFVLSSAIGPMILAPMSEVFGRKPVWLLSGAFYVVWTIVSGVAKSNAVLIVGRFFSGFGASAQYAALQVGPILGGVLTGTIGWQWIFYVLAIFDALLLIFAFFFFPETFAKKILARKAKKLRKETSMTYYTEEEKDGKTLPQLLAVSLARPCRLLLTHPHIQLMSLFLALKYGILYIVQSTFAELWIEVYHQSVTISGLHYIAIALGSLLAAQIGARFMDRIWKRLKQRAKGETQPEYRVPLLVPGALLMPIGLFWYGWTAQAQEPWILPDIGVAIYSCGTIISTQAMQAYVMDSYPEFVASATAASQLFRNITAFAFPLFGPRLYKSLGYGWGNSVLAFLLIGFGFPAPLILWKLGAKLRSLKAENP

SEQ ID NO: 22805 - DNA, 1551 bp, Muscodor strobelii
  misc_feature: SGI cDNA ID NO. 567749
  misc_feature: Encodes the peptide sequence at SEQ ID NO 22806
atgtcgttctctaaaatcaactggaactatgtctttacaatcatcgtgatagcctgcggttctatcccaaaaggctatgatgaaggaggattcagctcagcaaccggtctcccatcattcaagtcagacttcggcctaaacgcatcagattggggcgatgacacagtcggactcgcaaacagaaaagcaaacatatcctcattcggcattctcggagccgcaataggctcaatcctcgtagccgcgacatgcgatcgactgggtcgattgcgaacatggcagttatcgatggtatggtggatgacgggcaatttactccagactttctcttctggcatactcagtctgatgctcttcgctcgtatctggggcgggataggagcaggtggtttgacagtcgtcacgccgctgtacttatctgagattgcgcccgcgaggtcgagaggtgccgtgactagtatttacatagtggtcttgctcacgttcctctcgattgggttcttcatcagctatggggctggtgaaggattacccgatacaagactgcagtatcgacttgttgttgctattgtactagttccgacaggcattgcgctactgctttccttcttcttgaatgatacgccgaagtggcttgcggctgaagatcgggtggaagatgctgtgtcggtgctgtcaaagcttaggggcgggaatgatggcgatgaggtcgcgctggagatccaggaactgcagcagagtatgagggagaagcaaaaatcacttgatggggtcactagctggcagatcattaaggagattgctacgattcgaacttatcgggttcgactcttgttcggaatcgcggtccagacattcgcgcaatggtcaggtggaaacgggatcacgtactacatcccaacaattttcgaatacgcgggagtaaagggctccgatacatctctcataacgagtggcgcatatggcaccgttaagctcgtcttcgtcatgatcttcacctgggtgctggtcgataacgtgggtcgtcggaagtgttcgttgggaggcctgttcctgcaatttatcgcacatgtctacctggccatttacatggcactgttcatgagcggaacgaataagcgtgcttcagatgcagctattgctgctgttttcgtgtatgctgtcggttggtctgttgggctctgtacgataccattcgtgtacagcacagaaatatacccgactcggatccgcggagtatgcgtatgtatcaacatggtcctgcactgggtatttcaattcgctgtcgttcgtgttacgcccaacttgtttgcggcactggacatttggggcgcctacgtgttctacgcttcgatctgttttgttgggctgatcgtgcttggtctgtgggctccggagacaaaaggcgttcacatggatcagattgaagatttgtttgaaggcccttggtacacgacttggaaggcgaagcctcgacgagagtctctagagcgcatgattgacccgcttgagaagatcgggtcgattgaagagagacctgagcgtgtttag

SEQ ID NO: 22806 - protein, 516 aa, Muscodor strobelii
  misc_feature: SGI Peptide ID NO. 567749
  misc_feature (10)..(430): Pfam Id: PF07690 Pfam Desc: Major Facilitator Superfamily
  misc_feature (13)..(479): Pfam Id: PF00083 Pfam Desc: Sugar (and other) transporter
  misc_feature (65)..(430): Pfam Id: PF07690 Pfam Desc: Major Facilitator Superfamily
  misc_feature (1)..(492): NCBI GI: 145230411 Blast Desc: An01g10970 [Aspergillus niger] gi|134055631|emb|CAK37277.1| protein product [Aspergillus niger]
  misc_feature (5)..(514): NCBI GI: 169767182 Blast Desc: [Aspergillus oryzae RIB40] gi|238484017|ref|XP_002373247.1| MFS quinate transporter, [Aspergillus flavus NRRL3357] gi|83765917|dbj|BAE56060.1| protein
  misc_feature (7)..(491): NCBI GI: 255941708 Blast Desc: Pc16g13240 [Penicillium chrysogenum Wisconsin 54-1255] gi|211586246|emb|CAP93994.1| Pc16g13240 [Penicillium chrysogenum Wisconsin 54-1255]
  misc_feature (10)..(492): NCBI GI: 119494487 Blast Desc: MFS quinate transporter, [Neosartorya fischeri NRRL 181] gi|119412301|gb|EAW22242.1| MFS quinate transporter, [Neosartorya fischeri NRRL 181]
  misc_feature (10)..(492): NCBI GI: 121700779 Blast Desc: MFS quinate transporter, [Aspergillus clavatus NRRL 1] gi|119396797|gb|EAW07228.1| MFS quinate transporter, [Aspergillus clavatus NRRL 1]
  misc_feature (10)..(489): NCBI GI: 115397533 Blast Desc: conserved [Aspergillus terreus NIH2624] gi|114192549|gb|EAU34249.1| conserved [Aspergillus terreus NIH2624]
  misc_feature (10)..(498): NCBI GI: 67517330 Blast Desc: AN0938.2 [Aspergillus nidulans FGSC A4] gi|40746811|gb|EAA65967.1| AN0938.2 [Aspergillus nidulans FGSC A4] gi|259488774|tpe|CBF88489.1| TPA: MFS quinate transporter,
  misc_feature (10)..(492): NCBI GI: 70996468 Blast Desc: MFS quinate transporter [Aspergillus fumigatus Af293] gi|66850624|gb|EAL90951.1| MFS quinate transporter, [Aspergillus fumigatus Af293]
  misc_feature (10)..(492): NCBI GI: 159131723 Blast Desc: MFS quinate transporter, [Aspergillus fumigatus A1163]
  misc_feature (7)..(516): NCBI GI: 169769344 Blast Desc: [Aspergillus oryzae RIB40] gi|83767000|dbj|BAE57140.1| protein product [Aspergillus oryzae]
MSFSKINWNYVFTIIVIACGSIPKGYDEGGFSSATGLPSFKSDFGLNASDWGDDTVGLANRKANISSFGILGAAIGSILVAATCDRLGRLRTWQLSMVWWMTGNLLQTFSSGILSLMLFARIWGGIGAGGLTVVTPLYLSEIAPARSRGAVTSIYIVVLLTFLSIGFFISYGAGEGLPDTRLQYRLVVAIVLVPTGIALLLSFFLNDTPKWLAAEDRVEDAVSVLSKLRGGNDGDEVALEIQELQQSMREKQKSLDGVTSWQIIKEIATIRTYRVRLLFGIAVQTFAQWSGGNGITYYIPTIFEYAGVKGSDTSLITSGAYGTVKLVFVMIFTWVLVDNVGRRKCSLGGLFLQFIAHVYLAIYMALFMSGTNKRASDAAIAAVFVYAVGWSVGLCTIPFVYSTEIYPTRIRGVCVCINMVLHWVFQFAVVRVTPNLFAALDIWGAYVFYASICFVGLIVLGLWAPETKGVHMDQIEDLFEGPWYTTWKAKPRRESLERMIDPLEKIGSIEERPERV

SEQ ID NO: 22807 - DNA, 2099 bp, Muscodor strobelii
  misc_feature: SGI EST ID NO. CUFF.53624.0
  misc_feature: Variant of the nucleotide sequence at SEQ ID NO 22805
ctgcggttctatcccaaaaggctatgatgaaggaggattcagctcagcaaccggtctcccatcattcaagtcagacttcggcctaaacgcatcagattggggcgatgacacagtcggactcgcaaacagaaaagcaaacatatcctcattcggcattctcggagccgcaataggctcaatcctcgtagccgcgacatgcgatcgactgggtcgattgcgaacatggcagttatcgatggtatggtggatgacgggcaatttactccagactttctcttctggcatactcagtctgatgctcttcgctcgtatctggggcgggataggagcaggtggtttgacagtcgtcacgccgctgtacttatctgagattgcgcccgcgaggtcgagaggtgccgtgactagtatttacatagtggtcttgctcacgttcctctcgattgggttcttcatcagctatggggctggtgaaggattacccgatacaagactgcagtatcgacttgttgttgctattgtactagttccgacaggcattgcgctactgctttccttcttcttgaatgatacgccgaagtggcttgcggctgaagatcgggtggaagatgctgtgtcggtgctgtcaaagcttaggggcgggaatgatggcgatgaggtcgcgctggagatccaggaactgcagcagagtatgagggagaagcaaaaatcacttgatggggtcactagctggcagatcattaaggagattgctacgattcgaacttatcgggttcgactcttgttcggaagttagttctatcccccctttcgtaaatggcttattaacaataggtgctcagtcgcggtccagacattcgcgcaatggtcaggtggaaacgggatcacgtactacatcccaacaattttcgaatacgcgggagtaaagggctccgatacatctctcataacgagtggcgcatatggcaccgttaagctcgtcttcgtcatgatcttcacctgggtgctggtcgataacgtgggtcgtcggaagtgttcgttgggaggcctgttcctgcaatttatcgcacatgtctacctggccatttacatggcactgttcatgagcggaacgaataagcgtgcttcagatgcagctattgctgctgttttcgtgtatgctgtcggttggtctgttgggctctgtacgataccattcgtgtacagcacagaaatatacccgactcggatccgcggagtatgcgtatgtatcaacatggtcctgcactgggtatttcaattcgctgtcgttcgtgttacgcccaacttgtttgcggcactggacatttggggcgcctacgtgttctacgcttcgatctgttttgttgggctgatcgtgcttggtctgtgggctccggagacaaaaggcgttcacatggatcagattgaagatttgtttgaaggcccttggtacacgacttggaaggcgaagcctcgacgagagtctctagagcgcatgattgacccgcttgagaagatcgggtcgattgaagagagacctgagcgtgtttaggtacataaattgtccattgcaaacctcttctatcgagtgttggggtcaaatgacagctagtcaaggtaaattgctttttctaccgtatttaatgttgaagtcgagtgtcttattggctcgcctaagacaagagacatcgtatttgcacgttgcgccaatttccacatctccttgtgcttctcggcttgctatcgtcgcttgtgtcggaccgaagccgaagtccatgccgagagcatcacatctatgcattcgttccagctcgttctcgtcgctgtttaaacaaccctccttcgtagaactccaaggtcgcgcaagttaaaatttcatcacatcgtacgatatatacactgatgtggtccacgactcatcaatggcatgcccgacagcattgcacaagtatacaaatcgaaccgagagcgccttttaacgtatgctggaaatggcttatacaggtcgtattggagatggtcgtgtatacttggattggaggtagctaaggcgatatgtataacgcgatgatttaaagctgtaaaagaatttagtgtcgaca

SEQ ID NO: 22808 - DNA, 1011 bp, Muscodor strobelii
  misc_feature: SGI cDNA ID NO. 567750
  misc_feature: Encodes the peptide sequence at SEQ ID NO 22809
atgtcaagaatcttcaagtttccgacgcgatatctcaagttcaaattcatcaacccaaagtcctcacttaatcctacaccattacacagcccagcggccgcggcccgtaacttcaccatgaccactaacccccaaacacccctcagcggtcccaagatcccgccaaactcatgggactcacacatgcacatcctcgaatcccgcttccccctatccgcacacgcactctacaagccagcagagcacaccctatccgacgcaatgagcttcgaggaatcagtcggtctatcaaacatcgtgctcgtccagccctcaatctacggaaacgacaactcctgcatcttcgaagctctcaaaactctcggtgtcgatagagctaggggtgttgtgacgtttgacccctctacgacgacgctggatgagttgaggacatggcatgagctgggtgtgagaggagtgaggattaatttgaagagtgtggggaaagtcatggacgaggctgaacttcgggagacactgcagacgtatgcggatgctgtacgacccctggactgggtcgtacaggtttacttgcctatgcagatggtgccactcctggagccgattgtgccaggtcttggagtgaaagtctgtgttgatcatatggggcatccgccacttgctgagcttgaggggtacaagtccacgcaggatcccgatacaataccaggctttgatgccttagtcaggttattgaaggatggggagacgtatgttaaggtctctgcgccgtatcggatgagtagtgttgaggatggggttagcgatgtggtgccgattgcgaggaagttggtccgggaggctcctgatagagttgtttttgctaccgattggccgcatactagatttgatgggacggatatcagtccttgggttgaggagtgtgtgaacatttgtgatggggacgcgaagttggttgagaagctgtttagggataatgcggaggttttgtgggatgttaagagggcgtag

SEQ ID NO: 22809 - protein, 336 aa, Muscodor strobelii
  misc_feature: SGI Peptide ID NO. 567750
  misc_feature (58)..(333): Pfam Id: PF04909 Pfam Desc: Amidohydrolase
  misc_feature (53)..(336): NCBI GI: 46107862 Blast Desc: FG00814.1 [Gibberella zeae PH-1]
  misc_feature (38)..(334): NCBI GI: 238484015 Blast Desc: TIM barrel metal-dependent hydrolase, [Aspergillus flavus NRRL3357] gi|220701296|gb|EED57634.1| TIM barrel metal-dependent hydrolase, [Aspergillus flavus NRRL3357]
  misc_feature (38)..(334): NCBI GI: 169767180 Blast Desc: [Aspergillus oryzae RIB40] gi|83765916|dbj|BAE56059.1| protein product [Aspergillus oryzae]
  misc_feature (52)..(328): NCBI GI: 145230409 Blast Desc: An01g10960 [Aspergillus niger] gi|134055630|emb|CAK37276.1| protein product [Aspergillus niger]
  misc_feature (42)..(336): NCBI GI: 256735523 Blast Desc: NECHADRAFT_90432 [Nectria haematococca mpVI 77-13-4]
  misc_feature (52)..(332): NCBI GI: 115397531 Blast Desc: conserved [Aspergillus terreus NIH2624] gi|114192548|gb|EAU34248.1| conserved [Aspergillus terreus NIH2624]
  misc_feature (33)..(334): NCBI GI: 121700777 Blast Desc: TIM barrel metal-dependent hydrolase, [Aspergillus clavatus NRRL 1] gi|119396796|gb|EAW07227.1| TIM barrel metal-dependent hydrolase, [Aspergillus clavatus NRRL 1]
  misc_feature (52)..(333): NCBI GI: 255941710 Blast Desc: Pc16g13250 [Penicillium chrysogenum Wisconsin 54-1255] gi|211586247|emb|CAP93995.1| Pc16g13250 [Penicillium chrysogenum Wisconsin 54-1255]
  misc_feature (62)..(333): NCBI GI: 119494485 Blast Desc: TIM barrel metal-dependent hydrolase, [Neosartorya fischeri NRRL 181] gi|119412300|gb|EAW22241.1| TIM barrel metal-dependent hydrolase, [Neosartorya fischeri NRRL 181]
  misc_feature (53)..(334): NCBI GI: 258578337 Blast Desc: [Uncinocarpus reesii 1704] gi|237903616|gb|EEP78017.1| [Uncinocarpus reesii 1704]
MSRIFKFPTRYLKFKFINPKSSLNPTPLHSPAAAARNFTMTTNPQTPLSGPKIPPNSWDSHMHILESRFPLSAHALYKPAEHTLSDAMSFEESVGLSNIVLVQPSIYGNDNSCIFEALKTLGVDRARGVVTFDPSTTTLDELRTWHELGVRGVRINLKSVGKVMDEAELRETLQTYADAVRPLDWVVQVYLPMQMVPLLEPIVPGLGVKVCVDHMGHPPLAELEGYKSTQDPDTIPGFDALVRLLKDGETYVKVSAPYRMSSVEDGVSDVVPIARKLVREAPDRVVFATDWPHTRFDGTDISPWVEECVNICDGDAKLVEKLFRDNAEVLWDVKRA

SEQ ID NO: 22810 - DNA, 1272 bp, Muscodor strobelii
  misc_feature: SGI EST ID NO. CUFF.53620.0
  misc_feature: Variant of the nucleotide sequence at SEQ ID NO 22808
cgctatcgcatacaatccaagatcgaaataatgtcaagaatcttcaagtttccgacgcgatatctcaagttcaaattcatcaacccaaagtcctcacttaatcctacaccattacacagcccagcggccgcggcccgtaacttcaccatgaccactaacccccaaacacccctcagcggtcccaagatcccgccaaactcatgggactcacacatgcacatcctcgaatcccgcttccccctatccgcacacgcactctacaagccagcagagcacaccctatccgacgcaatgagcttcgaggaatcagtcggtctatcaaacatcgtgctcgtccagccctcaatctacggaaacgacaactcctgcatcttcgaagctctcaaaactctcggtgtcgatagagctaggggtgttgtgacgtttgacccctctacgacgacgctggatgagttgaggacatggcatgagctgggtgtgagaggagtgaggattaatttgaagagtgtggggaaagtcatggacgaggctgaacttcgggagacactgcagacgtatgcggatgctgtacgacccctggactgggtcgtacaggtttacttgcctatgcagatggtgccactcctggagccgattgtgccaggtcttggagtgaaagtctgtgttgatcatatggggcatccgccacttgctgagcttgaggggtacaagtccacgcaggatcccgatacaataccaggctttgatgccttagtcaggttattgaaggatggggagacgtatgttaaggtctctgcgccgtatcggatgagtagtgttgaggatggggttagcgatgtggtgccgattgcgaggaagttggtccgggaggctcctgatagagttgtttttgctaccgattggccgcatactagatttgatgggacggatatcagtccttgggttgaggagtgtgtgaacatttgtgatggggacgcgaagttggttgagaagctgtttagggataatgcggaggttttgtgggatgttaagagggcgtagagagtctcgtaagatgtcttattgacagtatgtgctcagtcgctgtccaaacgatcgagcagctgctggcatatacgcctttggtccgactcacagacacaagtcgcgtgagccaaacaagtgacttggatgtaaagagattccttagcgtaaggtgttcggcagctttgagcctaaagaatatacaaaataggaacagacagtgttatctcaccacagggccttgctgat

SEQ ID NO: 22811 - DNA, 399 bp, Muscodor strobelii
  misc_feature: SGI cDNA ID NO. 567751
  misc_feature: Encodes the peptide sequence at SEQ ID NO 22812
atgcgcttcatcaccgccaacgtcctcgcccttgctagcaaactcgtggaggcccaaagctgctaccccgggggcctgagaggaagctatgccgatatcgaacgagcagctgatgtcgcctgcattacctggctcaccggccgttacaaaacaggcgagttcagggaaacttgtgtcaacggcgaaggcgccctcttcgacttcaattggcatatttggctgcatttcgagggtaaagatcgcgacggcaacgacgtcgaagtcgaattttaccatgacgactgcaagtatgatgtgatgcacacgtggtacaactgcggtgatatgtacggtggcacgtcaatttacgacgacttctatatcacggtcgaccctaacataggtttatgccctacctag

SEQ ID NO: 22812 - protein, 132 aa, Muscodor strobelii
  misc_feature: SGI Peptide ID NO. 567751
MRFITANVLALASKLVEAQSCYPGGLRGSYADIERAADVACITWLTGRYKTGEFRETCVNGEGALFDFNWHIWLHFEGKDRDGNDVEVEFYHDDCKYDVMHTWYNCGDMYGGTSIYDDFYITVDPNIGLCPT

SEQ ID NO: 22813 - DNA, 876 bp, Muscodor strobelii
  misc_feature: SGI cDNA ID NO. 567752
  misc_feature: Encodes the peptide sequence at SEQ ID NO 22814
atgacgaagctcacaaactacatcgcctacataaacccagcaacagggacctcagaaatcggacacctggacctagaaacagaaactattcagcccctaacattcacctcaggcgtaccagcaaagaatctctaccagataatcgaagccggctcagcaaacttaatcccctcactcgacccgcccatccctctttctaacacaaagatcctgccgcccataagcggccgcgatgtacttgccgtggggaaaaactacatggagcacgcgaaggaattcaataggtcgggattcgacagttcggataaaacggatcggccttctcacccggtgatttttacgaagagggctacgagtattattgcgtgtggggaggagatcttgcttcatgaggggtttacgaggagtgcggattatgagggggagattggtgttattgttggaaaaccggggtttagggttagggaggaagaggcgtgggattgtgtttgggggttcacgattgtcaatgatgttacggcgagagagaggcagagagatcataaacagttttttctggggaagagtgcggattcttattgtcctatgggcccgattgctgtcccgaaggaggatttgccgaaggttttgagagtgcggacgtgggttaatggggagttgagacaggattctacgtctgaggaactgatcttttcgattcctgaactcatttctgtcatatctgctggccagacgttgcagcctggtgatgtactggctactgggacgccggctggtgtgggtattgggaagaatccgccagtggtttcgaagcctggggatgagatctcgatttctgttactggccttgggattttgacgaacagagtggcttaa

SEQ ID NO: 22814 - protein, 291 aa, Muscodor strobelii
  misc_feature: SGI Peptide ID NO. 567752
  misc_feature (102)..(265): Pfam Id: PF01557 Pfam Desc: Fumarylacetoacetate (FAA) hydrolase family
  misc_feature (107)..(265): Pfam Id: PF01557 Pfam Desc: Fumarylacetoacetate (FAA) hydrolase family
  misc_feature (1)..(291): NCBI GI: 256728624 Blast Desc: NECHADRAFT_50720 [Nectria haematococca mpVI 77-13-4]
  misc_feature (4)..(290): NCBI GI: 154322947 Blast Desc: BC1G_00816 [Botryotinia fuckeliana B05.10] gi|150848150|gb|EDN23343.1| BC1G_00816 [Botryotinia fuckeliana B05.10]
  misc_feature (6)..(291): NCBI GI: 67524639 Blast Desc: AN2777.2 [Aspergillus nidulans FGSC A4] gi|40744029|gb|EAA63211.1| AN2777.2 [Aspergillus nidulans FGSC A4] gi|259486303|tpe|CBF84034.1| TPA: conserved [Aspergillus FGSC
  misc_feature (6)..(291): NCBI GI: 212534934 Blast Desc: fumarylacetoacetate hydrolase, [Penicillium marneffei ATCC 18224] gi|210070022|gb|EEA24112.1| fumarylacetoacetate hydrolase, [Penicillium marneffei ATCC 18224]
  misc_feature (1)..(291): NCBI GI: 238500832 Blast Desc: fumarylacetoacetate hydrolase, [Aspergillus flavus NRRL3357] gi|220691887|gb|EED48234.1| fumarylacetoacetate hydrolase, [Aspergillus flavus NRRL3357]
  misc_feature (1)..(291): NCBI GI: 169782455 Blast Desc: [Aspergillus oryzae RIB40] gi|83774433|dbj|BAE64557.1| protein product [Aspergillus oryzae]
  misc_feature (4)..(291): NCBI GI: 169597843 Blast Desc: SNOG_01713 [Phaeosphaeria nodorum SN15] gi|160707601|gb|EAT91362.2| SNOG_01713 [Phaeosphaeria nodorum SN15]
  misc_feature (6)..(291): NCBI GI: 238494840 Blast Desc: fumarylacetoacetate hydrolase, [Aspergillus flavus NRRL3357] gi|220695306|gb|EED51649.1| fumarylacetoacetate hydrolase, [Aspergillus flavus NRRL3357]
  misc_feature (6)..(291): NCBI GI: 242791535 Blast Desc: fumarylacetoacetate hydrolase, [Talaromyces stipitatus ATCC 10500] gi|218718365|gb|EED17785.1| fumarylacetoacetate hydrolase, [Talaromyces stipitatus ATCC 10500]
  misc_feature (6)..(291): NCBI GI: 169777655 Blast Desc: [Aspergillus oryzae RIB40] gi|83772030|dbj|BAE62160.1| protein product [Aspergillus oryzae]
  misc_feature (73)..(290): SWISSPROT Homolog: EC 5.3.3.10 5-carboxymethyl-2-hydroxymuconate Delta-isomerase
  misc_feature (73)..(290): SWISSPROT Homolog: EC 4.1.1.68 5-oxopent-3-ene-1,2,5-tricarboxylate decarboxylase
MTKLTNYIAYINPATGTSEIGHLDLETETIQPLTFTSGVPAKNLYQIIEAGSANLIPSLDPPIPLSNTKILPPISGRDVLAVGKNYMEHAKEFNRSGFDSSDKTDRPSHPVIFTKRATSIIACGEEILLHEGFTRSADYEGEIGVIVGKPGFRVREEEAWDCVWGFTIVNDVTARERQRDHKQFFLGKSADSYCPMGPIAVPKEDLPKVLRVRTWVNGELRQDSTSEELIFSIPELISVISAGQTLQPGDVLATGTPAGVGIGKNPPVVSKPGDEISISVTGLGILTNRVA

SEQ ID NO: 22815 - DNA, 1984 bp, Muscodor strobelii
  misc_feature: SGI EST ID NO. CUFF.53642.0
  misc_feature: Variant of the nucleotide sequence at SEQ ID NO 22813
tggagaagagggggccgccgacccggtcccgctccccggaggtacagcccattgcgcgatacacatcttcgatcttcatcgacgttgcccctcataggtatatcttatactagtctaaagcttcgtaaatgagaagatcctcaaatttgagatttagaaagcacgattaaaccatgacgaagctcacaaactacatcgcctacataaacccagcaacagggacctcagaaatcggacacctggacctagaaacagaaactattcagcccctaacattcacctcaggcgtaccagcaaagaatctctaccagataatcgaagccggctcagcaaacttaatcccctcactcgacccgcccatccctctttctaacacaaagatcctgccgcccataagcggccgcgatgtacttgccgtggggaaaaactacatggagcacgcgaaggaattcaataggtcgggattcgacagttcggataaaacggatcggccttctcacccggtgatttttacgaagagggctacgagtattattgcgtgtggggaggagatcttgcttcatgaggggtttacgaggagtgcggattatgagggggagattggtgttattgttggaaaaccggggtttagggttagggaggaagaggcgtgggattgtgtttgggggttcacgattgtcaatgatgttacggcgagagagaggcagagagatcataaacagttttttctggggaagagtgcggattcttattgtcctatgggcccgattgctgtcccgaaggaggatttgccgaaggttttgagagtgcggacgtgggttaatggggagttgagacaggattctacgtctgaggaactgatcttttcgattcctgaactcatttctgtcatatctgctggccagacgttgcagcctggtgatgtactggctactgggacgccggctggtgtgggtattgggaagaatccgccagtggtttcgaagcctggggatgagatctcgatttctgttactggccttgggattttgacgaacagagtggcttaagcgggggcggataatcctacagtggctcgtatcagtgaagctactgcttttgaacttacgaattcacgcggaatgactggcattcgtacgggtctgaagataattgacggcaagccagtgtccattgagaagataggagagggaagcgataacattgttctttgtccatggcttagggatgtcgaaggaatattggagaccgctcatttccgctcttgatttccctagcagtatttgtcttcgtctatacgatttcgaaggacacggcttgactcctacgcgtcctttgaatccgatcaccatctcatcgctgtctgctgaccttggcactatcgcaaacgatgctgggatctcacagtcatgtcaggtgactatatgcgcacacaatatcggggctattcggcggcaatgaagttcgcaatagataatcctgcggtgctcaagaagcttgttctgctcagtccggttgcaccggctttcaattcaggtggaggcaatagagatatccgctctcaacttgcggcgaaacggtcgaatattagagttcaaggtgtgcaagccgtggtggatcacgttgtgtttggattaatatgggcatgggagtaccccggcgcttgtttctgctacagggctccattgcattgagactgggaaggactagttatattgatatcatagcggaatagacgaacatcttcaagagatccgcgtcaacggcagcatcaatcaataatccatcagagcggccatccagcggcagacgatcccggggccgcgtccagcaggctgttgccgtcgccgtcgcccgtcacaaccgggccgtggagatcatgcaggggccacagcggcggctgcccgccccagcccagatgcgaccaggacccggtgtctaggcctcaaccgccagacggccctcgctcccggcgttcttccac

SEQ ID NO: 22816 - DNA, 2067 bp, Muscodor strobelii
  misc_feature: SGI cDNA ID NO. 567753
  misc_feature: Reduced expression when VOC is produced
  misc_feature: Encodes the peptide sequence at SEQ ID NO 22817
atggcgtccgtaacgtccttggacaaggacttgcgtaagatgcgccttgacaagtacacgcccgccgctgccaatgaggtgaagtcatggatagaaggtgttctcggcgcccgattaccatctagtgacctgctggaaggtctcaaggatggtgttgcgctctgcaaactcatcaacctagctgtcggtcctccgggcgtcaaattcaagcaatccgccatgcctttcgtccagatggagaacatctcacacttccttcgcgcatgccagtcaccaccactgaacctgccagatcacgatatgttcctcaccgtcgacctctacgagcagaaagaccccgctcaagtgctgcaatgccttggcgccttttcgcgcgccgccaacgccgccaacccatctgcctttccatctgctatcggatccaaagcccgcggcagcgcattgagccctcaaggcactggaccggtcacgcctaggacccgtggcatgtccaatgtcagcgccacatcccccacgtatggctcccgccccggaatgctaccctcgaggaccggagattcgggatcaggtcggtggagcccaaccaagagcccgactagtgatagagtcggatccccgtctgtctcgagctggagcaaaaaggaccacgagggtgttacgagccccgcatggaatattgcccagtatggctacatgggaggcgcaagtcagggcaacttgggtattgcattcggagggcgcagacaaattacaactgcgggccctcatgtacccaatttggcagagaaggagcgcaagcgtaaggagcaggaagcagaggcagagcgtcaaaggctgcaaatgcaagaggaacaacgtattcgcaaggctgaggccgaagccgaggagaggcgcgcacaaatcgaggaagaaagaagatgggaagaggagacaaggcggcaacgcgccgaagaaaagcgtaaggcggaagacgaaaagcgcaaatgggaagaagaagaacgccaatggcgattgaccgaagagaagcggcgcaaagaagaagaagaggccgaggcgaaattggcgaacgagcgacaacggtcccgtagcaaaaacgatgatcgcttgcggggccagttccttagtcagtaccaggctgagcagagtatgaaatcgcaaaagacgggcgaagttgactacagcgacagagtcaaacaactggagaaagagttggaacaagcacgtcttagagagcaagaatatgaggaagaaaggcagaagcgctctcacagacgcgaagcttccaagagccgtactcgatcacgtagtcgacacaacacaaagcaggaaagacctcccagtcgacaggattcttggtcccgtaatgagagagagtatttgcgaacacaatgggatcagcatcaaagtcaggagcaagaagagactgctccccctccaccgccacgtccattgcctgagcccacagccgctccgatcaaaccgcatcgaacaggcgaacgccctggtgacgcagaatacgcaccagcccctctgaaggcccaacgaaccggcgaggctagacccctccccgttccggaccgggttaagagccacgtctccggcgggtttaattccagtccttcatcacgacccctaccagtaccacaagctacgaaccgaacggatcgcttcctcgcctctaacccagcacctccgcagcaggcttcacgccaaacctactcccgtgaagtcgatgccaatgcagagcgtgatgaggaagacagacgtcgcgtccagtcacaggctaagaccaaagctggtggttgggccggcaagtcgctacttgagcgcgagatggagatggagaggcagcgacagcgcgaatgggaagaagcacagaaggaaactgcccaagcagttcgctcaaacgaaggcgtcgacggcattggaggcggaattgatggtagatgggacgtcagtcaatggagtggctataccggcggcgatagccagaataaggggtcttccggcattggcgcaggacggagacagattgttggtcctagacccttaccaaatcgaccttaa

SEQ ID NO: 22817 - protein, 688 aa, Muscodor strobelii
  misc_feature: SGI Peptide ID NO. 567753
  misc_feature (22)..(128): Pfam Id: PF00307 Pfam Desc: Calponin homology (CH) domain
  misc_feature (1)..(685): NCBI GI: 261358134 Blast Desc: calponin [Verticillium albo-atrum VaMs.102]
  misc_feature (1)..(685): NCBI GI: 145611682 Blast Desc: MGG_11635 [Magnaporthe grisea 70-15] gi|145018932|gb|EDK03211.1| MGG_11635 [Magnaporthe grisea 70-15]
  misc_feature (1)..(688): NCBI GI: 46125311 Blast Desc: FG07033.1 [Gibberella zeae PH-1]
  misc_feature (1)..(685): NCBI GI: 256733180 Blast Desc: NECHADRAFT_104157 [Nectria haematococca mpVI 77-13-4]
  misc_feature (1)..(685): NCBI GI: 171686348 Blast Desc: protein product [Podospora anserina] gi|170943135|emb|CAP68788.1| protein product [Podospora anserina]
  misc_feature (1)..(680): NCBI GI: 156054068 Blast Desc: SS1G_05882 [Sclerotinia sclerotiorum 1980] gi|154703662|gb|EDO03401.1| SS1G_05882 [Sclerotinia sclerotiorum 1980]
  misc_feature (1)..(683): NCBI GI: 154321581 Blast Desc: BC1G_01665 [Botryotinia fuckeliana B05.10] gi|150852203|gb|EDN27395.1| BC1G_01665 [Botryotinia fuckeliana B05.10]
  misc_feature (1)..(684): NCBI GI: 189191372 Blast Desc: calponin [Pyrenophora tritici-repentis Pt-1C-BFP] gi|187973631|gb|EDU41130.1| calponin [Pyrenophora tritici-repentis Pt-1C-BFP]
  misc_feature (1)..(685): NCBI GI: 242791836 Blast Desc: calponin homology domain protein [Talaromyces stipitatus ATCC 10500] gi|218718423|gb|EED17843.1| calponin homology domain protein [Talaromyces stipitatus ATCC 10500]
  misc_feature (1)..(688): NCBI GI: 85086765 Blast Desc: NCU00277 [Neurospora crassa OR74A] gi|28918843|gb|EAA28512.1| [Neurospora crassa OR74A]
  misc_feature: Useful for introducing or modulating the production of volatile compounds
MASVTSLDKDLRKMRLDKYTPAAANEVKSWIEGVLGARLPSSDLLEGLKDGVALCKLINLAVGPPGVKFKQSAMPFVQMENISHFLRACQSPPLNLPDHDMFLTVDLYEQKDPAQVLQCLGAFSRAANAANPSAFPSAIGSKARGSALSPQGTGPVTPRTRGMSNVSATSPTYGSRPGMLPSRTGDSGSGRWSPTKSPTSDRVGSPSVSSWSKKDHEGVTSPAWNIAQYGYMGGASQGNLGIAFGGRRQITTAGPHVPNLAEKERKRKEQEAEAERQRLQMQEEQRIRKAEAEAEERRAQIEEERRWEEETRRQRAEEKRKAEDEKRKWEEEERQWRLTEEKRRKEEEEAEAKLANERQRSRSKNDDRLRGQFLSQYQAEQSMKSQKTGEVDYSDRVKQLEKELEQARLREQEYEEERQKRSHRREASKSRTRSRSRHNTKQERPPSRQDSWSRNEREYLRTQWDQHQSQEQEETAPPPPPRPLPEPTAAPIKPHRTGERPGDAEYAPAPLKAQRTGEARPLPVPDRVKSHVSGGFNSSPSSRPLPVPQATNRTDRFLASNPAPPQQASRQTYSREVDANAERDEEDRRRVQSQAKTKAGGWAGKSLLEREMEMERQRQREWEEAQKETAQAVRSNEGVDGIGGGIDGRWDVSQWSGYTGGDSQNKGSSGIGAGRRQIVGPRPLPNRP

SEQ ID NO: 22818 - DNA, 2619 bp, Muscodor strobelii
  misc_feature: SGI EST ID NO. CUFF.53725.1
  misc_feature: Variant of the nucleotide sequence at SEQ ID NO 22816
cggcacaagaatgcgccagccccgtccatttgacaattagaaccccgctagaaacgccgcgccgctcatcagcaacgtcactgctctttgcgctggcagtgggggcctgcactgcgctgcactgcatctgtactcgtacccaagttgccgcattttcgtacaacctcaccaacttctatcacttaacacttttgcctttttcatgcgactccattagcctgtttctaattatcttatgtcctcacgaattcaagccgccctttgactcaatcatcttactaccggccctgtcgattgccaccagctttacgccgtagatttgcgcgaaccgccgacagaacccgcgacacccgacatagatactggaatctaggcctccatttctaccgccacatttgggtgtcgaagccaacatccgaacagttccttgatctctgcttgcctcttttcgattcctcgtgtgcattggttcatacatacaatttacaccgcatcagcccacaatggcgtccgtaacgtccttggacaaggacttgcgtaagatgcgccttgacaagtacacgcccgccgctgccaatgaggtgaagtcatggatagaaggtgttctcggcgcccgattaccatctagtgacctgctggaaggtctcaaggatggtgttgcgctctgcaaactcatcaacctagctgtcggtcctccgggcgtcaaattcaagcaatccgccatgcctttcgtccagatggagaacatctcacacttccttcgcgcatgccagtcaccaccactgaacctgccagatcacgatatgttcctcaccgtcgacctctacgagcagaaagaccccgctcaagtgctgcaatgccttggcgccttttcgcgcgccgccaacgccgccaacccatctgcctttccatctgctatcggatccaaagcccgcggcagcgcattgagccctcaaggcactggaccggtcacgcctaggacccgtggcatgtccaatgtcagcgccacatcccccacgtatggctcccgccccggaatgctaccctcgaggaccggagattcgggatcaggtcggtggagcccaaccaagagcccgactagtgatagagtcggatccccgtctgtctcgagctggagcaaaaaggaccacgagggtgttacgagccccgcatggaatattgcccagtatggctacatgggaggcgcaagtcagggcaacttgggtattgcattcggagggcgcagacaaattacaactgcgggccctcatgtacccaatttggcagagaaggagcgcaagcgtaaggagcaggaagcagaggcagagcgtcaaaggctgcaaatgcaagaggaacaacgtattcgcaaggctgaggccgaagccgaggagaggcgcgcacaaatcgaggaagaaagaagatgggaagaggagacaaggcggcaacgcgccgaagaaaagcgtaaggcggaagacgaaaagcgcaaatgggaagaagaagaacgccaatggcgattgaccgaagagaagcggcgcaaagaagaagaagaggccgaggcgaaattggcgaacgagcgacaacggtcccgtagcaaaaacgatgatcgcttgcggggccagttccttagtcagtaccaggctgagcagagtatgaaatcgcaaaagacgggcgaagttgactacagcgacagagtcaaacaactggagaaagagttggaacaagcacgtcttagagagcaagaatatgaggaagaaaggcagaagcgctctcacagacgcgaagcttccaagagccgtactcgatcacgtagtcgacacaacacaaagcaggaaagacctcccagtcgacaggattcttggtcccgtaatgagagagagtatttgcgaacacaatgggatcagcatcaaagtcaggagcaagaagagactgctccccctccaccgccacgtccattgcctgagcccacagccgctccgatcaaaccgcatcgaacaggcgaacgccctggtgacgcagaatacgcaccagcccctctgaaggcccaacgaaccggcgaggctagacccctccccgttccggaccgggttaagagccacgtctccggcgggtttaattccagtccttcatcacgacccctaccagtaccacaagctacgaaccgaacggatcgcttcctcgcctctaacccagcacctccgcagcaggcttcacgccaaacctactcccgtgaagtcgatgccaatgcagagcgtgatgaggaagacagacgtcgcgtccagtcacaggctaagaccaaagctggtggttgggccggcaagtcgctacttgagcgcgagatggagatggagaggcagcgacagcgcgaatgggaagaagcacagaaggaaactgcccaagcagttcgctcaaacgaaggcgtcgacggcattggaggcggaattgatggtagatgggacgtcagtcaatggagtggctataccggcggcgatagccagaataaggggtcttccggcattggcgcaggacggagacagattgttggtcctagacccttaccaaatcgaccttaattatggttattttgtaggcttagatatgaattgaggagatttatctcaa

SEQ ID NO: 22819 - DNA, 1848 bp, Muscodor strobelii
  misc_feature: SGI cDNA ID NO. 567754
  misc_feature: Reduced expression when VOC is produced
  misc_feature: Encodes the peptide sequence at SEQ ID NO 22820
atgcctttcgtccagatggagaacatctcacacttccttcgcgcatgccagtcaccaccactgaacctgccagatcacgatatgttcctcaccgtcgacctctacgagcagaaagaccccgctcaagtgctgcaatgccttggcgccttttcgcgcgccgccaacgccgccaacccatctgcctttccatctgctatcggatccaaagcccgcggcagcgcattgagccctcaaggcactggaccggtcacgcctaggacccgtggcatgtccaatgtcagcgccacatcccccacgtatggctcccgccccggaatgctaccctcgaggaccggagattcgggatcaggtcggtggagcccaaccaagagcccgactagtgatagagtcggatccccgtctgtctcgagctggagcaaaaaggaccacgagggtgttacgagccccgcatggaatattgcccagtatggctacatgggaggcgcaagtcagggcaacttgggtattgcattcggagggcgcagacaaattacaactgcgggccctcatgtacccaatttggcagagaaggagcgcaagcgtaaggagcaggaagcagaggcagagcgtcaaaggctgcaaatgcaagaggaacaacgtattcgcaaggctgaggccgaagccgaggagaggcgcgcacaaatcgaggaagaaagaagatgggaagaggagacaaggcggcaacgcgccgaagaaaagcgtaaggcggaagacgaaaagcgcaaatgggaagaagaagaacgccaatggcgattgaccgaagagaagcggcgcaaagaagaagaagaggccgaggcgaaattggcgaacgagcgacaacggtcccgtagcaaaaacgatgatcgcttgcggggccagttccttagtcagtaccaggctgagcagagtatgaaatcgcaaaagacgggcgaagttgactacagcgacagagtcaaacaactggagaaagagttggaacaagcacgtcttagagagcaagaatatgaggaagaaaggcagaagcgctctcacagacgcgaagcttccaagagccgtactcgatcacgtagtcgacacaacacaaagcaggaaagacctcccagtcgacaggattcttggtcccgtaatgagagagagtatttgcgaacacaatgggatcagcatcaaagtcaggagcaagaagagactgctccccctccaccgccacgtccattgcctgagcccacagccgctccgatcaaaccgcatcgaacaggcgaacgccctggtgacgcagaatacgcaccagcccctctgaaggcccaacgaaccggcgaggctagacccctccccgttccggaccgggttaagagccacgtctccggcgggtttaattccagtccttcatcacgacccctaccagtaccacaagctacgaaccgaacggatcgcttcctcgcctctaacccagcacctccgcagcaggcttcacgccaaacctactcccgtgaagtcgatgccaatgcagagcgtgatgaggaagacagacgtcgcgtccagtcacaggctaagaccaaagctggtggttgggccggcaagtcgctacttgagcgcgagatggagatggagaggcagcgacagcgcgaatgggaagaagcacagaaggaaactgcccaagcagttcgctcaaacgaaggcgtcgacggcattggaggcggaattgatggtagatgggacgtcagtcaatggagtggctataccggcggcgatagccagaataaggggtcttccggcattggcgcaggacggagacagattgttggtcctagacccttaccaaatcgaccttaa

SEQ ID NO: 22820 - protein, 615 aa, Muscodor strobelii
  misc_feature: SGI Peptide ID NO. 567754
  misc_feature (1)..(612): NCBI GI: 261358134 Blast Desc: calponin [Verticillium albo-atrum VaMs.102]
  misc_feature (1)..(615): NCBI GI: 46125311 Blast Desc: FG07033.1 [Gibberella zeae PH-1]
  misc_feature (1)..(612): NCBI GI: 256733180 Blast Desc: NECHADRAFT_104157 [Nectria haematococca mpVI 77-13-4]
  misc_feature (1)..(607): NCBI GI: 156054068 Blast Desc: SS1G_05882 [Sclerotinia sclerotiorum 1980] gi|154703662|gb|EDO03401.1| SS1G_05882 [Sclerotinia sclerotiorum 1980]
  misc_feature (1)..(610): NCBI GI: 154321581 Blast Desc: BC1G_01665 [Botryotinia fuckeliana B05.10] gi|150852203|gb|EDN27395.1| BC1G_01665 [Botryotinia fuckeliana B05.10]
  misc_feature (1)..(612): NCBI GI: 171686348 Blast Desc: protein product [Podospora anserina] gi|170943135|emb|CAP68788.1| protein product [Podospora anserina]
  misc_feature (1)..(348): NCBI GI: 145611682 Blast Desc: MGG_11635 [Magnaporthe grisea 70-15] gi|145018932|gb|EDK03211.1| MGG_11635 [Magnaporthe grisea 70-15]
  misc_feature (1)..(611): NCBI GI: 189191372 Blast Desc: calponin [Pyrenophora tritici-repentis Pt-1C-BFP] gi|187973631|gb|EDU41130.1| calponin [Pyrenophora tritici-repentis Pt-1C-BFP]
  misc_feature (1)..(612): NCBI GI: 212535024 Blast Desc: calponin domain protein [Penicillium marneffei ATCC 18224] gi|210070067|gb|EEA24157.1| calponin domain protein [Penicillium marneffei ATCC 18224]
  misc_feature (1)..(612): NCBI GI: 242791836 Blast Desc: calponin homology domain protein [Talaromyces stipitatus ATCC 10500] gi|218718423|gb|EED17843.1| calponin homology domain protein [Talaromyces stipitatus ATCC 10500]
  misc_feature: Useful for introducing or modulating the production of volatile compounds
MPFVQMENISHFLRACQSPPLNLPDHDMFLTVDLYEQKDPAQVLQCLGAFSRAANAANPSAFPSAIGSKARGSALSPQGTGPVTPRTRGMSNVSATSPTYGSRPGMLPSRTGDSGSGRWSPTKSPTSDRVGSPSVSSWSKKDHEGVTSPAWNIAQYGYMGGASQGNLGIAFGGRRQITTAGPHVPNLAEKERKRKEQEAEAERQRLQMQEEQRIRKAEAEAEERRAQIEEERRWEEETRRQRAEEKRKAEDEKRKWEEEERQWRLTEEKRRKEEEEAEAKLANERQRSRSKNDDRLRGQFLSQYQAEQSMKSQKTGEVDYSDRVKQLEKELEQARLREQEYEEERQKRSHRREASKSRTRSRSRHNTKQERPPSRQDSWSRNEREYLRTQWDQHQSQEQEETAPPPPPRPLPEPTAAPIKPHRTGERPGDAEYAPAPLKAQRTGEARPLPVPDRVKSHVSGGFNSSPSSRPLPVPQATNRTDRFLASNPAPPQQASRQTYSREVDANAERDEEDRRRVQSQAKTKAGGWAGKSLLEREMEMERQRQREWEEAQKETAQAVRSNEGVDGIGGGIDGRWDVSQWSGYTGGDSQNKGSSGIGAGRRQIVGPRPLPNRP

SEQ ID NO: 22821 - DNA, 2689 bp, Muscodor strobelii
  misc_feature: SGI EST ID NO. CUFF.53724.0
  misc_feature: Variant of the nucleotide sequence at SEQ ID NO 22819
cggcacaagaatgcgccagccccgtccatttgacaattagaaccccgctagaaacgccgcgccgctcatcagcaacgtcactgctctttgcgctggcagtgggggcctgcactgcgctgcactgcatctgtactcgtacccaagttgccgcattttcgtacaacctcaccaacttctatcacttaacacttttgcctttttcatgcgactccattagcctgtttctaattatcttatgtcctcacgaattcaagccgccctttgactcaatcatcttactaccggccctgtcgattgccaccagctttacgccgtagatttgcgcgaaccgccgacagaacccgcgacacccgacatagatactggaatctaggcctccatttctaccgccacatttgggtgtcgaagccaacatccgaacagttccttgatctctgcttgcctcttttcgattcctcgtgtgcattggttcatacatacaatttacaccgcatcagcccacaatggcgtccgtaacgtccttggacaaggacttgcgtaagatgcgccttgacaagtacacgcccgccgctgccaatgaggtgaagtcatggatagaaggtgttctcggcgcccgattaccatctagtgacctgctggaaggtctcaaggatggtgttgcgctctgcaagtatgtgtctccgccccaacgcgctgcattgtatagaatatccacagaagcctaacatagctcgtcgcagactcatcaacctagctgtcggtcctccgggcgtcaaattcaagcaatccgccatgcctttcgtccagatggagaacatctcacacttccttcgcgcatgccagtcaccaccactgaacctgccagatcacgatatgttcctcaccgtcgacctctacgagcagaaagaccccgctcaagtgctgcaatgccttggcgccttttcgcgcgccgccaacgccgccaacccatctgcctttccatctgctatcggatccaaagcccgcggcagcgcattgagccctcaaggcactggaccggtcacgcctaggacccgtggcatgtccaatgtcagcgccacatcccccacgtatggctcccgccccggaatgctaccctcgaggaccggagattcgggatcaggtcggtggagcccaaccaagagcccgactagtgatagagtcggatccccgtctgtctcgagctggagcaaaaaggaccacgagggtgttacgagccccgcatggaatattgcccagtatggctacatgggaggcgcaagtcagggcaacttgggtattgcattcggagggcgcagacaaattacaactgcgggccctcatgtacccaatttggcagagaaggagcgcaagcgtaaggagcaggaagcagaggcagagcgtcaaaggctgcaaatgcaagaggaacaacgtattcgcaaggctgaggccgaagccgaggagaggcgcgcacaaatcgaggaagaaagaagatgggaagaggagacaaggcggcaacgcgccgaagaaaagcgtaaggcggaagacgaaaagcgcaaatgggaagaagaagaacgccaatggcgattgaccgaagagaagcggcgcaaagaagaagaagaggccgaggcgaaattggcgaacgagcgacaacggtcccgtagcaaaaacgatgatcgcttgcggggccagttccttagtcagtaccaggctgagcagagtatgaaatcgcaaaagacgggcgaagttgactacagcgacagagtcaaacaactggagaaagagttggaacaagcacgtcttagagagcaagaatatgaggaagaaaggcagaagcgctctcacagacgcgaagcttccaagagccgtactcgatcacgtagtcgacacaacacaaagcaggaaagacctcccagtcgacaggattcttggtcccgtaatgagagagagtatttgcgaacacaatgggatcagcatcaaagtcaggagcaagaagagactgctccccctccaccgccacgtccattgcctgagcccacagccgctccgatcaaaccgcatcgaacaggcgaacgccctggtgacgcagaatacgcaccagcccctctgaaggcccaacgaaccggcgaggctagacccctccccgttccggaccgggttaagagccacgtctccggcgggtttaattccagtccttcatcacgacccctaccagtaccacaagctacgaaccgaacggatcgcttcctcgcctctaacccagcacctccgcagcaggcttcacgccaaacctactcccgtgaagtcgatgccaatgcagagcgtgatgaggaagacagacgtcgcgtccagtcacaggctaagaccaaagctggtggttgggccggcaagtcgctacttgagcgcgagatggagatggagaggcagcgacagcgcgaatgggaagaagcacagaaggaaactgcccaagcagttcgctcaaacgaaggcgtcgacggcattggaggcggaattgatggtagatgggacgtcagtcaatggagtggctataccggcggcgatagccagaataaggggtcttccggcattggcgcaggacggagacagattgttggtcctagacccttaccaaatcgaccttaattatggttattttgtaggcttagatatgaattgaggagatttatctcaa

SEQ ID NO: 22822 - DNA, 573 bp, Muscodor strobelii
  misc_feature: SGI cDNA ID NO. 567755
  misc_feature: Reduced expression when VOC is produced
  misc_feature: Encodes the peptide sequence at SEQ ID NO 22823
atggtgcctaaaccaggaagtccacttcgcaaatactggcttcagtggaagtccttacggttaccatggcggaagcgattccttgttggtctcgatctacaaggcaatacatattgggaattccgcatggcacgcggtgacgaccatctgaaaccaaatgcgccgccctttcgccgtatcattcactaccctcgatcaacacattatagtgaagtcaaagtgccgccggcctggcatcaatggctccgatatcagcgtgaaaatccgcccaccatgcaggaacagtctgccgagaaggttcgccaggaccgcatcaaagtcctcgccgccgaagctgatgctcgctgggaggcaaagccgagtctcttggacatgcccgagaaacagaccacccagcagacattaccaaacagagggacagcaaacatagagcaagaggcgccaagcaacgagaagacacggaacccagcagagacaaacgcggcagatgatccgtggaaacgggcaagaggtggcccaagcgaatcctggcagcccgaatcttggagtccgacgtctactaaacccaggtag

SEQ ID NO: 22823 - protein, 190 aa, Muscodor strobelii
  misc_feature: SGI Peptide ID NO. 567755
  misc_feature (1)..(190): NCBI GI: 145611680 Blast Desc: MGG_00207 [Magnaporthe grisea 70-15] gi|145018931|gb|EDK03210.1| MGG_00207 [Magnaporthe grisea 70-15]
  misc_feature (1)..(190): NCBI GI: 256732729 Blast Desc: NECHADRAFT_79220 [Nectria haematococca mpVI 77-13-4]
  misc_feature (7)..(190): NCBI GI: 261358135 Blast Desc: conserved [Verticillium albo-atrum VaMs.102]
  misc_feature (1)..(185): NCBI GI: 154295536 Blast Desc: BC1G_13393 [Botryotinia fuckeliana B05.10] gi|150844019|gb|EDN19212.1| BC1G_13393 [Botryotinia fuckeliana B05.10]
  misc_feature (7)..(188): NCBI GI: 115389758 Blast Desc: [Aspergillus terreus NIH2624] gi|114194780|gb|EAU36480.1| [Aspergillus terreus NIH2624]
  misc_feature (7)..(185): NCBI GI: 156034484 Blast Desc: SS1G_13545 [Sclerotinia sclerotiorum 1980] gi|154698948|gb|EDN98686.1| SS1G_13545 [Sclerotinia sclerotiorum 1980]
  misc_feature (7)..(188): NCBI GI: 238838511 Blast Desc: conserved [Microsporum canis CBS 113480]
  misc_feature (7)..(184): NCBI GI: 238504196 Blast Desc: conserved [Aspergillus flavus NRRL3357] gi|220690801|gb|EED47150.1| conserved [Aspergillus flavus NRRL3357]
  misc_feature (7)..(190): NCBI GI: 46125313 Blast Desc: FG07034.1 [Gibberella zeae PH-1]
  misc_feature (7)..(188): NCBI GI: 119499930 Blast Desc: NFIA_103110 [Neosartorya fischeri NRRL 181] gi|119414887|gb|EAW24825.1| conserved [Neosartorya fischeri NRRL 181]
  misc_feature: Useful for introducing or modulating the production of volatile compounds
MVPKPGSPLRKYWLQWKSLRLPWRKRFLVGLDLQGNTYWEFRMARGDDHLKPNAPPFRRIIHYPRSTHYSEVKVPPAWHQWLRYQRENPPTMQEQSAEKVRQDRIKVLAAEADARWEAKPSLLDMPEKQTTQQTLPNRGTANIEQEAPSNEKTRNPAETNAADDPWKRARGGPSESWQPESWSPTSTKPR

SEQ ID NO: 22824 - DNA, 1059 bp, Muscodor strobelii
  misc_feature: SGI EST ID NO. CUFF.53740.2
  misc_feature: Variant of the nucleotide sequence at SEQ ID NO 22822
ttttgtagcatacacctccagctgcatctgacgtaaccagggtgtctttgtttcttgccgcgcatcaagcgcaggaacacgacaatagaatcatggtgcctaaaccaggaagtccacttcgcaaatactggcttcagtggaagtccttacggttaccatggcggaagcgattccttgttggtctcgatctacaaggcaatacatattgggaattccgcatggcacgcggtgacgaccatctgaaaccaaatgcgccgccctttcgccgtatcattcactaccctcgatcaacacattatagtgaagtcaaagtgccgccggcctggcatcaatggctccgatatcagcgtgaaaatccgcccaccatgcaggaacagtctgccgagaaggttcgccaggaccgcatcaaagtcctcgccgccgaagctgatgctcgctgggaggcaaagccgagtctcttggacatgcccgagaaacagaccacccagcagacattaccaaacagagggacagcaaacatagagcaagaggcgccaagcaacgagaagacacggaacccagcagagacaaacgcggcagatgatccgtggaaacgggcaagaggtggcccaagcgaatcctggcagcccgaatcttggagtccgacgtctactaaacccaggtagccgcggacacattcgaccaggagacaggatgtacaatatcatgttgaaataatctctccgtgtatgaataccaacgccttatcaatgcaacaaccgctagacatagatataatacagccgacccatcggcatcagcgactcagttccatcctataatcccttctgccacaggtgacttccccctatccgtccaaactgatactctgcgcccaattaggccatcaccgcctacttcgatcttgattggctgtgtccgttcgaattcgacgttccaatattgtcgctggtcgattgcaccgggttgtgtttcctcgatgttgcagaccccaggcgccagtttgcattttgtccatacttgtgcctccgaggtaggcaccgtcaagtcaccatcggc

SEQ ID NO: 22825 - DNA, 399 bp, Muscodor strobelii
  misc_feature: SGI cDNA ID NO. 567756
  misc_feature: Elevated expression when VOC is produced
  misc_feature: Encodes the peptide sequence at SEQ ID NO 22826
atggtcacgggccaactgctgtttcacgatcagaaaacacaagacgtagcttcgtcaggttcaaggaacactcatggctcgttgagattagatgccatggatgatgcgtctccaattcacagggcctcctacctgttcatacatgccgatggtgacttgacggtgcctacctcggaggcacaagtatggacaaaatgcaaactggcgcctggggtctgcaacatcgaggaaacacaacccggtgcaatcgaccagcgacaatattggaacgtcgaattcgaacggacacagccaatcaagatcgaagtaggcggtgatggcctaattgggcgcagagtatcagtttggacggatagggggaagtcacctgtggcagaagggattataggatggaactga

SEQ ID NO: 22826 - protein, 132 aa, Muscodor strobelii
  misc_feature: SGI Peptide ID NO. 567756
  misc_feature (2)..(132): NCBI GI: 46110337 Blast Desc: FG02050.1 [Gibberella zeae PH-1]
  misc_feature (45)..(132): NCBI GI: 256728752 Blast Desc: NECHADRAFT_105550 [Nectria haematococca mpVI 77-13-4]
  misc_feature: Useful for introducing or modulating the production of volatile compounds
MVTGQLLFHDQKTQDVASSGSRNTHGSLRLDAMDDASPIHRASYLFIHADGDLTVPTSEAQVWTKCKLAPGVCNIEETQPGAIDQRQYWNVEFERTQPIKIEVGGDGLIGRRVSVWTDRGKSPVAEGIIGWN

SEQ ID NO: 22827 - DNA, 1838 bp, Muscodor strobelii
  misc_feature: SGI EST ID NO. CUFF.53741.0
  misc_feature: Variant of the nucleotide sequence at SEQ ID NO 22825
cgcgctcaaacttgctcacggagtgacatgctgcttcccgtccgctttgtgcttcaaagaagttgctaaatcagaatttattagacaatgccgtgaggatggagctctactatttctttcattggcgtagagtactggtttactagcgggtggtgtggtctcaacggtcgcgtccatagaaattgttcgcaggtgaaaccgtgatggcagcgagtcgtgcttcaacatcttcttcaccattaattgagtaattcgtttacacatttcaagctccaaaacccgatctagttaccataaaaaaccaatatttttttgcctttactgctctattttcgtcttgctagaccatattatctcactcattctcggttgtatcgacaacactgaagatatgtgtggcccttctgttcatcgcccgtcacttggaggcgctattgcgatgttaaaatctccatcctcgatgtccgatctaatggtcacgggccaactgctgtttcacgatcagaaaacacaagacgtagcttcgtcaggttcaaggaacactcagtatgtcatcaatgaacatcttccttagtaccgtgcatttttactaggcattttcctaaaaggggtgttctgactttggtgttcagtggctcgttgagattagatgccatggatgatgcgtctccaattcacagggcctcctacctgttcatacatgccgatggtgacttgacggtgcctacctcggaggcacaagtatggacaaaatgcaaactggcgcctggggtctgcaacatcgaggaaacacaacccggtgcaatcgaccagcgacaatattggaacgtcgaattcgaacggacacagccaatcaagatcgaagtaggcggtgatggcctaattgggcgcagagtatcagtttggacggatagggggaagtcacctgtggcagaagggattataggatggaactgagtcgctgatgccgatgggtcggctgtattatatctatgtctagcggttgttgcattgataaggcgttggtattcatacacggagagattatttcaacatgatattgtacatcctgtctcctggtcgaatgtgtccgcggctacctgggtttagtagacgtcggactccaagattcgggctgccaggattcgcttgggccacctcttgcccgtttccacggatcatctgccgcgtttgtctctgctgggttccgtgtcttctcgttgcttggcgcctcttgctctatgtttgctgtccctctgtttggtaatgtctgctgggtggtctgtttctcgggcatgtccaagagactcggctttgcctcccagcgagcatcagcttcggcggcgaggactttgatgcggtcctggcgaaccttctcggcagactgttcctgcatggtgggcggattttcacgctgatatcggagccattgatgccaggccggcggcactttgacttcactataatgtgttgatcgagggtagtgaatgatacggcgaaagggcggcgcatttggtttcagatggtcgtcaccgcgtgccatgcggaattcccaatatgtattgccttgtagatcgagacctgcgccatggtcgaataagtgagagttcgcatccaagtttgccagaacggccgtagcttaccaacaaggaatcgcttccgccatggtaaccgtaaggacttccactgaagccagtatttgcgaagtggacttcctggtttaggcaccatgattctattgtcgtgttcctgcgcttgatgcgcggcaagaaacaaagacaccctggttacgtcagatgcagctggaggtgtatgctacaaaaagttattgcacagcc

SEQ ID NO: 22828 - DNA, 645 bp, Muscodor strobelii
  misc_feature: SGI cDNA ID NO. 567757
  misc_feature: Elevated expression when VOC is produced
  misc_feature: Encodes the peptide sequence at SEQ ID NO 22829
atggctcccgtcacttacaagctacctcctctaccatatgcctacgatgcacttgagcccgcaatctcgaaacagatcatggagctgcaccatggcaagcatcaccagacctacatcacgaacctgaacaaggctctcgaagtatcagacgccgcaaccgccgagggtcgtcttcatgatgccgcagctcaaatctctgcgatccgcttcaacggaggcggacacatcaatcattgcctgttttgggagaacttagcacctacttcatctgccgatgccaaaccgaatgcagctccgaagttggtcgaggctatcaacaagacctggggcagcttagataaattcagagcagctttcgcagccgagctcctgaaaatccaaggcagtggatggggctggctcgtgaaggacgctagtacgaacgcaatccgcatcgtcactctcgccaaccaggaggcagtagttgctgatgccacacctctcttcggtgtcgatatgtgggagcatgcgtactatctccagtatctcaatggtaaggctgcgtacgttgagaatatctggaatgtcatcaattggaagacggctgaggcgaggtatactgagaagcgcgaagacgtcttcaaggttctgaaggcaaatatttag

SEQ ID NO: 22829 - protein, 214 aa, Muscodor strobelii
  misc_feature: SGI Peptide ID NO. 567757
  misc_feature (93)..(199): Pfam Id: PF02777 Pfam Desc: Iron/manganese superoxide dismutases, C-terminal domain
  misc_feature (5)..(86): Pfam Id: PF00081 Pfam Desc: Iron/manganese superoxide dismutases, alpha-hairpin domain
  misc_feature (4)..(212): NCBI GI: 261360542 Blast Desc: superoxide dismutase [Verticillium albo-atrum VaMs.102]
  misc_feature (1)..(214): NCBI GI: 256728580 Blast Desc: [Nectria haematococca mpVI 77-13-4]
  misc_feature (1)..(214): NCBI GI: 46110339 Blast Desc: FG02051.1 [Gibberella zeae PH-1]
  misc_feature (1)..(212): NCBI GI: 16612112 Blast Desc: AF430836_1 manganese-superoxide dismutase [Glomerella graminicola]
  misc_feature (1)..(204): NCBI GI: 171692553 Blast Desc: protein product [Podospora anserina] gi|170946225|emb|CAP73026.1| protein product [Podospora anserina]
  misc_feature (5)..(212): NCBI GI: 14285772 Blast Desc: SODM_NEUCR RecName: Full=Superoxide dismutase [Mn], mitochondrial; Flags: Precursor gi|4731567|gb|AAD28503.1|AF118809_1 manganese superoxide crassa]
  misc_feature (1)..(204): NCBI GI: 40644112 Blast Desc: manganese superoxide dismutase [Podospora anserina]
  misc_feature (5)..(212): NCBI GI: 164426114 Blast Desc: superoxide dismutase, mitochondrial precursor [Neurospora crassa OR74A] gi|157071204|gb|EAA32343.2| superoxide dismutase, mitochondrial precursor [Neurospora crassa OR74A]
  misc_feature (4)..(214): NCBI GI: 39972791 Blast Desc: MGG_07697 [Magnaporthe grisea 70-15] gi|145016919|gb|EDK01349.1| MGG_07697 [Magnaporthe grisea 70-15]
  misc_feature (1)..(205): NCBI GI: 116198531 Blast Desc: CHGG_07421 [Chaetomium globosum CBS 148.51] gi|88178700|gb|EAQ86168.1| CHGG_07421 [Chaetomium globosum CBS 148.51]
  misc_feature (5)..(212): SWISSPROT Homolog: EC 1.15.1.1 Superoxide dismutase
  misc_feature: Useful for introducing or modulating the production of volatile compounds
MAPVTYKLPPLPYAYDALEPAISKQIMELHHGKHHQTYITNLNKALEVSDAATAEGRLHDAAAQISAIRFNGGGHINHCLFWENLAPTSSADAKPNAAPKLVEAINKTWGSLDKFRAAFAAELLKIQGSGWGWLVKDASTNAIRIVTLANQEAVVADATPLFGVDMWEHAYYLQYLNGKAAYVENIWNVINWKTAEARYTEKREDVFKVLKANI

SEQ ID NO: 22830 - DNA, 1067 bp, Muscodor strobelii
  misc_feature: SGI EST ID NO. CUFF.53876.0
  misc_feature: Variant of the nucleotide sequence at SEQ ID NO 22828
cacccgccgactgaggaacacgatgctctctcaacgttggtacgcctattgttcctattgagatctcagttttgttgtttttactcgcagtatcggtggccagaacagtccaaatacctccgaagcaggaattagttcatctcaatatcaagtaacagactattcacaatggctcccgtcacttacaagctacctcctctaccatatgcctacgatgcacttgagcccgcaatctcgaaacagatcatggagctgcaccatggcaagcatcaccagacctacatcacgaacctgaacaaggctctcgaagtatcagacgccgcaaccgccgagggtcgtcttcatgatgccgcagctcaaatctctgcgatccgcttcaacggaggcggacacatcaatcattgcctgttttgggagaacttagcacctacttcatctgccgatgccaaaccgaatgcagctccgaagttggtcgaggctatcaacaagacctggggcagcttagataaattcagagcagctttcgcagccgagctcctgaaaatccaaggcagtggatggggctggctcgtgaaggacgctagtacgaacgcaatccgcatcgtcactctcgccaaccaggaggcagtagttgctgatgccacacctctcttcggtgtcgatatgtgggagcatgcgtactatctccagtatctcaatggtaaggctgcgtacgttgagaatatctggaatgtcatcaattggaagacggctgaggcgaggtatactgagaagcgcgaagacgtcttcaaggttctgaaggcaaatatttagatagcttcgggagtattttgtggggtgcccgggagacccaatcaacatagtgatagaaacggtatgatgattatggagttccccctacaaggacttcttttttctctctccttcttttctggttagggaggaagatgcaatactcccgattcgtttgtagtaattttatgaactgaaacatcaaacatatggtttatgcctggatttacgtttgacatgaaagtagcgatacgtcatgctcaactcattctgac

SEQ ID NO: 22831 - DNA, 594 bp, Muscodor strobelii
  misc_feature: SGI cDNA ID NO. 567758
  misc_feature: Encodes the peptide sequence at SEQ ID NO 22832
atgggcgatatagctcgcaattcgagagctgcagctaatcgccgcaatggcccacctgagatttcactagaacagaaaattgacaacctcacaaccctgatatcaacaaacttgtctcaagaacataacgccatactccaggaaatcaaagacctacgaacagatatcgcaagtggcaagaaggacggtagagcagaacagaaatcggatgcctaccttcgatttgaagagatgcaaagtatagtcgatgaagcgaatcagaagctcgatgaaatgacggattattccgaaaacacagcaactctctgtagaaaggcattcgaccacataggacaagcaatccgtacgctatacgtcgagtttgaggtggtcttcgaatcgcattcttgtgcaacacttgggatcggactactgactgacctcgtaaataaaattgaggttctctcggtcaaggcctcgctacgatgccgaaagatccagttggctgagctggaacactcgtcggaagtccaagaaagcagtgacgagtcactggctcacagcaatcgagatgcagtcatggattattcttcttcgtctgaaaatgagcagtaa

SEQ ID NO: 22832 - protein, 197 aa, Muscodor strobelii
  misc_feature: SGI Peptide ID NO. 567758
MGDIARNSRAAANRRNGPPEISLEQKIDNLTTLISTNLSQEHNAILQEIKDLRTDIASGKKDGRAEQKSDAYLRFEEMQSIVDEANQKLDEMTDYSENTATLCRKAFDHIGQAIRTLYVEFEVVFESHSCATLGIGLLTDLVNKIEVLSVKASLRCRKIQLAELEHSSEVQESSDESLAHSNRDAVMDYSSSSENEQ

SEQ ID NO: 22833 - DNA, 1437 bp, Muscodor strobelii
  misc_feature: SGI cDNA ID NO. 567759
  misc_feature: Encodes the peptide sequence at SEQ ID NO 22834
atgagtccatatttcgactccgacaaatactatgaaggcgaagatccgccagttctttcacaagctgttgtttactcagccggttgtcatcgccatgatccggacagaacgacaactgacacccggcgagaggcatccattgtcgccaatgaacatattcagctggctagagattgctctatcactactctgatcattgacgtagccttggaggcgaggttcagacatcttccagaacgggtgaaagggataaccaagatcatgcccgcagggtattccgaactatttaacgagagctgggtcgatccaagctggcccgaagacggggatattggcatgctaagagacaagtggggatacgagtacctggaaagacatatgccattccttaaagatactctaccttattcggcctatcatatctggccgattatgactggagagtggccaaacgagcagtaccaggtactgtttattatcctcggaaagaccgtacgtggtttagagttctatgaccagctgatttcatatgccatttggaatcctctcatgcaccaggactctaagcatgttacattcaagttggagtcgatccttgaccaatgtaatatttcgatagcatccaacccagctattgaagattacgaaaagcgagtctggatgcctcaacttaagaacgaggactggagtagtggactgagagcacttcaagtctgttacgaattgctcgaaagaatctgccgatattcgattgatctgacttattatgccgatgaactttttgataatattgcccatttcgacccagactggatccgtgccctagcaagaggactcatagttgaccaagcaatgtggtacaaaggcaaccggtcccgcgtagtcatcgaacatgttgatgaagttcgctcgaccgacgcgatgggcagacacaaaaccattcccgctgaggcccttgatcctccggatgaagttgagccagtacaggagatcccggaagaattccagagagggaggaggaaatctctggatttggagttcaatcctcataagcgtacgggtaaagattacgaactaaggctgaaggatccgttgcttgtcgtgcagcgcacggtccgtcatgtacttaagttggctaatggggggcaggagcgtcgtcttaaggcaaggaaagcaaaggaaagggctgaggctgaggctgagaaggccagggaaaggaaaactggaggaggagtcacggagagtgataatagtactccgacagactcagaggatcccaaatcgaaggctgagactaaaaatgccggggagcagagaccgggaggagaaagcacggagagctatgacagtactacgacagactcggaggactcggaggacgatacgcaaaacacatcgctatcgcgaaggtttgtcgcacaggatgccaaaaagtaa

SEQ ID NO: 22834 - protein, 478 aa, Muscodor strobelii
  misc_feature: SGI Peptide ID NO. 567759
MSPYFDSDKYYEGEDPPVLSQAVVYSAGCHRHDPDRTTTDTRREASIVANEHIQLARDCSITTLIIDVALEARFRHLPERVKGITKIMPAGYSELFNESWVDPSWPEDGDIGMLRDKWGYEYLERHMPFLKDTLPYSAYHIWPIMTGEWPNEQYQVLFIILGKTVRGLEFYDQLISYAIWNPLMHQDSKHVTFKLESILDQCNISIASNPAIEDYEKRVWMPQLKNEDWSSGLRALQVCYELLERICRYSIDLTYYADELFDNIAHFDPDWIRALARGLIVDQAMWYKGNRSRVVIEHVDEVRSTDAMGRHKTIPAEALDPPDEVEPVQEIPEEFQRGRRKSLDLEFNPHKRTGKDYELRLKDPLLVVQRTVRHVLKLANGGQERRLKARKAKERAEAEAEKARERKTGGGVTESDNSTPTDSEDPKSKAETKNAGEQRPGGESTESYDSTTTDSEDSEDDTQNTSLSRRFVAQDAKK

SEQ ID NO: 22835 - DNA, 853 bp, Muscodor strobelii
  misc_feature: SGI EST ID NO. CUFF.53632.0
  misc_feature: Variant of the nucleotide sequence at SEQ ID NO 22833
ggactgagagcacttcaagtctgttacgaattgctcgaaagaatctgccgatattcgattgatctgacttattatgccgatgaactttttgataatattgcccatttcgacccagactggatccgtgccctagcaagaggactcatagttgaccaagcaatgtggtacaaaggcaaccggtcccgcgtagtcatcgaacatgttgatgaagttcgctcgaccgacgcgatgggcagacacaaaaccattcccgctgaggcccttgatcctccggatgaagttgagccagtacaggagatcccggaagaattccagagagggaggaggaaatctctggatttggagttcaatcctcataagcgtacgggtaaagattacgaactaaggctgaaggatccgttgcttgtcgtgcagcgcacggtccgtcatgtacttaagttggctaatggggggcaggagcgtcgtcttaaggcaaggaaagcaaaggaaagggctgaggctgaggctgagaaggccagggaaaggaaaactggaggaggagtcacggagagtgataatagtactccgacagactcagaggatcccaaatcgaaggctgagactaaaaatgccggggagcagagaccgggaggagaaagcacggagagctatgacagtactacgacagactcggaggactcggaggacgatacgcaaaacacatcgctatcgcgaaggtttgtcgcacaggatgccaaaaagtaaaggcgagaacgtccttttgctgatttgggctatgtagccattttattgatgttgttagaccgtgttgttgcagacgaatagttgatgttacgaatgaatacgagtccat

SEQ ID NO: 22836 - DNA, 1767 bp, Muscodor strobelii
  misc_feature: SGI cDNA ID NO. 567760
  misc_feature: Encodes the peptide sequence at SEQ ID NO 22837
atgacgggcgacacaacaccaggtcgggatctggtgtcctcgcctctctcgtccctcaccacaagcgactcattcaccacagctaaagcatcccccgtcagcaacgcaccagacgggtcttcatcgccatcttcgtctcagccacagtcgcagccgcacatatcccactactatagagccaagagactgccgcctgaactgagagagcattgccgcgtccacatcgaagaagccctgccccggcagaccatcttcctcttaaatggtctattgtcttcacgatcctctaaccatgaggaacctgcgtactgccctcctcctagtcaattagcctttctatgctccgccctcgtccacccagtctttaccacccgaccgagagaacaagactggccccagatcagcctcgattgtctggtgctgctacgagatgtactctccatattcggtccaatcaatgcccgtttcaaagaggcaaccctgttcaggaccaccagcaattccgagtgggactctgatgcacaggctcatcacgaaggcgtccaggatgccgacgagcgcggtctcgtcgagctcacaccccacgtcggtggaaccaccgtctggagactcggccatgacttcttcaatgtagttggctgggccttcaattgcagtgtcttgtatcccgagcgctggcggtactggcggagatggctcgacttcatgctggatgtcctcgaaaaggatcttcatgagcgacaccgactggatctcgagctagcatgtgatgatcggctcctactccaagactccattcttgcttcctacattacacatcgcacggggcggaatagtggcggacttagagggatcatgagagccctcttcgcagatggaaaacagtccagctttgtcttccaggaagtctggccaaaggagcacaagggaaatccacaatcacacggttctctgaacaagaggaaaaggggcaacgtaaacatcgatcaaggcgagtatggtgggtacatggatgatgagtcggtacagtcgtcccaggcctcggagccgccaaccccccaaaagtcaagaaccaaatcaggctttggagatgagcctacgcctacactacagacgtcttatctcgaatccatacccctgaggcagcgtctcttctcgctcctttcatacatgtgttttcatattcctgatgacaagcctcttgatttttcagacttatatgaagagtttgaaaaggagaccaagtctctgcccctacccgtatttacatctttcatcagcagtacgacatcgactcttgccgtcgatatgcaagttagcatgctgcaaggcatcatgttccttctactaccatcttcagcactctcccctgctaaggtagacaaagcacgacacgaaatcggagggatttcggctgctattgtggagcgatgtttcttaccctatccggcgaatacaatcgaagccgaggataacgcgaagatgtctatattgctcgagaacctgctcatgattgtttggcaacattgtgccgacacggagagtttcagcgagggtttggcggatgctgcggagactggcatcgaggcgcggcaagccaaggtcaataagaagaagacacgaggcaggtccagagctgtggaagatgtggatgcggacgcccgagcagcactcgaaatgtctagcatgcgactcagatggctttcggatgcaattcaagcaagtgcagagcaaagggaagatagcgagatgattgacgagaaatga

SEQ ID NO: 22837 - protein, 588 aa, Muscodor strobelii
  misc_feature: SGI Peptide ID NO. 567760
  misc_feature (41)..(578): NCBI GI: 46125315 Blast Desc: FG07035.1 [Gibberella zeae PH-1]
  misc_feature (25)..(577): NCBI GI: 256733181 Blast Desc: NECHADRAFT_104158 [Nectria haematococca mpVI 77-13-4]
  misc_feature (57)..(583): NCBI GI: 145611678 Blast Desc: MGG_00208 [Magnaporthe grisea 70-15] gi|145018930|gb|EDK03209.1| MGG_00208 [Magnaporthe grisea 70-15]
  misc_feature (12)..(574): NCBI GI: 85086773 Blast Desc: NCU00279 [Neurospora crassa OR74A] gi|28918845|gb|EAA28514.1| [Neurospora crassa OR74A]
  misc_feature (56)..(576): NCBI GI: 154295534 Blast Desc: BC1G_13392 [Botryotinia fuckeliana B05.10] gi|150844018|gb|EDN19211.1| BC1G_13392 [Botryotinia fuckeliana B05.10]
  misc_feature (14)..(563): NCBI GI: 261358490 Blast Desc: conserved [Verticillium albo-atrum VaMs.102]
  misc_feature (97)..(572): NCBI GI: 67522955 Blast Desc: AN1934.2 [Aspergillus nidulans FGSC A4] gi|40745943|gb|EAA65099.1| AN1934.2 [Aspergillus nidulans FGSC A4] gi|259487293|tpe|CBF85853.1| TPA: conserved [Aspergillus FGSC
  misc_feature (57)..(566): NCBI GI: 171686344 Blast Desc: protein product [Podospora anserina] gi|170943133|emb|CAP68786.1| protein product [Podospora anserina]
  misc_feature (57)..(551): NCBI GI: 70993316 Blast Desc: conserved [Aspergillus fumigatus Af293] gi|66849139|gb|EAL89467.1| conserved [Aspergillus fumigatus Af293] gi|159125561|gb|EDP50678.1| conserved [Aspergillus A1163]
  misc_feature (57)..(548): NCBI GI: 226289884 Blast Desc: conserved [Paracoccidioides brasiliensis Pb18]
MTGDTTPGRDLVSSPLSSLTTSDSFTTAKASPVSNAPDGSSSPSSSQPQSQPHISHYYRAKRLPPELREHCRVHIEEALPRQTIFLLNGLLSSRSSNHEEPAYCPPPSQLAFLCSALVHPVFTTRPREQDWPQISLDCLVLLRDVLSIFGPINARFKEATLFRTTSNSEWDSDAQAHHEGVQDADERGLVELTPHVGGTTVWRLGHDFFNVVGWAFNCSVLYPERWRYWRRWLDFMLDVLEKDLHERHRLDLELACDDRLLLQDSILASYITHRTGRNSGGLRGIMRALFADGKQSSFVFQEVWPKEHKGNPQSHGSLNKRKRGNVNIDQGEYGGYMDDESVQSSQASEPPTPQKSRTKSGFGDEPTPTLQTSYLESIPLRQRLFSLLSYMCFHIPDDKPLDFSDLYEEFEKETKSLPLPVFTSFISSTTSTLAVDMQVSMLQGIMFLLLPSSALSPAKVDKARHEIGGISAAIVERCFLPYPANTIEAEDNAKMSILLENLLMIVWQHCADTESFSEGLADAAETGIEARQAKVNKKKTRGRSRAVEDVDADARAALEMSSMRLRWLSDAIQASAEQREDSEMIDEK

SEQ ID NO: 22838 - DNA, 4314 bp, Muscodor strobelii
  misc_feature: SGI EST ID NO. CUFF.53747.1
  misc_feature: Variant of the nucleotide sequence at SEQ ID NO 22836
tgacatcaattaaacccctacgcgtaacacttcacaaccgtgactatcgtgacatcggaactgcttcaattcatagttgcgtcgtgggttcttgttgctctgctctgctggccgaccacggccatgacgggcgacacaacaccaggtcgggatctggtgtcctcgcctctctcgtccctcaccacaagcgactcattcaccacagctaaagcatcccccgtcagcaacgcaccagacgggtcttcatcgccatcttcgtctcagccacagtcgcagccgcacatatcccactactatagagccaagagactgccgcctgaactgagagagcattgccgcgtccacatcgaagaagccctgccccggcagaccatcttcctcttaaatggtctattgtcttcacgatcctctaaccatgaggaacctgcgtactgccctcctcctagtcaattagcctttctatgctccgccctcgtccacccagtctttaccacccgaccgagagaacaagactggccccagatcagcctcgattgtctggtgctgctacgagatgtactctccatattcggtccaatcaatgcccgtttcaaagaggcaaccctgttcaggaccaccagcaattccgagtgggactctgatgcacaggctcatcacgaaggcgtccaggatgccgacgagcgcggtctcgtcgagctcacaccccacgtcggtggaaccaccgtctggagactcggccatgacttcttcaatgtagttggctgggccttcaattgcagtgtcttgtatcccgagcgctggcggtactggcggagatggctcgacttcatgctggatgtcctcgaaaaggatcttcatgagcgacaccgactggatctcgagctagcatgtgatgatcggctcctactccaagactccattcttgcttcctacattacacatcgcacggggcggaatagtggcggacttagagggatcatgagagccctcttcgcagatggaaaacagtccagctttgtcttccaggaagtctggccaaaggagcacaagggaaatccacaatcacacggttctctgaacaagaggaaaaggggcaacgtaaacatcgatcaaggcgagtatggtgggtacatggatgatgagtcggtacagtcgtcccaggcctcggagccgccaaccccccaaaagtcaagaaccaaatcaggctttggagatgagcctacgcctacactacagacgtcttatctcgaatccatacccctgaggcagcgtctcttctcgctcctttcatacatgtgttttcatattcctgatgacaagcctcttgatttttcagacttatatgaagagtttgaaaaggagaccaagtctctgcccctacccgtatttacatctttcatcagcagtacgacatcgactcttgccgtcgatatgcaagttagcatgctgcaaggcatcatgttccttctactaccatcttcagcactctcccctgctaaggtagacaaagcacgacacgaaatcggagggatttcggctgctattgtggagcgatgtttcttaccctatccggcgaatacaatcgaagccgaggataacgcgaagatgtctatattgctcgagaacctgctcatgattgtttggcaacattgtgccgacacggagagtttcagcgagggtttggcggatgctgcggagactggcatcgaggcgcggcaagccaaggtcaataagaagaagacacgaggcaggtccagagctgtggaagatgtggatgcggacgcccgagcagcactcgaaatgtctagcatgcgactcagatggctttcggatgcaattcaagcaagtgcagagcaaagggaagatagcgagatgattgacgagaaatgagctagcttctcgactgccgatctgtcactacgatggattcccagcgctggactcttttcatattagatttctaatggtctggaagtgggacttttactcgggaaggcgttgtggaaggtaatgacttacgatctgccatgaatgatgctctcttagacacataggagccaggccgagataccctggcgttgcttagaattccagactctacacagttgctctaattactaaggaatcgatttgaatcaagtatatcttgcgcctgattgaggagttcatgtaccaatccataccatcccacatcgttatccgagacaattcagcatcccattagacgcaacgatattgccctcataatctatctaaatcacgccctttagatagtagccttacaaacatcgactacgtatatggtagcgctggtgacagctcgagtatcatgatgactaacaagctaggttcagaagtgacgatccaatcgtcgacccctcgcggtgatgcacctaagttacgaatcagatactataagaaacacacaccggtgcaaccaaactgtccggtgtaattattcgcaccgctctcctagcaattgattagaaacacagagtcagtaaaccgggccggtacatcaggacagcaggcgggccaattaataagtccggggaatagaatgccctcaacttcgacttcggaggatgggacgatgctccgtctatactgatccacatcaagccgtctccgtcttgtacggatcttgtataaagaatacctacctactgccaaggtgtgcatgcattaggtaaatgattagttgacgtcacagtacagtatacacgatactcctaagaaagaaatttcccaatccatctacattatgtcgcacaacattctaatcacaggcggctcaggctacctcggcggcagcttgctagcacgatggcaagaagcggatctgcccccgtacaagaaattattcgcgcttgtgcgcacgagtgaacaagcagaggctgtcaaacagtatggtgctgagccgcttttgttcaatgcctgggatgaagcagcggtgcgcgatgccgtgctgcggaatgaacttagtgttgtgtttcatttgattagtccacggggtacggagtcgcaggtttttttcattaaggctatggcggagttgaagcggacaacgggtattgatgtgcattttttgcatgtaagtgtgttatgagtttgggggtgagtggtggctgacaaggacagactactggtgcgaagattttctcgagccatgcgggtgcgccgacggataggctgctgcgcgatgatgatccgaagttgtatgatattcagaaggcgcagaaggcgcctttccagtggatgcaagaggttgggcactagttggtttgttgttggtgctatggctgacgtgtggataggcagttgacacgaataatgttgtgattgaggaggctgagaagtatggtgttaagagttttatctttgcgccttgtattgtgtacggcaagggtgagggatttggtaatatcatctcgatccaaacagttgccattgtcaaggctgcaaaggctgtgaaacgtgtgtatcgcactgagacggatcgacccacatggcctgtttgccatgtatcagataataccacgctgtatctagcactcatgcgcagtatccttgccggtgagaacccaagcaatggaaagaatggctattatctagcttctccaggaagcgtcgcatgggatgatctatacaaccagattgcaaaatctatggccaagcgtggcgtcgttaccgatgaaaatgtccataccgcaaatgatgaaaatcttgaagccatgggcaaggttttaggctgtccagcgcctctggtcgctgttcacatcgggggccgctgcacgttcaccgcagtaagaggcccgaaggagcttaattggaaacctgttcatcctcctgagcatatcctcgagacagccgacgacgaggttcagcttattctagataaccttgacaagcctaggacaaacgtgcccggacgaccatgaaaagtcagggtctgtcataacaaactcgggagattgtgatctagctacccataatgtagtcgttatgtggtggtcgcatgtatctgcgtacgcagatgcaccatcaacaataaggttttcgacagtacaaatttcaacatgcagtcgttattcacaccgagatggcaagttcgttagatcggcgacatggctagtttgagcagttatatgtagtatctgcaaaatgtgcaagcctatgtatcaaccaccctttgaaattatatctggtagcttatcgtaaccctgtttgttctttgtgtatgttagatgctttttgtctactaaatggcaaatacggcaaacatgttgctaagctcaatctaccaatccggcg

SEQ ID NO: 22839 - DNA, 1080 bp, Muscodor strobelii
  misc_feature: SGI cDNA ID NO. 567761
  misc_feature: Encodes the peptide sequence at SEQ ID NO 22840
atgtcgcacaacattctaatcacaggcggctcaggctacctcggcggcagcttgctagcacgatggcaagaagcggatctgcccccgtacaagaaattattcgcgcttgtgcgcacgagtgaacaagcagaggctgtcaaacagtatggtgctgagccgcttttgttcaatgcctgggatgaagcagcggtgcgcgatgccgtgctgcggaatgaacttagtgttgtgtttcatttgattagtccacggggtacggagtcgcaggtttttttcattaaggctatggcggagttgaagcggacaacgggtattgatgtgcattttttgcatactactggtgcgaagattttctcgagccatgcgggtgcgccgacggataggctgctgcgcgatgatgatccgaagttgtatgatattcagaaggcgcagaaggcgcctttccagtggatgcaagaggcagttgacacgaataatgttgtgattgaggaggctgagaagtatggtgttaagagttttatctttgcgccttgtattgtgtacggcaagggtgagggatttggtaatatcatctcgatccaaacagttgccattgtcaaggctgcaaaggctgtgaaacgtgtgtatcgcactgagacggatcgacccacatggcctgtttgccatgtatcagataataccacgctgtatctagcactcatgcgcagtatccttgccggtgagaacccaagcaatggaaagaatggctattatctagcttctccaggaagcgtcgcatgggatgatctatacaaccagattgcaaaatctatggccaagcgtggcgtcgttaccgatgaaaatgtccataccgcaaatgatgaaaatcttgaagccatgggcaaggttttaggctgtccagcgcctctggtcgctgttcacatcgggggccgctgcacgttcaccgcagtaagaggcccgaaggagcttaattggaaacctgttcatcctcctgagcatatcctcgagacagccgacgacgaggttcagcttattctagataaccttgacaagcctaggacaaacgtgcccggacgaccatga

SEQ ID NO: 22840 - protein, 359 aa, Muscodor strobelii
  misc_feature: SGI Peptide ID NO. 567761
  misc_feature (5)..(253): Pfam Id: PF01370 Pfam Desc: NAD dependent epimerase/dehydratase family
  misc_feature (1)..(348): NCBI GI: 256728158 Blast Desc: NECHADRAFT_97774 [Nectria haematococca mpVI 77-13-4]
  misc_feature (1)..(352): NCBI GI: 119487610 Blast Desc: NFIA_030730 [Neosartorya fischeri NRRL 181] gi|119410694|gb|EAW20640.1| conserved [Neosartorya fischeri NRRL 181]
  misc_feature (1)..(349): NCBI GI: 169623506 Blast Desc: SNOG_14995 [Phaeosphaeria nodorum SN15] gi|111056418|gb|EAT77538.1| SNOG_14995 [Phaeosphaeria nodorum SN15]
  misc_feature (1)..(349): NCBI GI: 238502221 Blast Desc: conserved [Aspergillus flavus NRRL3357] gi|220691154|gb|EED47502.1| conserved [Aspergillus flavus NRRL3357]
  misc_feature (1)..(348): NCBI GI: 145250903 Blast Desc: An15g04300 [Aspergillus niger] gi|134082490|emb|CAK97297.1| protein product [Aspergillus niger]
  misc_feature (1)..(347): NCBI GI: 242800157 Blast Desc: conserved [Talaromyces stipitatus ATCC 10500] gi|218716874|gb|EED16295.1| conserved [Talaromyces stipitatus ATCC 10500]
  misc_feature (3)..(350): NCBI GI: 145247692 Blast Desc: An12g10490 [Aspergillus niger] gi|134080837|emb|CAK41396.1| protein product [Aspergillus niger]
  misc_feature (2)..(349): NCBI GI: 67904330 Blast Desc: AN9152.2 [Aspergillus nidulans FGSC A4] gi|40742795|gb|EAA61985.1| AN9152.2 [Aspergillus nidulans FGSC A4] gi|259485428|tpe|CBF82442.1| TPA: conserved [Aspergillus FGSC
  misc_feature (1)..(357): NCBI GI: 145240573 Blast Desc: An08g08190 [Aspergillus niger] gi|134077456|emb|CAK40021.1| protein product [Aspergillus niger]
  misc_feature (1)..(347): NCBI GI: 212540926 Blast Desc: NAD dependent epimerase/dehydratase family protein [Penicillium marneffei ATCC 18224] gi|210067917|gb|EEA22009.1| NAD dependent epimerase/dehydratase family protein [Penicillium
MSHNILITGGSGYLGGSLLARWQEADLPPYKKLFALVRTSEQAEAVKQYGAEPLLFNAWDEAAVRDAVLRNELSVVFHLISPRGTESQVFFIKAMAELKRTTGIDVHFLHTTGAKIFSSHAGAPTDRLLRDDDPKLYDIQKAQKAPFQWMQEAVDTNNVVIEEAEKYGVKSFIFAPCIVYGKGEGFGNIISIQTVAIVKAAKAVKRVYRTETDRPTWPVCHVSDNTTLYLALMRSILAGENPSNGKNGYYLASPGSVAWDDLYNQIAKSMAKRGVVTDENVHTANDENLEAMGKVLGCPAPLVAVHIGGRCTFTAVRGPKELNWKPVHPPEHILETADDEVQLILDNLDKPRTNVPGRP

SEQ ID NO: 22841 - DNA, 4314 bp, Muscodor strobelii; identical to SEQ ID NO: 22838
  misc_feature: SGI EST ID NO. CUFF.53747.1
  misc_feature: Variant of the nucleotide sequence at SEQ ID NO 22839

SEQ ID NO: 22842 - DNA, 591 bp, Muscodor strobelii
  misc_feature: SGI cDNA ID NO. 567762
  misc_feature: Encodes the peptide sequence at SEQ ID NO 22843
atggaggcaactagcttccttgcgaacaattggcgctcggagcgcctagtctatcgaccaccagaaaatgacgaagagactaagaacttcattcacgcgaacattagcctggatgcagtcggcttagctttgagtgagattggggtgatccgaccgcaggccaagacgcacagcgaggagctcatctcttctctcaggaaagctgagttaggggtccttgtatgcctgccgaacgagaacgcgaaatccacgcctattggattcattgttgctggctggggtggcaggtctgcatcccaaaatcggacaacatctattggcattgctttggcagctccttaccagaacaaaggttacggaggcgaagctatcaattgggctctagactgggcgttcagactcggcggttaccatcgtgttgagatcggaaccgtctcctacaacaagcgagcaatgcatctctaccaacggcttggatttgttgaagaagggcgccagcgtgaatctctctattttgatcgtcaatggcatgataggatgacctatggcatgcttgaatctgagtgggccgctttgagaggcatgaaatag

SEQ ID NO: 22843 - protein, 196 aa, Muscodor strobelii
  misc_feature: SGI Peptide ID NO. 567762
  misc_feature (77)..(161): Pfam Id: PF00583 Pfam Desc: Acetyltransferase (GNAT) family
  misc_feature (84)..(161): Pfam Id: PF00583 Pfam Desc: Acetyltransferase (GNAT) family
  misc_feature (4)..(195): NCBI GI: 256723794 Blast Desc: NECHADRAFT_37130 [Nectria haematococca mpVI 77-13-4]
  misc_feature (7)..(196): NCBI GI: 46111901 Blast Desc: FG02832.1 [Gibberella zeae PH-1]
  misc_feature (10)..(194): NCBI GI: 67904434 Blast Desc: AN9204.2 [Aspergillus nidulans FGSC A4] gi|40742305|gb|EAA61495.1| AN9204.2 [Aspergillus nidulans FGSC A4] gi|259485366|tpe|CBF82329.1| TPA: GNAT family AFUA_4G14730)
  misc_feature (7)..(195): NCBI GI: 46139701 Blast Desc: FG11365.1 [Gibberella zeae PH-1]
  misc_feature (4)..(195): NCBI GI: 256730665 Blast Desc: NECHADRAFT_30277 [Nectria haematococca mpVI 77-13-4]
  misc_feature (15)..(192): NCBI GI: 255933181 Blast Desc: Pc12g12470 [Penicillium chrysogenum Wisconsin 54-1255] gi|211582680|emb|CAP80874.1| Pc12g12470 [Penicillium chrysogenum Wisconsin 54-1255]
  misc_feature (9)..(189): NCBI GI: 238486952 Blast Desc: GNAT family acetyltransferase, [Aspergillus flavus NRRL3357] gi|220699593|gb|EED55932.1| GNAT family acetyltransferase, [Aspergillus flavus NRRL3357]
  misc_feature (4)..(196): NCBI GI: 171685316 Blast Desc: protein product [Podospora anserina] gi|170942619|emb|CAP68271.1| protein product [Podospora anserina]
  misc_feature (6)..(194): NCBI GI: 119499608 Blast Desc: GNAT family acetyltransferase, [Neosartorya fischeri NRRL 181] gi|119414726|gb|EAW24664.1| GNAT family acetyltransferase, [Neosartorya fischeri NRRL 181]
  misc_feature (6)..(194): NCBI GI: 70993024 Blast Desc: GNAT family acetyltransferase [Aspergillus fumigatus Af293] gi|66848994|gb|EAL89322.1| GNAT family acetyltransferase, [Aspergillus fumigatus Af293] gi|159125741|gb|EDP50858.1| GNAT
MEATSFLANNWRSERLVYRPPENDEETKNFIHANISLDAVGLALSEIGVIRPQAKTHSEELISSLRKAELGVLVCLPNENAKSTPIGFIVAGWGGRSASQNRTTSIGIALAAPYQNKGYGGEAINWALDWAFRLGGYHRVEIGTVSYNKRAMHLYQRLGFVEEGRQRESLYFDRQWHDRMTYGMLESEWAALRGMK

SEQ ID NO: 22844 - DNA, 1622 bp, Muscodor strobelii
  misc_feature: SGI EST ID NO. CUFF.53648.1
  misc_feature: Variant of the nucleotide sequence at SEQ ID NO 22842
atgcatagttcagaaacaatcatcgatcacatatctttacattcacatatcgtgtacccaccactcccaactgttcatgttagcagagttagtctacacaatggaggcaactagcttccttgcgaacaattggcgctcggagcgcctagtctatcgaccaccagaaaatgacgaagagactaagaacttcattcacgcgaacattagcctggatgcagtcggcttagctttgagtgagattggggtgatccgaccgcaggccaagacgcacagcgaggagctcatctcttctctcaggaaagctgagttaggggtccttgtatgcctgccgaacgagaacgcgaaatccacgcctattggattcattgttgctggctggggtggcaggtctgcatcccaaaatcggacaacatctattggcattgctttggcagctccttaccagaacaaaggttacggaggcgaagctatcaattgggctctagactgggcgttcagactcggcggttaccatcgtgttgagatcggaaccgtctcctacaacaagcgagcaatgcatctctaccaacggcttggatttgttgaagaagggcgccagcgtgaatctctctattttgatcgtcaatggcatgataggatgacctatggcatgcttgaatctgagtgggccgctttgagaggcatgaaatagaccgaagctgacgaggcgagccgcaaactgcatggtgctcttgcaatgcgctttacatgtctcttacatgcctttggccattgcccaattatattgtttaaacccgaatcgacatctgattaatactaaactttgttgacatactcttcatttgtttaaacatatgcgtaactactaggctgaccctctgcgagaagacgcctatagacagaatccataccattgaaaccccgactcaccttggctgagatgcacgatacacggcgtgcagatgcgccggaacttcctgcaaacgtggctgacggatatttttttggatttggaaattcgaatagctcgttgcagtggtttgttagccttgcgtctccagtgcgatgaagccacttgtatgtccacaccacgatcaaaactgcgactaatttgtgatcaggttccatttctgtttccgtttccaagctgtagtcacagtgcttgcgtgtgggcgttgaagctagattctgccgatagacaaggtaaaagtatgcctgcctactgcgcttctacataccggtattgctattctattgcgggtatatggtacgctcttgccgacataatgttgagatgcgctccttcctacggacctgacggcggcaacggggacggcccggacgcacgtgcgaactttaattgaattacgtaatgcgacggatgtcctgaataggcaattgacttgttgtgagcattatgaatgcagctttgagcatactatccgagttgaaattgtggtatcgatcagaaaccagtgttgtgatagttttgattcttgtcagaccggacgatccatactaaatgactaggctatgtgtgtggtgggcgcccgtgggaacttagctccccaccaaactacaaaattttgctcctagtccaacacaaacatattgataccatg

SEQ ID NO: 22845 - DNA, 351 bp, Muscodor strobelii
  misc_feature: SGI cDNA ID NO. 567763
  misc_feature: Reduced expression when VOC is produced
  misc_feature: Encodes the peptide sequence at SEQ ID NO 22846
atgtctgataccgaaacaaaacccgcaccctacgctgagagcgttagcccttcggaagaaagctccgtctcgccatctcgttcacctaaccgccgtcgccgtgggcgcaagaacagaggtcaacagcaggcaatgcagcgaatggaggatccgaaccagcagatgtaccaacaacaacagatgcagatgcaacaacagcaacagcaacaacagatgatgcagcaacagcaaggcggcggcggtgatagtggtgataccttgaagctgcgacttgatctcaacatcgaggttgaagtcacactcaaggctagacttcatggtgatctgactttatctctgctggatacttga

SEQ ID NO: 22846 - protein, 116 aa, Muscodor strobelii
  misc_feature: SGI Peptide ID NO. 567763
  misc_feature (78)..(114): NCBI GI: 256730496 Blast Desc: NECHADRAFT_98506 [Nectria haematococca mpVI 77-13-4]
  misc_feature (61)..(115): NCBI GI: 119497507 Blast Desc: NFIA_023260 [Neosartorya fischeri NRRL 181] gi|119413674|gb|EAW23615.1| conserved [Neosartorya fischeri NRRL 181]
  misc_feature (79)..(116): NCBI GI: 145605792 Blast Desc: [Magnaporthe grisea 70-15] gi|145013576|gb|EDJ98217.1| [Magnaporthe grisea 70-15]
  misc_feature (77)..(116): NCBI GI: 116196838 Blast Desc: [Chaetomium globosum CBS 148.51] gi|88180930|gb|EAQ88398.1| [Chaetomium globosum CBS 148.51]
  misc_feature (79)..(115): NCBI GI: 145605790 Blast Desc: [Magnaporthe grisea 70-15] gi|145013574|gb|EDJ98215.1| [Magnaporthe grisea 70-15]
  misc_feature (80)..(115): NCBI GI: 156065501 Blast Desc: [Sclerotinia sclerotiorum 1980] gi|154691620|gb|EDN91358.1| [Sclerotinia sclerotiorum 1980]
  misc_feature (86)..(116): NCBI GI: 154320141 Blast Desc: BC1G_02051 [Botryotinia fuckeliana B05.10] gi|150854790|gb|EDN29982.1| BC1G_02051 [Botryotinia fuckeliana B05.10]
  misc_feature (79)..(114): NCBI GI: 46109630 Blast Desc: FG01697.1 [Gibberella zeae PH-1]
  misc_feature (85)..(114): NCBI GI: 146322337 Blast Desc: conserved [Aspergillus fumigatus Af293] gi|129556967|gb|EAL87847.2| conserved [Aspergillus fumigatus Af293] gi|159124793|gb|EDP49911.1| conserved [Aspergillus A1163]
  misc_feature (72)..(116): NCBI GI: 121702927 Blast Desc: ACLA_030350 [Aspergillus clavatus NRRL 1] gi|119397871|gb|EAW08302.1| ACLA_030350 [Aspergillus clavatus NRRL 1]
  misc_feature: Useful for introducing or modulating the production of volatile compounds
MSDTETKPAPYAESVSPSEESSVSPSRSPNRRRRGRKNRGQQQAMQRMEDPNQQMYQQQQMQMQQQQQQQQMMQQQQGGGGDSGDTLKLRLDLNIEVEVTLKARLHGDLTLSLLDT

SEQ ID NO: 22847 - DNA, 1175 bp, Muscodor strobelii
  misc_feature: SGI EST ID NO. CUFF.53663.0
  misc_feature: Variant of the nucleotide sequence at SEQ ID NO 22845
cgcatgttgatgaggccctgttttatgaaatgaaggcatgttattactgaagatctggtgaccgcaagcttacagccggtatatgacccgctcggttgccagctcccaacatgcactttggtcgagtttgtagaatatatgttgcaggcagcaccacgcatttgccttgaagtaaaccggtgcgggttcttttaattcctttttcatatcgcatactgctattgaaagcatctgtatctattgtgtgaagtagaataaccaagttcttctaacatgtctgataccgaaacaaaacccgcaccctacgctgagagcgttagcccttcggaagaaagctccgtctcgccatctcgttcacctaaccgccgtcgccgtgggcgcaagaacagaggtcaacagcaggcaatgcagcgaatggaggatccgaaccagcagatgtaccaacaacaacagatgcagatgcaacaacagcaacagcaacaacagatgatgcagcaacagcaaggcggcggcggtgatagtggtgataccttgaagctgcgacttgatctcaacatcgaggttgaagtcacactcaaggctagacttcatggtgatctgactttatctctgctggatacttgaacaatttggtcatatcacagaaccaactcaagattgttaccgttgaaattagtagcattttcctcgggtagaagaattatgtggctgatcgggaaccaaacctatcgcatagtcacggatagtgcatcgctctttagccaagaaacgtctcgagccggacgccttgcatttaaattattaagttcatgtatctaataactactaatcatgttacgagacttaaatagagccaaagagccacggatattatcgtcaatttacttttccatgaacatgattgtctgggtctgtgattggaggagagtgatccaaatcatcaatggacgacacaccactgattaagagtgtgaggacagcttagcttccatattttgatctatagcacttgtttcgtgtctttctattgcttgcaattatgcacctcactataccatcgaacctcttgctctgacaccagatgaatggcatcttccctatcaggcaagatgaattgatcaattgaggaataacatttcccgaagatgagggtggctaactatgtagactttgaa

SEQ ID NO: 22848 - DNA, 1671 bp, Muscodor strobelii
  misc_feature: SGI cDNA ID NO. 567764
  misc_feature: Encodes the peptide sequence at SEQ ID NO 22849
atggtggccatcaagcccttagctgcgattgcagcactttcgctcgttaaatcgacaatggcttggtacaacgagatccctccttgtctatctcctttcaagccctttgtatatgcaggatgttacgacaatggtcagccgggaaatatagaggctcttgagcttcgctcagaccttgactcccagaacatgactgttgagttgtgcgtatctgaatgcaagagcaacaatttccgcttggctggcctaagttattacggtgtgtgctactgcggcgagacagtatcgactgccctcctcgacgaatctgcgtgctcatttccttgcacggggaacagctcggaaatatgtggaggcgacacgcagatcaacatctacatggatcccacattcccgccactgactgagcagaccattgaagactatgtctcagtcggctgctggactgatgattctgaccaaggcaaagcactattctatcgtcaagacaaccttgatgccggtagtctcacaacagaggcttgtctaagctcttgcttgagtcacgggtttccattcgctggaactgaatatagtggcgagtgttattgtggcgtggttgtcgggaacggtaccgctcttgctgacgaccagtctacgtgcaacatgccttgcaatggtgattcaagccaaacctgtggtggcgcttcacgcctgagtctttacgtcgcgaaagacttgcagtctcttgaaccatgtggctcgccgccccctgtctcaagcagttcaacgattactactcctccggccactactaccactcctgttacgagctctactactacgtcgagctctgctgtgtgtacaacgactattgtgacgcctcctacgtgcgagtacaagtgtggtaactggtgctcgaacccaatacctgactggaacgatcatagtagttgtctctcttcctggagccagtgtgagctccaaaccgcaagctgttttctcaaggcaggctttccaggtgctctggactgcttcaaatttgcagcatggtgtttgaaggtcaacggctactgtggcggtaccaactgcaagaacaacaagggatgtagcaaatcagactgcacgaaaggcaaccctccatctggtggtggttatcccagcaccacaacgtccacttatccgtgcccaacgacgaccaccaagcctactaccacgactaaagcaaccaaaacaaccaccaccacgaccactactacgtcatcgacatctacctgcattccgtcgccaacaggaatctgcactcagccgacaaacaagtactacggctatgggccagggaaacctgtgggtgatatcgcgcttcccattgtgacatgcaacaacatcaagtcagattggcagagtggaaacgtgttcaagatgtacaatgatcagaagagcaagaattgtccatcgtacacacgacccaagtgtcctaatgcttgcgctgatgcctgcgagactcagtacgagcagtgcattgccgtttatgccgaaggttgtaagtcaaacaccaaatctggacgcttcggccagagctactcggatgcaaaaacggcgtgcaaggcccagtactctgactgcctctctgtcaacaaaaatgtcaagggcgatggacattgcactacgtggagccagtgctgtgtttaa

SEQ ID NO: 22849 - protein, 556 aa, Muscodor strobelii
  misc_feature: SGI Peptide ID NO. 567764
  misc_feature (145)..(228): Pfam Id: PF01822 Pfam Desc: WSC domain
  misc_feature (38)..(119): Pfam Id: PF01822 Pfam Desc: WSC domain
  misc_feature (15)..(548): NCBI GI: 116192065 Blast Desc: CHGG_05750 [Chaetomium globosum CBS 148.51] gi|88181663|gb|EAQ89131.1| CHGG_05750 [Chaetomium globosum CBS 148.51]
  misc_feature (26)..(551): NCBI GI: 171686816 Blast Desc: protein product [Podospora anserina] gi|170943369|emb|CAP69022.1| protein product [Podospora anserina]
  misc_feature (1)..(546): NCBI GI: 145614322 Blast Desc: MGG_11335 [Magnaporthe grisea 70-15] gi|145021262|gb|EDK05391.1| MGG_11335 [Magnaporthe grisea 70-15]
  misc_feature (25)..(286): NCBI GI: 85078338 Blast Desc: NCU00039 [Neurospora crassa OR74A] gi|28917200|gb|EAA26914.1| [Neurospora crassa OR74A]
  misc_feature (25)..(551): NCBI GI: 261357951 Blast Desc: conserved [Verticillium albo-atrum VaMs.102]
  misc_feature (1)..(256): NCBI GI: 261360225 Blast Desc: conserved [Verticillium albo-atrum VaMs.102]
  misc_feature (1)..(250): NCBI GI: 256733246 Blast Desc: NECHADRAFT_38105 [Nectria haematococca mpVI 77-13-4]
  misc_feature (1)..(250): NCBI GI: 46125721 Blast Desc: FG07238.1 [Gibberella zeae PH-1]
  misc_feature (280)..(551): NCBI GI: 256733246 Blast Desc: NECHADRAFT_38105 [Nectria haematococca mpVI 77-13-4]
  misc_feature (247)..(551): NCBI GI: 46125721 Blast Desc: FG07238.1 [Gibberella zeae PH-1]
MVAIKPLAAIAALSLVKSTMAWYNEIPPCLSPFKPFVYAGCYDNGQPGNIEALELRSDLDSQNMTVELCVSECKSNNFRLAGLSYYGVCYCGETVSTALLDESACSFPCTGNSSEICGGDTQINIYMDPTFPPLTEQTIEDYVSVGCWTDDSDQGKALFYRQDNLDAGSLTTEACLSSCLSHGFPFAGTEYSGECYCGVVVGNGTALADDQSTCNMPCNGDSSQTCGGASRLSLYVAKDLQSLEPCGSPPPVSSSSTITTPPATTTTPVTSSTTTSSSAVCTTTIVTPPTCEYKCGNWCSNPIPDWNDHSSCLSSWSQCELQTASCFLKAGFPGALDCFKFAAWCLKVNGYCGGTNCKNNKGCSKSDCTKGNPPSGGGYPSTTTSTYPCPTTTTKPTTTTKATKTTTTTTTTTSSTSTCIPSPTGICTQPTNKYYGYGPGKPVGDIALPIVTCNNIKSDWQSGNVFKMYNDQKSKNCPSYTRPKCPNACADACETQYEQCIAVYAEGCKSNTKSGRFGQSYSDAKTACKAQYSDCLSVNKNVKGDGHCTTWSQCCV

SEQ ID NO: 22850 - DNA, 3412 bp, Muscodor strobelii
  misc_feature: SGI EST ID NO. CUFF.53689.0
  misc_feature: Variant of the nucleotide sequence at SEQ ID NO 22848
cccgagaacggatccagcctcactgtcagctccaaaccggactccgatccaggttaatgatgtggaagatcaaagtcattagtccgttgttcgccggaagtactcgcacttacaatctagacaagagggacaacatgtttatcacgcgatgcctgaaacacaaaagctgtccatgaatatcagcagctgagggctgtttcgatctttgaattttgaatacgaggtttctttatgtacgtgtattagcatgcgctctccttcaggactcagcgcaatgcaatatgagccatgcgcaactgcatgattcctgcactgcaacgcactattggatgtggtctgcaaggacatccccatgaaaatatacacagagaggagcaagctgacattgatcaagtactacaacaagtcgccatggccctgatgagcgctagtcgaaccgagtgatatgacagcgcgatgaaggcaaagcgtggtggagcgagacgagcgcagaactgttcgtgattttgatttttctagtgacggcatctaatgcacggatgtaggtacccttgacacggcgtttgcggcttgtgtccatcacgactaaacgggaatcccctgggtcaagcttgtttcctatttcaaaccaacaggaaccagtggtgccatcggatgcacgcttattattgggttccacggtaaggctctgctggttagatggccccagccggctgcatcgcgaagcctcgaacagagcgttttcattactcaaccaaggtcggatcagctgtgcgcagtgcttgattgccaggatctcccaaggagctgaggtgcgattgatgagcctagaccgatctcaacgccatctccctgattgtttttcttagccactattgccgttggtttccatgcatcctgcactgaggaatgtggccttgttcgggatctctctgaatttgcatgactgccctcagaaccgattcgacccaccgtactttgcttatgtactgtgaccattaggtgacatttcaggtatggcatcgttctgggtttgttcaattgggcacagttttcgagctggaacgaattcggtgatgcgaaggtcatcagcggcctcttcaatgcgggcttcctatcctacgaaaagtatataaggctggctttccgtcattgctctcgagaatgacgaaatcatcagtacacgcagattcctcaatatcccaattgcttttccttgttgtcttgaagttactctctggctgacgaagccgactgccggtgacatggtggccatcaagcccttagctgcgattgcagcactttcgctcgttaaatcgacaatggcttggtacaacgagatccctccttgtctatctcctttcaagccctttgtatatgcaggatgttacgacaatggtcagccgggaaatatagaggctcttgagcttcgctcagaccttgactcccagaacatgactgttgagttgtgcgtatctgaatgcaagagcaacaatttccgcttggctggcctaagttattacggtgtgtgctactgcggcgagacagtatcgactgccctcctcgacgaatctgcgtgctcatttccttgcacggggaacagctcggaaatatgtggaggcgacacgcagatcaacatctacatggatcccacattcccgccactgactgagcagaccattgaagactatgtctcagtcggctgctggactgatgattctgaccaaggcaaagcactattctatcgtcaagacaaccttgatgccggtagtctcacaacagaggcttgtctaagctcttgcttgagtcacgggtttccattcgctggaactgaatatagtggcgagtgttattgtggcgtggttgtcgggaacggtaccgctcttgctgacgaccagtctacgtgcaacatgccttgcaatggtgattcaagccaaacctgtggtggcgcttcacgcctgagtctttacgtcgcgaaagacttgcagtctcttgaaccatgtggctcgccgccccctgtctcaagcagttcaacgattactactcctccggccactactaccactcctgttacgagctctactactacgtcgagctctgctgtgtgtacaacgactattgtgacgcctcctacgtgcgagtacaagtgtggtaactggtgctcgaacccaatacctgactggaacgatcatagtagttgtctctcttcctggagccagtgtgagctccaaaccgcaagctgttttctcaaggcaggctttccaggtgctctggactgcttcaaatttgcagcatggtgtttgaaggtcaacggctactgtggcggtaccaactgcaagaacaacaagggatgtagcaaatcagactgcacgaaaggcaaccctccatctggtggtggttatcccagcaccacaacgtccacttatccgtgcccaacgacgaccaccaagcctactaccacgactaaagcaaccaaaacaaccaccaccacgaccactactacgtcatcgacatctacctgcattccgtcgccaacaggaatctgcactcagccgacaaacaagtactacggctatgggccagggaaacctgtgggtgatatcgcgcttcccattgtgacatgcaacaacatcaagtcagattggcagagtggaaacgtgttcaagatgtacaatgatcagaagagcaagaattgtccatcgtacacacgacccaagtgtcctaatgcttgcgctgatgcctgcgagactcagtacgagcagtgcattgccgtttatgccgaaggttgtaagtcaaacaccaaatctggacgcttcggccagagctactcggatgcaaaaacggcgtgcaaggcccagtactctgactgcctctctgtcaacaaaaatgtcaagggcgatggacattgcactacgtggagccagtgctgtgtttaaactaggactgggcatgcgaccacgggcttagcgacatggaaatggtaatggcaatgttctcacgtagagacaacaagagcagacttaatcaaagttaattaattagagactgttttgatataaccagaaaagtatgaatatgcgctcactaccaatcattaatgtaaattgtgtcaacgattgtcggaaatggatgccttgctttgggcatgggctggaaggtaggaaagtatgcgccacaccacccttgaaagttgtgtgttttgataagggacgctcttgtgctggtcgaatatggggtcaacggctgaaataagaatggcatctctgacgcatcgaattctaacatgaaaggtccaggctcggattgagagccgagcacgtgaaaccgtgcatctctcgctcgaagaagcgcttagcattccttgctcaagctgcgagttcgaagagctttgaacaatgaaagcgaagcaaga

SEQ ID NO: 22851 - DNA, 1047 bp, Muscodor strobelii
  misc_feature: SGI cDNA ID NO. 567765
  misc_feature: Encodes the peptide sequence at SEQ ID NO 22852
atggataagcaatctcaacaggaatcagacgacaagcctgtcgaagacatcaagtctgccgaccacaccgaaaccgtcaaagacaacaagcctcaagatgcagagacgaaatccgcacgcgcgccggcaccttggcgaccggtagaccaggctctcgctgatctgagtgccaaaggcatggaattcgggccgtcggaacaagcttgtgccaaagccacgatgcctttgattttgcaaaaaggctattatcaacggcttgagacggcgtacaaagaagcagatatcgagccaggtttctgcataggcaagaccccgcagggcaaagagtgtttcgtgtccgtagtcaaaggcttgccaacaccgatcgataagcgattcaacaagatgatgttcatcccaatcattcgaaagaagccacggaagccagagcgaacccaagaatgcgactgggaaagagaggaacaactggttccatacgccgtggctgagaagttctatgccgctgatgtacacgatgtgacgacaaaagatgctccccataaagacattgctcatctttacagccgtgagattgcaatcatgaagaagacgaacccagatctgaaatgggagcctggtcaaccactagttgacggcccatacgacgagaaggactgtatctctcatactcaagaattccgtcctccttcccagttcaagaacctcgttacagctacttcaggtggtcatgttccccccaatcgcaattaccgtcgtcctaaagatgcccacgcgggctggggcggttacgatcgatttttcgaatggcagtctcatggtcgcgaagtcactctcaatatggtcgccaaggagacatcgtcggcagtccctccaactagtttttcctttgttaaacccaaggcagaaggcggcaaagttacttgcaccatacagcttcctcgcccagaggaagcacccgaacagttcaacgcgcctgagcaatcgacgctctatgaaattctgaagagggaagaagataaaaagaagaatagggggaaatctctgtag

SEQ ID NO: 22852 - protein, 348 aa, Muscodor strobelii
  misc_feature: SGI Peptide ID NO. 567765
  misc_feature (169)..(343): NCBI GI: 46129370 Blast Desc: FG08870.1 [Gibberella zeae PH-1]
  misc_feature (170)..(281): NCBI GI: 256727078 Blast Desc: [Nectria haematococca mpVI 77-13-4]
MDKQSQQESDDKPVEDIKSADHTETVKDNKPQDAETKSARAPAPWRPVDQALADLSAKGMEFGPSEQACAKATMPLILQKGYYQRLETAYKEADIEPGFCIGKTPQGKECFVSVVKGLPTPIDKRFNKMMFIPIIRKKPRKPERTQECDWEREEQLVPYAVAEKFYAADVHDVTTKDAPHKDIAHLYSREIAIMKKTNPDLKWEPGQPLVDGPYDEKDCISHTQEFRPPSQFKNLVTATSGGHVPPNRNYRRPKDAHAGWGGYDRFFEWQSHGREVTLNMVAKETSSAVPPTSFSFVKPKAEGGKVTCTIQLPRPEEAPEQFNAPEQSTLYEILKREEDKKKNRGKSL

SEQ ID NO: 22853 - DNA, 1047 bp, Muscodor strobelii
  misc_feature: SGI cDNA ID NO. 567766
  misc_feature: Encodes the peptide sequence at SEQ ID NO 22854
atgtcgaacaacaagcgctcaaacgacgaaagtggttctggtggcgatgctaagaaggtgaatcttggcccacccggatcgattgagcgacttccagagatcagctttgatgatgcacgcgatgcgctcttacattcgtatttcggtggcgctggtgtgcctgccagcgtgatcacggccgttggtaaccaattccagcatgatgtcttgcgcgcgttccgtatccttgtccaaatctatcctcaagccgatcctcgtaacagagagggtttcgtcctgtcacagccacaagtttccgcgcctatgactctcccatcatcttcaactcaccaaacggacgagaagtctatgaacacgacggccaaatctgagactccgtcgtctgagaacaaaccagagacctcttcatttggggcaaatatgaataggaagtgggggacaaaggactggtggaaacgccacacacccgagcagaaagccaatttacctactgactatgtgtacgcctttgaaaataggcagattctgtcggtgaaaaatttcgacaagaaaaagagaagtgacatagaagcagcatttgccaaaagcctcggtaacgcgctcttgtcagtttggtggcacgtcaggccaaccgacaagccaggctggaatactggttattgccatgttaccgttcccgctaaccagagagcggaatgcatgaattctctattgagtattcgtgatggctctattattcgtcagaatgaacgactggaagtgactagagatagaagtcaccctttccaaatggccgaatctggttacaactcgagcagaccatcgccggccacgaccttccaaccttccctcaccaatactatgtcgcccgtagagactggaaaacattcgtctcaaatatctgcaactggtggagacaagcctgttgattctaaggaacccacttgggaaatcgactacaatgatgacgattatgacatggagggagcatcgaaaacaggcggtatagacgacgcgcttaacctcgatgatagcatgggcgattaa

SEQ ID NO: 22854 - protein, 348 aa, Muscodor strobelii
  misc_feature: SGI Peptide ID NO. 567766
MSNNKRSNDESGSGGDAKKVNLGPPGSIERLPEISFDDARDALLHSYFGGAGVPASVITAVGNQFQHDVLRAFRILVQIYPQADPRNREGFVLSQPQVSAPMTLPSSSTHQTDEKSMNTTAKSETPSSENKPETSSFGANMNRKWGTKDWWKRHTPEQKANLPTDYVYAFENRQILSVKNFDKKKRSDIEAAFAKSLGNALLSVWWHVRPTDKPGWNTGYCHVTVPANQRAECMNSLLSIRDGSIIRQNERLEVTRDRSHPFQMAESGYNSSRPSPATTFQPSLTNTMSPVETGKHSSQISATGGDKPVDSKEPTWEIDYNDDDYDMEGASKTGGIDDALNLDDSMGD

SEQ ID NO: 22855 - DNA, 1854 bp, Muscodor strobelii
  misc_feature: SGI cDNA ID NO. 567767
  misc_feature: Encodes the peptide sequence at SEQ ID NO 22856
atgtttggtggcagctccagctcttccgctgccaaatccgaacctcaaacgacgcctgaacccgccaaatccgaaaaagccccctcagattccaagtccgccgtcccttctgctgatgctgctgctgctgctgctgctgtagacggcgcctcaacaaaggccaccgagccgagcgctagcggagagaagcgcagcggcaatggtagtcctcctggacgacaaaatcctgataacggtgcgtcagaaaagaagcgccggagtagtggcgtgggcagcaaggccagcagtcttatagcgagcgcaaagaactccctcaacttcagccaggcgaaccgaacaaacagcgatatgagtgcacaatcccccctgcagcgactgggcaagcaggaccaggcactggccgtcccccagggccagcacaataactcggctggcgattctgtccccggcccgcggtcgaccttccgcgtgggtgtctgggaggacagaaataggaaatgtcgacgcacaatggaagacactcatgcatttttatacaatttcctgcgcaccccagcgcctctcctagctgcggatgcttcggagaagagtgctaagcctgctacctcggcagacaactcagagagccagtcagagcagtcccaagatatgatcgagaccgataatggctacttcgccatttttgacggacacgcaggcactttcgccgcggattggtgtggcaagaagttgcacctcatcctcgaggatatcatccgacggaacccgaacgcccccatacccgagctcctcgaccaaacttttaccagtgtcgatgcgcagttggacaagctgccgataaaaaatagtggttgcactgcagctattgccgtcttgcgctgggaggatcgtgtgccgagcaacagctctgccacaggctctcaggccattgcccctgcagctgcagcggcatccaaagccccagatgcatcaaaggccaaggacagtaagtctgaggatgacgacagtagcaaggctattccagagtcaactcacgcgaaattaaaaggtgccgcaacgcgacaacgagtcctctacacagcgaacgtcggtgatgcacgaatcatcctctgtcgaggtggcaaggccttgcgcctgtcctacgaccacaaaggcagcgacgagaacgaaggcaagcgtattgccaacgcgggtggcttaatcttgaacaatcgagtcaacggcgttttggctgtcacacgagctctgggggatacctacatgaaggatcttgtcactggccatccttacaccaccgagactgtcatccagccagaagcggatgagttcattataattgcttgcgacggcctttgggacgtctgttcagatcaagaagcagtagatcttgtacgtgacaaccaggatcctgtggcctcttccaaggttcttgtcgaccatgccctagcccgtttcagcacggacaacctgtcgtgtatgatcatacgctttgacaaggctgccttacttgatcaaaacaacaaggagcgccccattggtgttgaaggagatactacgagtgccaccggaaaagtcagcgaggcggagaagattgtgagtgtcaccaagcagaaaatcgccgatggagacgccccggccgtcggagtgtcggcaagcaatagtggtcgcggtcgtgacccggagcctatcgctgaagccttcacacctaccattataaaagggtcggtcgaggaagagccttcagctattgatgaaagtgatgccccggaggtcaccgaaaatgcgataccgaaggcagacgctgctgaagcttctcctgatgcaggtgacgcagattctaaggcagcaccttag

SEQ ID NO: 22856 - protein, 617 aa, Muscodor strobelii
  misc_feature: SGI Peptide ID NO. 567767
  misc_feature (157)..(490): Pfam Id: PF00481 Pfam Desc: Protein phosphatase 2C
  misc_feature (357)..(490): Pfam Id: PF00481 Pfam Desc: Protein phosphatase 2C
  misc_feature (157)..(293): Pfam Id: PF00481 Pfam Desc: Protein phosphatase 2C
  misc_feature (89)..(608): NCBI GI: 85081320 Blast Desc: NCU00434 [Neurospora crassa OR74A] gi|28917772|gb|EAA27462.1| NCU00434 [Neurospora crassa OR74A]
  misc_feature (1)..(617): NCBI GI: 116207634 Blast Desc: CHGG_03110 [Chaetomium globosum CBS 148.51] gi|88183707|gb|EAQ91175.1| CHGG_03110 [Chaetomium globosum CBS 148.51]
  misc_feature (31)..(581): NCBI GI: 171686106 Blast Desc: protein product [Podospora anserina] gi|170943014|emb|CAP68667.1| protein product [Podospora anserina]
  misc_feature (38)..(605): NCBI GI: 156065035 Blast Desc: SS1G_00528 [Sclerotinia sclerotiorum 1980] gi|154691387|gb|EDN91125.1| SS1G_00528 [Sclerotinia sclerotiorum 1980]
  misc_feature (1)..(603): NCBI GI: 154320031 Blast Desc: BC1G_01996 [Botryotinia fuckeliana B05.10] gi|150854735|gb|EDN29927.1| BC1G_01996 [Botryotinia fuckeliana B05.10]
  misc_feature (53)..(607): NCBI GI: 256726141 Blast Desc: NECHADRAFT_94471 [Nectria haematococca mpVI 77-13-4]
  misc_feature (1)..(583): NCBI GI: 46116538 Blast Desc: FG04111.1 [Gibberella zeae PH-1]
  misc_feature (1)..(534): NCBI GI: 39940066 Blast Desc: MGG_05207 [Magnaporthe grisea 70-15] gi|145010523|gb|EDJ95179.1| MGG_05207 [Magnaporthe grisea 70-15]
  misc_feature (64)..(540): NCBI GI: 255953335 Blast Desc: Pc21g03560 [Penicillium chrysogenum Wisconsin 54-1255] gi|211589131|emb|CAP95253.1| Pc21g03560 [Penicillium chrysogenum Wisconsin 54-1255]
  misc_feature (1)..(546): NCBI GI: 159126955 Blast Desc: protein phosphatase 2C, [Aspergillus fumigatus A1163]
  misc_feature (154)..(495): SWISSPROT Homolog: EC 3.1.3.16 Phosphoprotein phosphatase
MFGGSSSSSAAKSEPQTTPEPAKSEKAPSDSKSAVPSADAAAAAAAVDGASTKATEPSASGEKRSGNGSPPGRQNPDNGASEKKRRSSGVGSKASSLIASAKNSLNFSQANRTNSDMSAQSPLQRLGKQDQALAVPQGQHNNSAGDSVPGPRSTFRVGVWEDRNRKCRRTMEDTHAFLYNFLRTPAPLLAADASEKSAKPATSADNSESQSEQSQDMIETDNGYFAIFDGHAGTFAADWCGKKLHLILEDIIRRNPNAPIPELLDQTFTSVDAQLDKLPIKNSGCTAAIAVLRWEDRVPSNSSATGSQAIAPAAAAASKAPDASKAKDSKSEDDDSSKAIPESTHAKLKGAATRQRVLYTANVGDARIILCRGGKALRLSYDHKGSDENEGKRIANAGGLILNNRVNGVLAVTRALGDTYMKDLVTGHPYTTETVIQPEADEFIIIACDGLWDVCSDQEAVDLVRDNQDPVASSKVLVDHALARFSTDNLSCMIIRFDKAALLDQNNKERPIGVEGDTTSATGKVSEAEKIVSVTKQKIADGDAPAVGVSASNSGRGRDPEPIAEAFTPTIIKGSVEEEPSAIDESDAPEVTENAIPKADAAEASPDAGDADSKAAP

SEQ ID NO: 22857 - DNA, 2896 bp, Muscodor strobelii
  misc_feature: SGI EST ID NO. CUFF.53770.0
  misc_feature: Variant of the nucleotide sequence at SEQ ID NO 22855
ctcgcacttcgcaaccccacgatttatcatcaccacccgccggacgcagtagagtgtagcacctatcccaactcccaatttctcaacggtgacttgtctgcatcggcagcagcttcgtcgcccattctcttctgcttgcttctctgctatcttttgcaatcctgcacgtctttagccgtatgctaccgtggcgcatgacgttgactctctcttcgcagtagattgcacctccctaagaccagaacactaaatcgtcgcctctgcgcgccacgcatgacgacatcgcaccgcagagctgtctgtttcgtgctacccatttcttgacattctcctgtcgacaatcacttcgctggcacattccgaaatccctcggacagcttgatctgctgctcagcaacccatcaatcattcgtccccgccccgcacacgtctgtctgtgtgcgctggcttgcttgtaacattgtacccctccatcctctcacgcttctggcctgcgtgcgacccaccacctctgcctctgtctttcacctccgaaaatctggcagggaacaagcgccgcagtctctcctctcagggaggtctgctgaataggatgtttggtggcagctccagctcttccgctgccaaatccgaacctcaaacgacgcctgaacccgccaaatccgaaaaagccccctcagattccaagtccgccgtcccttctgctgatgctgctgctgctgctgctgctgtagacggcgcctcaacaaaggccaccgagccgagcgctagcggagagaagcgcagcggcaatggtagtcctcctggacgacaaaatcctgataacggtgcgtcagaaaagaagcgccggagtagtggcgtgggcagcaaggccagcagtcttatagcgagcgcaaagaactccctcaacttcagccaggcgaaccgaacaaacagcgatatgagtgcacaatcccccctgcagcgactgggcaagcaggaccaggcactggccgtcccccagggccagcacaataactcggctggcgattctgtccccggcccgcggtcgaccttccgcgtgggtgtctgggaggacagaaataggaaatgtcgacgcacaatggaagacactcatgcatttttatacaatttcctgcgcaccccagcgcctctcctagctgcggatgcttcggagaagagtgctaagcctgctacctcggcagacaactcagagagccagtcagagcagtcccaagatatgatcgagaccgataatggctacttcgccatttttgacggacacgcaggcactttcgccgcggattggtgtggcaagaagttgcacctcatcctcgaggatatcatccgacggaacccgaacgcccccatacccgagctcctcgaccaaacttttaccagtgtcgatgcgcagttggacaagctgccgataaaaaatagtggttgcactgcagctattgccgtcttgcgctgggaggatcgtgtgccgagcaacagctctgccacaggctctcaggccattgcccctgcagctgcagcggcatccaaagccccagatgcatcaaaggccaaggacagtgccgcaacgcgacaacgagtcctctacacagcgaacgtcggtgatgcacgaatcatcctctgtcgaggtggcaaggccttgcgcctgtcctacgaccacaaaggcagcgacgagaacgaaggcaagcgtattgccaacgcgggtggcttaatcttgaacaatcgagtcaacggcgttttggctgtcacacgagctctgggggatacctacatgaaggatcttgtcactggccatccttacaccaccgagactgtcatccagccagaagcggatgagttcattataattgcttgcgacggcctttgggacgtctgttcagatcaagaagcagtagatcttgtacgtgacaaccaggatcctgtggcctcttccaaggttcttgtcgaccatgccctagcccgtttcagcacggacaacctgtcgtgtatgatcatacgctttgacaaggctgccttacttgatcaaaacaacaaggagcgccccattggtgttgaaggagatactacgagtgccaccggaaaagtcagcgaggcggagaagattgtgagtgtcaccaagcagaaaatcgccgatggagacgccccggccgtcggagtgtcggcaagcaatagtggtcgcggtcgtgacccggagcctatcgctgaagccttcacacctaccattataaaagggtcggtcgaggaagagccttcagctattgatgaaagtgatgccccggaggtcaccgaaaatgcgataccgaaggcagacgctgctgaagcttctcctgatgcaggtgacgcagattctaaggcagcaccttagattgcgaataaatgcttcgtcacagatgttacatgcccaatcttggtagaagaaatacatgccagccattgcactgaggctttaaggtggttgtctttattcctcttgtctgcacggcgttctgcatctgttttctcggaatgggtagccccgggtcagcgtgctgtttgtctcgtcataggaatgattgtagacactgcccgttggaaatgaagaccggaggagaagtgattgaccgtagagaagagccaaacagagagatcgaggttgagatcagtcaatgatggcggtcgactgtaaggatagcacatcgtactactaacagcccatgcggttgcggaatgatggtcattaatgcctgatgagctctttcatccccttaggcacggggacctagtctcacaataggatccgcaccttttacctagaccgaatgataaatgagatatggtcactggcaacatacgaagttccatcgtgagcatgctgggtggaaatgcacctattcgctca

SEQ ID NO: 22858 - DNA, 1080 bp, Muscodor strobelii
  misc_feature: SGI cDNA ID NO. 567768
  misc_feature: Encodes the peptide sequence at SEQ ID NO 22859
atgcctagtacaactcacattgtctcaaccttcgtgctcttcgcaactacatttgcagcttgtgcaggtgccagtggatgtaataccaactcgactggctccaagaaacttcaaactgaagatgggtacacttgggtctatgactaccacccagccaagaattcttccaaaccaacccttctccttctccacggagtgccagatacccgcgatggttggcgttatcagatcccagtgcttctcgatgccggatatggtgtcttagcaccagatcttctagggttcggtgaaacttcagcgccggcagatcttgaggcatacaattttaaggatatcactggtgatataatcgagcttatggacgcagagggtgtgcagactgcgattggcgttggccatgatctcggtacaaatgtcttgagtcgactagcgctttactatcctgatcgctttaccaaattggccttcctgtctgtgggttacgatgcgccgggcacatcgttcgatatcgatgccatcaatgccgcagactggcctactatgggctacacgcgcttcggatactggtatttcttcaattccttcgatggcgctgatttgtctagtcaacgtctagagtcattctaccacctcgtcttccacaccaactcctcggcatggggtgcaaatttcgccaacatcggcgcagcgcgtgcctggctagacagcaacaagacaactgagctacccacatggctatcagagtccgaaaaagcagcgtggctgcgctcatttagcgacccacgaactatcgccggggcgttgaatcactacaaagcccggctgcgtggcgtccaagccgctgatgaggcgcatgttacggacgaggagaggactttaaaagttcctgtcctcacagtcggagggaaagacgatatggtttcacttgctgctgctgtggttgctagcacgaaaccgtgggccaaggccgggtacgtagataaggctgttgatgcgggccattgggtcacgctagagacggctgatgagcttggtgatattctccttgaattcgcggatcctgacgccgttatttcatga

SEQ ID NO: 22859 - protein, 359 aa, Muscodor strobelii
  misc_feature: SGI Peptide ID NO. 567768
  misc_feature (85)..(350): Pfam Id: PF00561 Pfam Desc: alpha/beta hydrolase fold
  misc_feature (85)..(158): Pfam Id: PF00561 Pfam Desc: alpha/beta hydrolase fold
  misc_feature (34)..(351): NCBI GI: 46139363 Blast Desc: FG11196.1 [Gibberella zeae PH-1]
  misc_feature (34)..(353): NCBI GI: 145231136 Blast Desc: An01g14420 [Aspergillus niger] gi|134055961|emb|CAK37437.1| protein product [Aspergillus niger]
  misc_feature (34)..(357): NCBI GI: 238844169 Blast Desc: conserved [Microsporum canis CBS 113480]
  misc_feature (34)..(352): NCBI GI: 242805743 Blast Desc: epoxide hydrolase, [Talaromyces stipitatus ATCC 10500] gi|218715220|gb|EED14642.1| epoxide hydrolase, [Talaromyces stipitatus ATCC 10500]
  misc_feature (34)..(352): NCBI GI: 212538743 Blast Desc: epoxide hydrolase, [Penicillium marneffei ATCC 18224] gi|210069269|gb|EEA23360.1| epoxide hydrolase, [Penicillium marneffei ATCC 18224]
  misc_feature (43)..(351): NCBI GI: 121716094 Blast Desc: epoxide hydrolase, [Aspergillus clavatus NRRL 1] gi|119403813|gb|EAW14230.1| epoxide hydrolase, [Aspergillus clavatus NRRL 1]
  misc_feature (36)..(351): NCBI GI: 119481839 Blast Desc: epoxide hydrolase, [Neosartorya fischeri NRRL 181] gi|119409102|gb|EAW19051.1| epoxide hydrolase, [Neosartorya fischeri NRRL 181]
  misc_feature (34)..(351): NCBI GI: 67538026 Blast Desc: AN5183.2 [Aspergillus nidulans FGSC A4] gi|40743174|gb|EAA62364.1| AN5183.2 [Aspergillus nidulans FGSC A4] gi|259484639|tpe|CBF81033.1| TPA: epoxide hydrolase, nidulans
  misc_feature (38)..(351): NCBI GI: 169763034 Blast Desc: [Aspergillus oryzae RIB40] gi|83770445|dbj|BAE60578.1| protein product [Aspergillus oryzae]
  misc_feature (39)..(351): NCBI GI: 156051009 Blast Desc: SS1G_08093 [Sclerotinia sclerotiorum 1980] gi|154692492|gb|EDN92230.1| SS1G_08093 [Sclerotinia sclerotiorum 1980]
  misc_feature (50)..(356): SWISSPROT Homolog: EC 3.3.2.10 Soluble epoxide hydrolase
MPSTTHIVSTFVLFATTFAACAGASGCNTNSTGSKKLQTEDGYTWVYDYHPAKNSSKPTLLLLHGVPDTRDGWRYQIPVLLDAGYGVLAPDLLGFGETSAPADLEAYNFKDITGDIIELMDAEGVQTAIGVGHDLGTNVLSRLALYYPDRFTKLAFLSVGYDAPGTSFDIDAINAADWPTMGYTRFGYWYFFNSFDGADLSSQRLESFYHLVFHTNSSAWGANFANIGAARAWLDSNKTTELPTWLSESEKAAWLRSFSDPRTIAGALNHYKARLRGVQAADEAHVTDEERTLKVPVLTVGGKDDMVSLAAAVVASTKPWAKAGYVDKAVDAGHWVTLETADELGDILLEFADPDAVIS

SEQ ID NO: 22860 - DNA, 750 bp, Muscodor strobelii
  misc_feature: SGI cDNA ID NO. 567769
  misc_feature: Encodes the peptide sequence at SEQ ID NO 22861
atggcgtgcgagaatctcgactccgaactctccctgctgatcgaaggcatcgtgggtatcatgtgtgctccgaagtacagccatgacactgacatctcacctgtccgatcccgcaccccacttgcatccccatcacgtctgtcatttgcctccatcacctccaactcatcaacacacacatctcagtccggcgatgactctggcagctcggacgacgaggaggtcgaggatatggatgaggaggaggacgacagcgatgaagacgactcagatttcgaggaaccattaagaggtatcctcaaacagccccatgagcacagcgatgacgacgactcagactatgagatatcatttgagcgcaacgtcacttgggccgtcgagatcgccgtcgacattgagacaggcgagcaggccgcaccttccaaccttccgcacagacaatgggtcgcgaagtgccggagagacttgatggaacgagccaacgaagcaatcaagctgggccttctctccgtcaacgaggatttcgacgtcgttagcacgatcgaaggagatgacgacctcgagcaactcgcctcggcatatagccgctaccacaagagcctccaagacaagcacaagcagagggtagtgggaatcaagccgaagaaaagcagccgcgcactctgtaagaagggcgaggaagtaacgagagcgcaggagatggagctagccgggaaggagtcagacgaagaggtcgattcggaattgtga

SEQ ID NO: 22861 - protein, 249 aa, Muscodor strobelii
  misc_feature: SGI Peptide ID NO. 567769
MACENLDSELSLLIEGIVGIMCAPKYSHDTDISPVRSRTPLASPSRLSFASITSNSSTHTSQSGDDSGSSDDEEVEDMDEEEDDSDEDDSDFEEPLRGILKQPHEHSDDDDSDYEISFERNVTWAVEIAVDIETGEQAAPSNLPHRQWVAKCRRDLMERANEAIKLGLLSVNEDFDVVSTIEGDDDLEQLASAYSRYHKSLQDKHKQRVVGIKPKKSSRALCKKGEEVTRAQEMELAGKESDEEVDSEL

SEQ ID NO: 22862 - DNA, 1757 bp, Muscodor strobelii
  misc_feature: SGI EST ID NO. CUFF.53721.0
  misc_feature: Variant of the nucleotide sequence at SEQ ID NO 22860
caaagcgcagcgcaggctctcggatgaactaaatgaacgtcagggaatcaacaatagagcctgtttcgcctagcgcgccaaagttgcgcatgtttcgcggtctttaaccatcgtgacttccaacctagcactgacgtgcaccttccttccttgaacaccacctaactccgtcccgacttcacactacctacacccaacggcatttgtcaaattcaaactcacgcattttaagacgaatccattctacacaatccaacgcatttattcgtttgatatttgcatcactacacatacctcatcatcgcaccgcctctgacgcgccaccaactcttcttcttctccatcacctccaatctgtcagcatttctcgcaccttgttgcgcgcgccattctagcccctccaccgacatcaccccaccatacatacctaaggacctagggtacctcatacacctatcgcgcacatcaacataacagaatggcgtgcgagaatctcgactccgaactctccctgctgatcgaaggcatcgtgggtatcatgtgtgctccgaagtacagccatgacactgacatctcacctgtccgatcccgcaccccacttgcatccccatcacgtctgtcatttgcctccatcacctccaactcatcaacacacacatctcagtccggcgatgactctggcagctcggacgacgaggaggtcgaggatatggatgaggaggaggacgacagcgatgaagacgactcagatttcgaggaaccattaagaggtatcctcaaacagccccatgagcacagcgatgacgacgactcagactatgagatatcatttgagcgcaacgtcacttgggccgtcgagatcgccgtcgacattgagacaggcgagcaggccgcaccttccaaccttccgcacagacaatgggtcgcgaagtgccggagagacttgatggaacgagccaacgaagcaatcaagctgggccttctctccgtcaacgaggatttcgacgtcgttagcacgatcgaaggagatgacgacctcgagcaactcgcctcggcatatagccgctaccacaagagcctccaagacaagcacaagcagagggtagtgggaatcaagccgaagaaaagcagccgcgcactctgtaagaagggcgaggaagtaacgagagcgcaggagatggagctagccgggaaggagtcagacgaagaggtcgattcggaattgtgaatagctgaagctggtgggtttctctgttttggtgtttggctcaaaaaggtttcggttgcatagcgcttggctggatacatctcattgcattacaaagcgttgctcacagcatttataccaggatggatatctatgtttcctggaagcggaggatcaagatcagaatgaatgaagcacacacgtgcaagccgttgggttggagggcagaggacagagcagataatcacaaaagatagcttctgcatcaccataacagccagctaccgaataaacattcgccgtggaaactaattgatactaaggaaattaaagcgatccttaaacgttggcttgcgcgcatccagttcagtatacgtagacgttttacatgagagacatattggggggcattctcggtgtgtaggcggtgagttcgcaactcataatcactcctcatttactgtctttatacgattttcccagtgttacctgatatttggcagtatgttgtgcattctgagttaccttacgtttttgcgtcaaattcgac

SEQ ID NO: 22863 - DNA, 1950 bp, Muscodor strobelii
  misc_feature: SGI cDNA ID NO. 567770
  misc_feature: Encodes the peptide sequence at SEQ ID NO 22864
atggccgccggtcacgacctgttcaaggcgttaagtcccgccgactatgacgattttgcacagcaagacctgaaggagacgttaacgaatatattcggcgatgctcagtgtctgattgattcaatcccagtcagcgccaagtcagagtcgcaaaagtcgggccggccacgggccgtcacagattcagcggtggattcactacctaacacatcaaccgtgaactccggccagtctgctcagcttagaaaggagtggaaggaggtcaaagtcagtcctaaagataacccaattggactgaatgtgtacaaactcggcgcgaaggatgggagaggagcatggttcgcaagacgaagtgttcacgaagccccaagcttcgacaggtggagggaggggtttgagagggaattcaatgagagcttgaaaatgcatggacacgggcctggtgaggggaaggttcgtggtttagcggctgataaacgtgttgttgatcagactgtagatggttgcggaaagattcaagtgtatcagctttcggcgcagtttcctggccccacgagtcctcgtgacttcatcactatgtgccttagctctgattcttccttagtcgaaggagcaaagcaacgctatttcatgcttgtctcaaaaccgtgcgttcatcctgaatgtccccagcgcacaggtttcatccgtggctattatgagtcggtcgagttcatccgagaaatcaaaatcgacaagcctctgcgaaaagtgcattcaaccactgacatcacggacaagaatgcgccaacatcgttgagcaacgcgcttgacggtactgataataatgatgcggataagaccgaagagagcgaggagtacgacacagccgtcgaatggatgatgatcacgcgaagtgatcccggcggctcagtcccccgatttatgattgagcgcggtacaccaccaggaattgctggtgacgctaataaatttctacagtggatcacatctgagaagttcgagagtcctgacgatacggaaactgcgaatgagacaacttctgacagtatagccgcgtcgcagacgacaagcaacccaccggaaccaacaccaacagcaccaggcatgacagccatagcaaaaagctcaactcccagagatcaagaaatggacgatgtacctggccccagtggctattatggaatgattgctggagctctcggggcagctgcctccattgcagcttcacgattacccagggcattcggctcgacagtaggaggagatactgcatcggaagtgtcttcttcggatatctcagatgacgcttcctctatccacagttttcatagcttggaggatgaaaaagatatcgagacattggaagaagagaaagagctgtccccttctattagcactggaaatgctgcagattctacccattcaaccgaagtcaccaatgccaaaccctcacgacacgaaaaagaactaaagaaactggaagaacgcaaacggaagacagaggaaaagatgcagcggcaacaagagcggtcaatgaaacggaatgatgatggtgctgcactgcagaaactacgtgagaggcacgaacgtgagatcgcgaaacaagaggagagatatgctcgtgatcgagcgaaacttgagacgaggcgaatcaacgaagaaaggaaagctgaagatcgtagacgtaaggcagcagagagaggagaaaaagcaaacttggtcttggaactggagaagacaagaacagaacgcgatatggcccgcttggaggttgagatgctcagagatcaagtcggacaactgcaagctcaaaatacgaggcttactgctcagcttggacgtgcgggtttgagtatcgaggagaacggctcgatgcagcctgggcagcttcgtaaagcagcaactgagcgtgtcgaggatagcaatggtgggaagacaaagacatga

SEQ ID NO: 22864 - protein, 649 aa, Muscodor strobelii
  misc_feature: SGI Peptide ID NO. 567770
  misc_feature (5)..(611): NCBI GI: 39953989 Blast Desc: MGG_08883 [Magnaporthe grisea 70-15] gi|145021174|gb|EDK05303.1| MGG_08883 [Magnaporthe grisea 70-15]
  misc_feature (5)..(618): NCBI GI: 46125097 Blast Desc: FG06926.1 [Gibberella zeae PH-1]
  misc_feature (3)..(615): NCBI GI: 164423113 Blast Desc: NCU08978 [Neurospora crassa OR74A] gi|157069953|gb|EAA29770.2| [Neurospora crassa OR74A]
  misc_feature (5)..(621): NCBI GI: 116207740 Blast Desc: CHGG_03163 [Chaetomium globosum CBS 148.51] gi|88183760|gb|EAQ91228.1| CHGG_03163 [Chaetomium globosum CBS 148.51]
  misc_feature (1)..(622): NCBI GI: 156052002 Blast Desc: SS1G_07409 [Sclerotinia sclerotiorum 1980] gi|154705186|gb|EDO04925.1| SS1G_07409 [Sclerotinia sclerotiorum 1980]
  misc_feature (5)..(620): NCBI GI: 171686226 Blast Desc: protein product [Podospora anserina] gi|170943074|emb|CAP68727.1| protein product [Podospora anserina]
  misc_feature (1)..(618): NCBI GI: 154309724 Blast Desc: BC1G_07332 [Botryotinia fuckeliana B05.10] gi|150851793|gb|EDN26986.1| BC1G_07332 [Botryotinia fuckeliana B05.10]
  misc_feature (1)..(627): NCBI GI: 189188146 Blast Desc: conserved [Pyrenophora tritici-repentis Pt-1C-BFP] gi|187972018|gb|EDU39517.1| conserved [Pyrenophora tritici-repentis Pt-1C-BFP]
  misc_feature (1)..(618): NCBI GI: 169617141 Blast Desc: SNOG_11747 [Phaeosphaeria nodorum SN15] gi|160703346|gb|EAT80791.2| SNOG_11747 [Phaeosphaeria nodorum SN15]
  misc_feature (1)..(387): NCBI GI: 212527894 Blast Desc: conserved [Penicillium marneffei ATCC 18224] gi|210073502|gb|EEA27589.1| conserved [Penicillium marneffei ATCC 18224]
MAAGHDLFKALSPADYDDFAQQDLKETLTNIFGDAQCLIDSIPVSAKSESQKSGRPRAVTDSAVDSLPNTSTVNSGQSAQLRKEWKEVKVSPKDNPIGLNVYKLGAKDGRGAWFARRSVHEAPSFDRWREGFEREFNESLKMHGHGPGEGKVRGLAADKRVVDQTVDGCGKIQVYQLSAQFPGPTSPRDFITMCLSSDSSLVEGAKQRYFMLVSKPCVHPECPQRTGFIRGYYESVEFIREIKIDKPLRKVHSTTDITDKNAPTSLSNALDGTDNNDADKTEESEEYDTAVEWMMITRSDPGGSVPRFMIERGTPPGIAGDANKFLQWITSEKFESPDDTETANETTSDSIAASQTTSNPPEPTPTAPGMTAIAKSSTPRDQEMDDVPGPSGYYGMIAGALGAAASIAASRLPRAFGSTVGGDTASEVSSSDISDDASSIHSFHSLEDEKDIETLEEEKELSPSISTGNAADSTHSTEVTNAKPSRHEKELKKLEERKRKTEEKMQRQQERSMKRNDDGAALQKLRERHEREIAKQEERYARDRAKLETRRINEERKAEDRRRKAAERGEKANLVLELEKTRTERDMARLEVEMLRDQVGQLQAQNTRLTAQLGRAGLSIEENGSMQPGQLRKAATERVEDSNGGKTKT

SEQ ID NO: 22865 - DNA, 3798 bp, Muscodor strobelii
  misc_feature: SGI EST ID NO. CUFF.53779.0
  misc_feature: Variant of the nucleotide sequence at SEQ ID NO 22863
tttacaagttcttttatattatgaagtagtatatttcataccgagtctttccctagtactctgcagcagtattttgctcttgagccgagattaaataccagagtagtccttgtaaactcaattgattgctgcctgccttgaacaaggggcccttcataaccttaggtatctcttgaccatcgccgacaaccaccttggatgcgtccgttggaagtctgtgaatagcttggattgtggaatatcccatcagctccgatactcacgaatatttccggcctttccgtcactcttagctgcgagacccaggcgcatctactttcccaggcttggcagttcgttccagctaccaacgagacaaggagacatggccgccggtcacgacctgttcaaggcgttaagtcccgccgactatgacgattttgcacagcaagacctgaaggagacgttaacgaatatattcggcgatgctcagtgtctgattgattcaatcccagtcagcgccaagtcagagtcgcaaaagtcgggccggccacgggccgtcacagattcagcggtggattcactacctaacacatcaaccgtgaactccggccagtctgctcagcttagaaaggagtggaaggaggtcaaagtcagtcctaaagataacccaattggactgaatgtgtacaaactcggcgcgaaggatgggagaggagcatggttcgcaagacgaagtgttcacgaagccccaagcttcgacaggtggagggaggggtttgagagggaattcaatgagagcttgaaaatgcatggacacgggcctggtgaggggaaggttcgtggtttagcggctgataaacgtgttgttgatcagactgtagatggttgcggaaagattcaagtgtatcagctttcggcgcagtttcctggccccacgagtcctcgtgacttcatcactatgtgccttagctctgattcttccttagtcgaaggagcaaagcaacgctatttcatgcttgtctcaaaaccgtgcgttcatcctgaatgtccccagcgcacaggtttcatccgtggctattatgagtcggtcgagttcatccgagaaatcaaaatcgacaagcctctgcgaaaagtgcattcaaccactgacatcacggacaagaatgcgccaacatcgttgagcaacgcgcttgacggtactgataataatgatgcggataagaccgaagagagcgaggagtacgacacagccgtcgaatggatgatgatcacgcgaagtgatcccggcggctcagtcccccgatttatgattgagcgcggtacaccaccaggaattgctggtgacgctaataaatttctacagtggatcacatctgagaagttcgagagtcctgacgatacggaaactgcgaatgagacaacttctgacagtatagccgcgtcgcagacgacaagcaacccaccggaaccaacaccaacagcaccaggcatgacagccatagcaaaaagctcaactcccagagatcaagaaatggacgatgtacctggccccagtggctattatggaatgattgctggagctctcggggcagctgcctccattgcagcttcacgattacccagggcattcggctcgacagtaggaggagatactgcatcggaagtgtcttcttcggatatctcagatgacgcttcctctatccacagttttcatagcttggaggatgaaaaagatatcgagacattggaagaagagaaagagctgtccccttctattagcactggaaatgctgcagattctacccattcaaccgaagtcaccaatgccaaaccctcacgacacgaaaaagaactaaagaaactggaagaacgcaaacggaagacagaggaaaagatgcagcggcaacaagagcggtcaatgaaacggaatgatgatggtgctgcactgcagaaactacgtgagaggcacgaacgtgagatcgcgaaacaagaggagagatatgctcgtgatcgagcgaaacttgagacgaggcgaatcaacgaagaaaggaaagctgaagatcgtagacgtaaggcagcagagagaggagaaaaagcaaacttggtcttggaactggagaagacaagaacagaacgcgatatggcccgcttggaggttgagatgctcagagatcaagtcggacaactgcaagctcaaaatacgaggcttactgctcagcttggacgtgcgggtttgagtatcgaggagaacggctcgatgcagcctgggcagcttcgtaaagcagcaactgagcgtgtcgaggatagcaatggtgggaagacaaagacatgaaacgtctttgaagggtaacgaaaagggatggtgacgaattcttgtctcgagcgctgtgttttcccagatgccggcatcgggttgggtgacataaggatacaaaacgttgtatgacaacgaaaaggggcatccagcgatatatacgataccatgactacaaagcagacgcggagttacacattgtctttccagccactattttcataagcccccgttgaacaaatatcatgaagtgtttcgttcacccaagtcgccatgttatcaaagcgccgcaacgtaaataaaagaccgcgtcgtaagagtggtgaatttcataaatcatgtgcccaacgcccttcaaagtctttccgtatgttttacaccaagctcatcatcgtacaagtaacccaaaatacctagttccgaaacataggtaatccaacgaaacttctattgctcgcccttgattatcatccaagcgcccatgaatgaaaaacacccgagcaatgcccaatgaccaaaagcagccttgaaagcctccttcctatctgcctcggcgcccttaccagttaactcctgggaggccctaaagttaaggacagcccagccgtctactcccccggcaattacagaagcgaccaatcctacgccgagagcgcggtcgagcttcagtgccgcgagtccgaagatgccaactgctgatgcaattgtgcctatttcatgttaatgatagccctattcatgatttgagaacgttgaaagggagatatgtcgagtgttgtgcaaatattagaaagaggtagggatctactcacgaccgcctactacacgaatgaacgcgttgctttcagcgctctcgatcgtcgaccgcggagggttctgcagaccgaagaagcctttgataaaagtccctggtttgaagagcgcgagagatccggttgtcaagcctaaagcgcctagagcaactgttgtcgtgcgcgccacaaccattggttccggtagatattgagttaaagatgttgatgccatgttggctagcaaggactcgggcaggttggcgattggtaaatgagaagttgcgatgaagcagggtgtgattgagtatattggctttccggagcgaatctcgagaaattcggctctactgtttatagtgcttttcttgtctcaattcccagccacatgagtccgcgactacctatgagtcaagttatggaatttgaggcgttgttggactatgctacaggcgcaattcactaggaataggatgacagatgatgttggtgctatgccaaatcaagtaacccgcaagtccgcaaaatattctagtctgcggcgtttcaggcaagaattgcgaacggctagtatgcgatcataagtatgattcccttgaaaggaatcgagcttctgttttgagtatcatgtatgccggctgggcaaagtgttcaattagggtccgatgcggatcatcgtgtaggaatcaatatcagaatgaggattaagca

SEQ ID NO: 22866 - DNA, 477 bp, Muscodor strobelii
  misc_feature: SGI cDNA ID NO. 567771
  misc_feature: Encodes the peptide sequence at SEQ ID NO 22867
atggcatcaacatctttaactcaatatctaccggaaccaatggttgtggcgcgcacgacaacagttgctctaggcgctttaggcttgacaaccggatctctcgcgctcttcaaaccagggacttttatcaaaggcttcttcggtctgcagaaccctccgcggtcgacgatcgagagcgctgaaagcaacgcgttcattcgtgtagtaggcggtcgcacaattgcatcagcagttggcatcttcggactcgcggcactgaagctcgaccgcgctctcggcgtaggattggtcgcttctgtaattgccgggggagtagacggctgggctgtccttaactttagggcctcccaggagttaactggtaagggcgccgaggcagataggaaggaggctttcaaggctgcttttggtcattgggcattgctcgggtgtttttcattcatgggcgcttggatgataatcaagggcgagcaatag

SEQ ID NO: 22867 - protein, 158 aa, Muscodor strobelii
  misc_feature: SGI Peptide ID NO. 567771
MASTSLTQYLPEPMVVARTTTVALGALGLTTGSLALFKPGTFIKGFFGLQNPPRSTIESAESNAFIRVVGGRTIASAVGIFGLAALKLDRALGVGLVASVIAGGVDGWAVLNFRASQELTGKGAEADRKEAFKAAFGHWALLGCFSFMGAWMIIKGEQ

SEQ ID NO: 22868 - DNA, 3745 bp, Muscodor strobelii
  misc_feature: SGI EST ID NO. CUFF.53780.1
  misc_feature: Variant of the nucleotide sequence at SEQ ID NO 22866
tgcttaatcctcattctgatattgattcctacacgatgatccgcatcggaccctaattgaacactttgcccagccggcatacatgatactcaaaacagaagctcgattcctttcaagggaatcatacttatgatcgcatactagccgttcgcaattcttgcctgaaacgccgcagactagaatattttgcggacttgcgggttacttgatttggcatagcaccaacatcatctgtcatcctattcctagtgaattgcgcctgtagcatagtccaacaacgcctcaaattccataacttgactcataggtagtcgcggactcatgtggctgggaattgagacaagaaaagcactataaacagtagagccgaatttctcgagattcgctccggaaagccaatatactcaatcacaccctgcttcatcgcaacttctcatttaccaatcgccaacctgcccgagtccttgctagccaacatggcatcaacatctttaactcaatatctaccggaaccaatggttgtggcgcgcacgacaacagttgctctaggcgctttaggcttgacaaccggatctctcgcgctcttcaaaccagggacttttatcaaaggcttcttcggtctgcagaaccctccgcggtcgacgatcgagagcgctgaaagcaacgcgttcattcgtgtagtaggcggtcgcacaattgcatcagcagttggcatcttcggactcgcggcactgaagctcgaccgcgctctcggcgtaggattggtcgcttctgtaattgccgggggagtagacggctgggctgtccttaactttagggcctcccaggagttaactggtaagggcgccgaggcagataggaaggaggctttcaaggctgcttttggtcattgggcattgctcgggtgtttttcattcatgggcgcttggatgataatcaagggcgagcaatagaagtttcgttggattacctatgtttcggaactaggtattttgggttacttgtacgatgatgagcttggtgtaaaacatacggaaagactttgaagggcgttgggcacatgatttatgaaattcaccactcttacgacgcggtcttttatttacgttgcggcgctttgataacatggcgacttgggtgaacgaaacacttcatgatatttgttcaacgggggcttatgaaaatagtggctggaaagacaatgtgtaactccgcgtctgctttgtagtcatggtatcgtatatatcgctggatgccccttttcgttgtcatacaacgttttgtatccttatgtcacccaacccgatgccggcatctgggaaaacacagcgctcgagacaagaattcgtcaccatcccttttcgttacccttcaaagacgtttcatgtctttgtcttcccaccattgctatcctcgacacgctcagttgctgctttacgaagctgcccaggctgcatcgagccgttctcctcgatactcaaacccgcacgtccaagctgagcagtaagcctcgtattttgagcttgcagttgtccgacttgatctctgagcatctcaacctccaagcgggccatatcgcgttctgttcttgtcttctccagttccaagaccaagtttgctttttctcctctctctgctgccttacgtctacgatcttcagctttcctttcttcgttgattcgcctcgtctcaagtttcgctcgatcacgagcatatctctcctcttgtttcgcgatctcacgttcgtgcctctcacgtagtttctgcagtgcagcaccatcatcattccgtttcattgaccgctcttgttgccgctgcatcttttcctctgtcttccgtttgcgttcttccagtttctttagttctttttcgtgtcgtgagggtttggcattggtgacttcggttgaatgggtagaatctgcagcatttccagtgctaatagaaggggacagctctttctcttcttccaatgtctcgatatctttttcatcctccaagctatgaaaactgtggatagaggaagcgtcatctgagatatccgaagaagacacttccgatgcagtatctcctcctactgtcgagccgaatgccctgggtaatcgtgaagctgcaatggaggcagctgccccgagagctccagcaatcattccataatagccactggggccaggtacatcgtccatttcttgatctctgggagttgagctttttgctatggctgtcatgcctggtgctgttggtgttggttccggtgggttgcttgtcgtctgcgacgcggctatactgtcagaagttgtctcattcgcagtttccgtatcgtcaggactctcgaacttctcagatgtgatccactgtagaaatttattagcgtcaccagcaattcctggtggtgtaccgcgctcaatcataaatcgggggactgagccgccgggatcacttcgcgtgatcatcatccattcgacggctgtgtcgtactcctcgctctcttcggtcttatccgcatcattattatcagtaccgtcaagcgcgttgctcaacgatgttggcgcattcttgtccgtgatgtcagtggttgaatgcacttttcgcagaggcttgtcgattttgatttctcggatgaactcgaccgactcataatagccacggatgaaacctgtgcgctggggacattcaggatgaacgcacggttttgagacaagcatgaaatagcgttgctttgctccttcgactaaggaagaatcagagctaaggcacatagtgatgaagtcacgaggactcgtggggccaggaaactgcgccgaaagctgatacactgctcattttgtcagtaaactgttctcgagcaagacggtcaaagttaccttgaatctttccgcaaccatctacagtctgatcaacaacacgtttatcagccgctaaaccacgaaccttcccctcaccaggcccgtgtccatgcattttcaagctctcattgaattccctctcaaacccctccctccacctgtcgaagcttggggcttcgtgaacacttcgtcttgcgaaccatgctcctctcccatccttcgcgccgagtttgtacacattcagtccaattgggttatctttaggactgactttgacctccttccactcctttctaagctgagcagactggccggagttcacggttgatgtgttaggtagtgaatccaccgctgaatctgtgacggcccgtggccggcccgacttttgcgactctgacttggcgctgactgggattgaatcaatcagacactgagcatcgccgaatatattcgttaacgtctccttcaggtcttgctgtgcaaaatcgtcatagtcggcgggacttaacgccttgaacaggtcgtgaccggcggccatgtctccttgtctcgttggtagctggaacgaactgccaagcctgggaaagtagatgcgcctgggtctcgcagctaagagtgacggaaaggccggaaatattcgtgagtatcggagctgatgggatattccacaatccaagctattcacagacttccaacggacgcatccaaggtggttgtcggcgatggtcaagagatacctaaggttatgaagggccccttgttcaaggcaggcagcaatcaattgagtttacaaggactactctggtatttaatctcggctcaagagcaaaatactgctgcagagtactagggaaagactcggtatgaaatatactacttcataatataaaagaacttgtaaa

SEQ ID NO: 22869 - DNA, 930 bp, Muscodor strobelii
  misc_feature: SGI cDNA ID NO. 567772
  misc_feature: Encodes the peptide sequence at SEQ ID NO 22870
atgagggctgccctcctgcccacgcccttactcctactcctccaagcgggaatcgccctcggaaccgtgaagaacgatttttcttcgtacccccagaactcgcagccatgtctgaacgattccgcgaacaaggccggctgcagcgaggccgacacgggcaaggatctcaatcagtgtctatgcaaaaacaacaacaactttgtttatgatgtcgcgggctgcgttgcaaaggatgatccttcagatttgaacgccgtttatgacatgatgcaatcgaattgcgctgggactggagtgactctcagcgtctcgcgggacgccttcctttcggcagcaaatgctgcgacagcaacacagactacctctagcccgagcccaacgagttcaagtcctcctgacgcaagttcagacaatgggcttagcactgcagtcaaaattggtctaggtgttggcattgggtttggagcaattgcgctaggacttctagcatggtttatattcgcctactcgaggcgcaggcgttctgcccgctctttaagaagcgctgccagcccggatgttggcgagcctgaggaatatattgatgctacgggagcaacctatggcatgaatgatcagtctcggcgagagtatgctcatgataacatacaacaagcaactgcggaactcgatccagtagagtggaagccaccggcaggatacgctgctcctgcctactcggctaatgagagcacacatgacaacaaggctagcgaaccactccttgcagagctttcttcgcctatgcctgtcgagttaccaacaaccgaaacccatcatcaacgctattcggatctgtcccccggtcacagagatccaggagtagtctcgccagcaacgcactcgaacgatggcaggacggcctcaccagtgtccacaatgcgggattga

SEQ ID NO: 22870 - protein, 309 aa, Muscodor strobelii
  misc_feature: SGI Peptide ID NO. 567772
  misc_feature (2)..(173): NCBI GI: 85106266 Blast Desc: NCU07275 [Neurospora crassa OR74A] gi|28923725|gb|EAA32893.1| [Neurospora crassa OR74A]
  misc_feature (23)..(113): NCBI GI: 46110727 Blast Desc: FG02245.1 [Gibberella zeae PH-1]
  misc_feature (10)..(112): NCBI GI: 256726636 Blast Desc: NECHADRAFT_99057 [Nectria haematococca mpVI 77-13-4]
  misc_feature (25)..(120): NCBI GI: 145609399 Blast Desc: MGG_07568 [Magnaporthe grisea 70-15] gi|145016771|gb|EDK01201.1| MGG_07568 [Magnaporthe grisea 70-15]
  misc_feature (6)..(114): NCBI GI: 170940189 Blast Desc: protein product [Podospora anserina]
  misc_feature (33)..(236): NCBI GI: 46127445 Blast Desc: FG08100.1 [Gibberella zeae PH-1]
  misc_feature (97)..(189): NCBI GI: 240273634 Blast Desc: conserved [Ajellomyces capsulatus H143]
  misc_feature (30)..(112): NCBI GI: 116195554 Blast Desc: CHGG_04375 [Chaetomium globosum CBS 148.51] gi|88180288|gb|EAQ87756.1| CHGG_04375 [Chaetomium globosum CBS 148.51]
  misc_feature (104)..(189): NCBI GI: 225556522 Blast Desc: conserved [Ajellomyces capsulatus G186AR]
  misc_feature (110)..(182): NCBI GI: 242820122 Blast Desc: TSTA_058290 [Talaromyces stipitatus ATCC 10500] gi|218713916|gb|EED13340.1| TSTA_058290 [Talaromyces stipitatus ATCC 10500]
MRAALLPTPLLLLLQAGIALGTVKNDFSSYPQNSQPCLNDSANKAGCSEADTGKDLNQCLCKNNNNFVYDVAGCVAKDDPSDLNAVYDMMQSNCAGTGVTLSVSRDAFLSAANAATATQTTSSPSPTSSSPPDASSDNGLSTAVKIGLGVGIGFGAIALGLLAWFIFAYSRRRRSARSLRSAASPDVGEPEEYIDATGATYGMNDQSRREYAHDNIQQATAELDPVEWKPPAGYAAPAYSANESTHDNKASEPLLAELSSPMPVELPTTETHHQRYSDLSPGHRDPGVVSPATHSNDGRTASPVSTMRD

SEQ ID NO: 22871 - DNA, 1450 bp, Muscodor strobelii
  misc_feature: SGI EST ID NO. CUFF.53731.0
  misc_feature: Variant of the nucleotide sequence at SEQ ID NO 22869
ggacgagcgcggccgccgctcgactcatggagtctgttgagagacacagccccggatagtcaagattcaatctgacttccgtctaattgcgggtccaatcaacactgatgatgatgatagatcaccatgactactgcccatccctgcatgaaatatacgagtggctaagacctctcgctggtaagacaaagaacgtacttgtatgacacaagcctgagaccagttttccataggatatgtttgctttcccattttgctactgcccagcttgaacacctatcatctacagttagttgaagatgcccaccgcgcgactgtaaagacgacaccaaacccgaacaccctcgatgcacacaaacgaaaatccggataaccgagctcattgaaaacgcccaacgcattcgagagtatatgcagcattacaaaaaacttctagaccaactataactcctagcggtcgacgggaggaaaaatgagggctgccctcctgcccacgcccttactcctactcctccaagcgggaatcgccctcggaaccgtgaagaacgatttttcttcgtacccccagaactcgcagccatgtctgaacgattccgcgaacaaggccggctgcagcgaggccgacacgggcaaggatctcaatcagtgtctatgcaaaaacaacaacaactttgtttatgatgtcgcgggctgcgttgcaaaggatgatccttcagatttgaacgccgtttatgacatgatgcaatcgaattgcgctgggactggagtgactctcagcgtctcgcgggacgccttcctttcggcagcaaatgctgcgacagcaacacagactacctctagcccgagcccaacgagttcaagtcctcctgacgcaagttcagacaatgggcttagcactgcagtcaaaattggtctaggtgttggcattgggtttggagcaattgcgctaggacttctagcatggtttatattcgcctactcgaggcgcaggcgttctgcccgctctttaagaagcgctgccagcccggatgttggcgagcctgaggaatatattgatgctacgggagcaacctatggcatgaatgatcagtctcggcgagagtatgctcatgataacatacaacaagcaactgcggaactcgatccagtagagtggaagccaccggcaggatacgctgctcctgcctactcggctaatgagagcacacatgacaacaaggctagcgaaccactccttgcagagctttcttcgcctatgcctgtcgagttaccaacaaccgaaacccatcatcaacgctattcggatctgtcccccggtcacagagatccaggagtagtctcgccagcaacgcactcgaacgatggcaggacggcctcaccagtgtccacaatgcgggattgatagagttaaacactgcaaaaaaattgtctagtaattttaatgattaag

SEQ ID NO: 22872 - DNA, 912 bp, Muscodor strobelii
  misc_feature: SGI cDNA ID NO. 567773
  misc_feature: Elevated expression when VOC is produced
  misc_feature: Encodes the peptide sequence at SEQ ID NO 22873
atggaagagacactcaagaagccatcaacagccccctcttcagagaaatctggcaaaggtactaatgcagcggaatcctactgcgcgactgtagtcgccaacctcgaaggttggcgtcttccaacgaatcggaaacgcgatgagacgctgcaaatacccatcagtatacagagtcttgacagccgtatccgcgctcttgaagcgctagatgccatcgcttcgccgcctccctgtgaaacggtatcatgggatgggctttcctggagagcggctcggctgcataaacgtatgccggcacgtgagaagacaaggaacatacctcctcacgtagcatgttcactcgacttgctggtcaacacactgagtggcctcggtggtgctgtgccgtctgcagagaaaacagaaatggacgcgacacagacgctgcgtttcgctgcccaaagcttagcccatcttgctggtcagcgcggctacaagatcatcggctcgttcgaactcgagttcaactgtatgcttgcgcttgatctgtcgctggacattgatccactcggagttggtccttatatcgctcctccagttcgcggagaaaatgctcaacgatattacggccctggtcgtgtacaggctgcacccatagtcatcaaagagactaagccatgttgtggatgctgtgactgctattgtcacgatgcggccattcggaccccgctgccacgtagggcgagaagtcgcagtcgatcttctagatggatttcaccaagacgacgacgtggacgtggagagaagtctggcggattttggtcgaaattggcgttctggcgccgtggcaagaacaacagagacgactacgattctgatgactctcgctcggtgcttacaaggacagagtcaaccttgtctgttggtgtctaa

SEQ ID NO: 22873 - protein, 303 aa, Muscodor strobelii
  misc_feature: SGI Peptide ID NO. 567773
  misc_feature: Useful for introducing or modulating the production of volatile compounds
MEETLKKPSTAPSSEKSGKGTNAAESYCATVVANLEGWRLPTNRKRDETLQIPISIQSLDSRIRALEALDAIASPPPCETVSWDGLSWRAARLHKRMPAREKTRNIPPHVACSLDLLVNTLSGLGGAVPSAEKTEMDATQTLRFAAQSLAHLAGQRGYKIIGSFELEFNCMLALDLSLDIDPLGVGPYIAPPVRGENAQRYYGPGRVQAAPIVIKETKPCCGCCDCYCHDAAIRTPLPRRARSRSRSSRWISPRRRRGRGEKSGGFWSKLAFWRRGKNNRDDYDSDDSRSVLTRTESTLSVGV

SEQ ID NO: 22874 - DNA, 1450 bp, Muscodor strobelii
  misc_feature: SGI EST ID NO. CUFF.53744.0
  misc_feature: Variant of the nucleotide sequence at SEQ ID NO 22872
ttggcctaggaccacttaggtgcctgctctagcttgcctggcaggcattgttggaagatagtcaagacaatggggggaagtgtatttattacaccacccagcgtcctagacataccgttgcccggtgaagaaatcttctcatcaatcaaccgtcaggcacgcgatccgaataaaaacaatcaatggcataagcatcctacacacttgccgaccgcctcatagcccattatcatggaagagacactcaagaagccatcaacagccccctcttcagagaaatctggcaaaggtactaatgcagcggaatcctactgcgcgactgtagtcgccaacctcgaaggttggcgtcttccaacgaatcggaaacgcgatgagacgctgcaaatacccatcagtatacagagtcttgacagccgtatccgcgctcttgaagcgctagatgccatcgcttcgccgcctccctgtgaaacggtatcatgggatgggctttcctggagagcggctcggctgcataaacgtatgccggcacgtgagaagacaaggaacatacctcctcacgtagcatgttcactcgacttgctggtcaacacactgagtggcctcggtggtgctgtgccgtctgcagagaaaacagaaatggacgcgacacagacgctgcgtttcgctgcccaaagcttagcccatcttgctggtcagcgcggctacaagatcatcggctcgttcgaactcgagttcaactgtatgcttgcgcttgatctgtcgctggacattgatccactcggagttggtccttatatcgctcctccagttcgcggagaaaatgctcaacgatattacggccctggtcgtgtacaggctgcacccatagtcatcaaagagactaagccatgttgtggatgctgtgactgctattgtcacgatgcggccattcggaccccgctgccacgtagggcgagaagtcgcagtcgatcttctagatggatttcaccaagacgacgacgtggacgtggagagaagtctggcggattttggtcgaaattggcgttctggcgccgtggcaagaacaacagagacgactacgattctgatgactctcgctcggtgcttacaaggacagagtcaaccttgtctgttggtgtctaagaagtttctctgtattgtctcatatgtcgcagaacaagtttgtaacgagaaaacagatatgatgaagttacgttttatgtacttatgctctagtctagctttggctttgctagttatacgttaggattgcgttgttgtcatcggaaagttatgggtttcttatgtgatctagggctgggcaggttgaaacacatacttccaatgcaagtcatgctccaagtctttagtatcagaagtcgtcttccgtacatgatataagtcaaattgaaaaggacttcgttttatattcagcttgacaggagctctg

SEQ ID NO: 22875 - DNA, 4464 bp, Muscodor strobelii
  misc_feature: SGI cDNA ID NO. 567774
  misc_feature: Reduced expression when VOC is produced
  misc_feature: Encodes the peptide sequence at SEQ ID NO 22876
atggatgcgcagaatggtgctgagtcctccagcacgaagcatcctgcttccccccaggggggagacgacacctccaagtccaagcccgccgctgtcaattctctcacatctccttccgccaagtctccgtcgctagccagagacccccgaccagcacatacgactgcctcatcgaatgcgctcgatgaggacgccgcgcccgaccagagctccgacgccgagaccattgtcttacccgggaaggatggcatctcgccgtccaaaccccgcaaggtcatcaaacatgaagataagagtgatgaggacatgactcacgtgccacagcccaggaaacccctgaaggacccgagagatgcggaccgtaacggcgggcatactgatgatgcggcggcgtcttcgatcgcaaagaagaagcgcacgatcgagactgatagagcgcgagccaaagacagttctggaggtcttagttctgcacccgcctcgccgcctcatcgtcccattagtcgcgagccctctcacaggcgccgtagatccggcgatatccactccgactccgaatccgaatcttccagatcccgatcacacaagccctctcataagaacaggctccacccacctgacaggcttcttccaagcaaacggaaggctgtgaagagggagtccgacgatgaaggggatatgcgtagagcccgacgaccgcgaatcttggaaggtaatatcgatgtctcctccgagacccgtgatcgagaccagagattggagtcaagaaggcagcccgacaagtcatccgcccgcaatcgatctgcgtcaccagctgcccgcacgcatcgccgcagcctatcgacacagcttccttcccaatcgtccaatggtctcggtcaaaagaagcgacggattcccgcaccactcgccacggactaccaatccgacgactcctcggcaagcggcagtccacatcctcgaggatcgaaattgaggactctggctactcccattactggagattcaaccatttcccctgccaagctaccagggcacaagaaacgtgtggataatcacggccaaacgatgttcgccaaagcatgtgcgaaaggcgaatatgaaagtgcaaaagcgcgactttccgaaaggccggatgatttgaattttgcggattatgcaggaaacacgccgcttcaggtcgccgcattaaatggccatgaagacattgtccaactcttaattgaggcagggtgtgacctagaatgccgcaacagtgacaaggaaacgcccctactcgacgctgtagaaaatggccacttggctgttgtcagacttctactaaaggctggtgtcaaccctcgccgggccgatgccgaaggacacgaaccactcgagaaggttccagacgatgttgacaacgctgaagaaattcgtgctgccctgcgcgaggcaaaggagcgtgtgggtgagctgcgtcgaacttctgaagaccatcagcctcacgatgcacatgaaacttcatcccatgggcccgatagcccacgtcgctcccctgctgctccctacaacagcattcttgccgaaaaacggcgtggtgggaccgtccggtcggcaaaaacgagcaaccacctactatacgtcaacctcgacgataaaacactcaggcaagccgctgcacgtggagacaatgagactgttacgcgcgtcttacaagtcaaggagcagtgtgatgaccccgagtctttggtgaacgcagcacgaggaggacacaacttggttgtcgaactccttctggctctgggtggcgcaaatcctgaccccgaaccggtctcaacccttccaaaggactatggaactccgatgcttgcagccatcgggcaagagaatatcgaagtggtcaagttacttctcaatgctaatggttttgatccaacacgtcggtataaaggacagacatattatgagattgcgcgacgcagggaaggtccaaattggaaagaagaggagcatattctcaaagacgcatttgatcatcataagaggggggccaaaggctcctttaaagtcaagtcgtctcccagacgcgggcgggatgttgacactgacccaaagcgaattgctcgtaatgaatctagcccagacgtgtcgcggtcgcagaaacgccgttcctccgcgactccccctcgcgatatggatgctaaaagaaagcagagtctcaacaagcctgtcaggagcccccgagaaaagcgacgttcactgtcttttggaacgcatgatgaacaaacttcacctaaacgtggaccgggcagacctaaaaaggacgagcggctcccaaatcacgtgtcttcagaccgagaaccgtcgccatcacgctcaaaactccctacgaaaccaaaattaattgaaccagagactgcaggatcttctgatggtgaagccattaaacctcgtcggaaactcatctcggggaaggatctaaagggccaacgcgaaaagcaacgtcgggcaagcatggcttctaatatctcgggtcttgagcgcagcgattctaaagccgatgaaccaactgaaaagtctcgggctgaccgtatttctgcaaagcatcatgatcggacaaaagcattgaagcgcgaagagtcaaatgatcgccatgcaaacgatacatctagcaagagacaccggccaagtgtaagcccctcccgtcttggctccggagacaaagaagatggcatagcatccgcgaagaggaggaagctagatggcgacaataaacaaaaacgtcttttggagccccgttcgcccgaaagtcgtcactcaaaaagagatccttcgcgtgactcgaacaaacgtgtacgaactgccgagaatgaacgaaaggatacgacaaaggctcaaaaagctagtcgtgatcgccgagagtcagacaagtcagcagtgtctgataagagcatcgttgtggcctccgaagagccagacattgagatgcatgacgtggccagcgcatatcctgaagaaggcgagatccaagcagagtctgacagagaagagaagtctcggaaaagacaaccagatcattcacactctgcgagtgaagataccaagaaggagaaagccaaggaggcggaacgtgagttccaagagcagcagaaaaagaaacaagaagaggaattgaaacgcaaggagcaagaggcggagcgaaaacgactggaggccgaggaacgcagccgcctcgaacgcgaggaggtgaagcggaaagaagcggccgagaaagctcgcttggaagaagagcaaaggcaaaaagaggaacaagagcgcaagattcgagaggaagaggaacgcaaagagcgtgaagaagtagagcggaagaagcgcgaggaagaggaacgggttcgtcgtgagaaagaagcagccgaagaagctcgtcgcattcgggaagaagaggaacgcaaagaaatggaacgtaagcgggccgaacgagctgcccgtgaagctgagcttgagcgagcgcgtcaactggaattggaacggattcgtgtctcaaagctaccccctctcttgagatggctcaatgtctgcccagatcctcaacagaaagagttcgcaaagctattctcgaaagtccaaggcgtacggtatgacacaattgatccctctgcaaccggcaaacctggaggacgcgagcaatggcttcttaatacccaagttgctctcctgctgggggataaggatctctcgttatctcgatatgctggttggacgcggatacctgtccctgacattgccaaacaagccatgtggcggttggagcaggatcgatactctttgacagacagcaagctctaccctctaggcgaacaactgggtgacctctacggcggcaatcctcgctccatgggttacagacaactagagcaaatacgtggcgacgcaagcaagcgctttttcgaaacagagctgttcttcgtaaaagaatctgatttcctccacatcgttcccacgatacctcatctatgcgacgttcgagttgctatctgctaccgcgaaattccagaaaacggctcctttactgccctacccaaatggcggcaagaccaagatggtgcatctttcgctccaaggaataaatactatatcaacggacaaatcgctggtgaagagacgccacgaaaatatgtcgccagtatcgagcctgccatccgagatcatcgcgtcccccggcgatatggccttgtcgctgtgactcctgacgaacctgattatgcccgactttgtatcgaacaaaatcttgcacacctgttgactgaacaacagaaacagtctgtactaaatggatctcatcttacgcctaagagcatggtgtcagactttacaggcgatcactcatcaccttctagcgtatcgccgcgcactcatcttgtgaacggagttgtcaccaatggagaactactggacaggctgcctaacggaatccatgaaacatga

SEQ ID NO: 22876 - protein, 1487 aa, Muscodor strobelii
  misc_feature: SGI Peptide ID NO. 567774
  misc_feature (387)..(419): Pfam Id: PF00023 Pfam Desc: Ankyrin repeat
  misc_feature (420)..(452): Pfam Id: PF00023 Pfam Desc: Ankyrin repeat
  misc_feature (1)..(1419): NCBI GI: 261360234 Blast Desc: ankyrin repeat protein [Verticillium albo-atrum VaMs.102]
  misc_feature (1)..(1118): NCBI GI: 46125725 Blast Desc: FG07240.1 [Gibberella zeae PH-1]
  misc_feature (1)..(1004): NCBI GI: 256733244 Blast Desc: NECHADRAFT_92915 [Nectria haematococca mpVI 77-13-4]
  misc_feature (1)..(992): NCBI GI: 171685736 Blast Desc: protein product [Podospora anserina] gi|170942829|emb|CAP68482.1| protein product [Podospora anserina]
  misc_feature (1)..(997): NCBI GI: 39941632 Blast Desc: MGG_05727 [Magnaporthe grisea 70-15] gi|145022429|gb|EDK06449.1| MGG_05727 [Magnaporthe grisea 70-15]
  misc_feature (1)..(1064): NCBI GI: 164429056 Blast Desc: NCU00388 [Neurospora crassa OR74A] gi|157072391|gb|EAA28038.2| conserved [Neurospora crassa OR74A]
  misc_feature (1)..(763): NCBI GI: 116207204 Blast Desc: CHGG_02895 [Chaetomium globosum CBS 148.51] gi|88183492|gb|EAQ90960.1| CHGG_02895 [Chaetomium globosum CBS 148.51]
  misc_feature (63)..(1377): NCBI GI: 156051130 Blast Desc: SS1G_06972 [Sclerotinia sclerotiorum 1980] gi|154704750|gb|EDO04489.1| SS1G_06972 [Sclerotinia sclerotiorum 1980]
  misc_feature (71)..(1386): NCBI GI: 212527908 Blast Desc: histone deacetylase complex subunit (Hos4), [Penicillium marneffei ATCC 18224] gi|210073509|gb|EEA27596.1| histone deacetylase complex subunit (Hos4), [Penicillium ATCC
  misc_feature (62)..(1354): NCBI GI: 115389508 Blast Desc: conserved [Aspergillus terreus NIH2624] gi|114194655|gb|EAU36355.1| conserved [Aspergillus terreus NIH2624]
  misc_feature: Useful for introducing or modulating the production of volatile compounds
MDAQNGAESSSTKHPASPQGGDDTSKSKPAAVNSLTSPSAKSPSLARDPRPAHTTASSNALDEDAAPDQSSDAETIVLPGKDGISPSKPRKVIKHEDKSDEDMTHVPQPRKPLKDPRDADRNGGHTDDAAASSIAKKKRTIETDRARAKDSSGGLSSAPASPPHRPISREPSHRRRRSGDIHSDSESESSRSRSHKPSHKNRLHPPDRLLPSKRKAVKRESDDEGDMRRARRPRILEGNIDVSSETRDRDQRLESRRQPDKSSARNRSASPAARTHRRSLSTQLPSQSSNGLGQKKRRIPAPLATDYQSDDSSASGSPHPRGSKLRTLATPITGDSTISPAKLPGHKKRVDNHGQTMFAKACAKGEYESAKARLSERPDDLNFADYAGNTPLQVAALNGHEDIVQLLIEAGCDLECRNSDKETPLLDAVENGHLAVVRLLLKAGVNPRRADAEGHEPLEKVPDDVDNAEEIRAALREAKERVGELRRTSEDHQPHDAHETSSHGPDSPRRSPAAPYNSILAEKRRGGTVRSAKTSNHLLYVNLDDKTLRQAAARGDNETVTRVLQVKEQCDDPESLVNAARGGHNLVVELLLALGGANPDPEPVSTLPKDYGTPMLAAIGQENIEVVKLLLNANGFDPTRRYKGQTYYEIARRREGPNWKEEEHILKDAFDHHKRGAKGSFKVKSSPRRGRDVDTDPKRIARNESSPDVSRSQKRRSSATPPRDMDAKRKQSLNKPVRSPREKRRSLSFGTHDEQTSPKRGPGRPKKDERLPNHVSSDREPSPSRSKLPTKPKLIEPETAGSSDGEAIKPRRKLISGKDLKGQREKQRRASMASNISGLERSDSKADEPTEKSRADRISAKHHDRTKALKREESNDRHANDTSSKRHRPSVSPSRLGSGDKEDGIASAKRRKLDGDNKQKRLLEPRSPESRHSKRDPSRDSNKRVRTAENERKDTTKAQKASRDRRESDKSAVSDKSIVVASEEPDIEMHDVASAYPEEGEIQAESDREEKSRKRQPDHSHSASEDTKKEKAKEAEREFQEQQKKKQEEELKRKEQEAERKRLEAEERSRLEREEVKRKEAAEKARLEEEQRQKEEQERKIREEEERKEREEVERKKREEEERVRREKEAAEEARRIREEEERKEMERKRAERAAREAELERARQLELERIRVSKLPPLLRWLNVCPDPQQKEFAKLFSKVQGVRYDTIDPSATGKPGGREQWLLNTQVALLLGDKDLSLSRYAGWTRIPVPDIAKQAMWRLEQDRYSLTDSKLYPLGEQLGDLYGGNPRSMGYRQLEQIRGDASKRFFETELFFVKESDFLHIVPTIPHLCDVRVAICYREIPENGSFTALPKWRQDQDGASFAPRNKYYINGQIAGEETPRKYVASIEPAIRDHRVPRRYGLVAVTPDEPDYARLCIEQNLAHLLTEQQKQSVLNGSHLTPKSMVSDFTGDHSSPSSVSPRTHLVNGVVTNGELLDRLPNGIHET

SEQ ID NO: 22877 - DNA, 6857 bp, Muscodor strobelii
  misc_feature: SGI EST ID NO. CUFF.54100.0
  misc_feature: Variant of the nucleotide sequence at SEQ ID NO 22875
tcttctctcatttctgcggcttgcttgacgagccagactggcagactttccaacgtgcccgtcttgcccatttcgctcatattttccttgaccttcatcttgccgaattcttctccttagcagcatgtagttgggcattggatgtgcatgggtctccgttagatgcgagacaggcatgtgcctccagccttgaccagtcgaaacaacagactgctcaattttgtgttatctacccatgtccaggactgctactgcaatatggccctgcagacccgggcgtactcgcactggaggttccaagtggcattacatatgtcaggtcagtctacctgccgcctggctcgatggctcgatggctctcgctcgctcggctgcctccccgcgtatctggacagcttgggtttgcattgtacatgcaatgagtagcagtctgcggttcgtggaggtgatatctgtgcaacagctgcgctgcaaagggccaggctcaacacgagtctgaccaggtcttggacgatcagctccgtctctaaacgatgcgccccgtatcagtcgactttgggtacattaccaccgagcagccgcatcctgctgataatgatagtatgtgtctattatgcactaaaagtagctccttgtaccactgtgtcgcctctgctggctgcttgctgcgtctctcacccgtcttcgccttccacctctgaccttgaccttggccgcctcttgcctccgctgcccacctagtgtctgtcgttcctgctacctgtgacttctgcgcccgcccaccgctgcttgcctgtaacttcctctagcaccagcatcggcaacccgtttcttttttcggtacacttgccatcctctcactcttctctctcccactcgaccgtgcagccccccttcgaatacctttacgagtaaatccgacaccgaccttcgactgtttgtctttagtcgtcactaccacatggaaacatacctcactttatgaattacgacacccatacagtatattcgtgcatttgcagggcctgcaactaactctacaaacaagctcgaactcccattcttgactcgctgtctcgggagtcacttccaactgccgtcttccatctgttcgcctcgccgcactcaccacgctcacaacttacaggcacgtctgtctctgctttgcaaccgtctcgtcttgacagctctcgtcacttgttcaaccggccatcaatcgagagtcttcttacgcggctcctggctgtagattctcatagactggccaccatggtgtactacatgcgagatcctgacaattgaattgtatgctatggatgcgcagaatggtgctgagtcctccagcacgaagcatcctgcttccccccaggggggagacgacacctccaagtccaagcccgccgctgtcaattctctcacatctccttccgccaagtctccgtcgctagccagagacccccgaccagcacatacgactgcctcatcgaatgcgctcgatgaggacgccgcgcccgaccagagctccgacgccgagaccattgtcttacccgggaaggatggcatctcgccgtccaaaccccgcaaggtcatcaaacatgaagataagagtgatgaggacatgactcacgtgccacagcccaggaaacccctgaaggacccgagagatgcggaccgtaacggcgggcatactgatgatgcggcggcgtcttcgatcgcaaagaagaagcgcacgatcgagactgatagagcgcgagccaaagacagttctggaggtcttagttctgcacccgcctcgccgcctcatcgtcccattagtcgcgagccctctcacaggcgccgtagatccggcgatatccactccgactccgaatccgaatcttccagatcccgatcacacaagccctctcataagaacaggctccacccacctgacaggcttcttccaagcaaacggaaggctgtgaagagggagtccgacgatgaaggggatatgcgtagagcccgacgaccgcgaatcttggaaggtaatatcgatgtctcctccgagacccgtgatcgagaccagagattggagtcaagaaggcagcccgacaagtcatccgcccgcaatcgatctgcgtcaccagctgcccgcacgcatcgccgcagcctatcgacacagcttccttcccaatcgtccaatggtctcggtcaaaagaagcgacggattcccgcaccactcgccacggactaccaatccgacgactcctcggcaagcggcagtccacatcctcgaggatcgaaattgaggactctggctactcccattactggagattcaaccatttcccctgccaagctaccagggcacaagaaacgtgtggataatcacggccaaacgatgttcgccaaagcatgtgcgaaaggcgaatatgaaagtgcaaaagcgcgactttccgaaaggccggatgatttgaattttgcggattatgcaggaaacacgccgcttcaggtcgccgcattaaatggccatgaagacattgtccaactcttaattgaggcagggtgtgacctagaatgccgcaacagtgacaaggaaacgcccctactcgacgctgtagaaaatggccacttggctgttgtcagacttctactaaaggctggtgtcaaccctcgccgggccgatgccgaaggacacgaaccactcgagaaggttccagacgatgttgacaacgctgaagaaattcgtgctgccctgcgcgaggcaaaggagcgtgtgggtgagctgcgtcgaacttctgaagaccatcagcctcacgatgcacatgaaacttcatcccatgggcccgatagcccacgtcgctcccctgctgctccctacaacagcattcttgccgaaaaacggcgtggtgggaccgtccggtcggcaaaaacgagcaaccacctactatacgtcaacctcgacgataaaacactcaggcaagccgctgcacgtggagacaatgagactgttacgcgcgtcttacaagtcaaggagcagtgtgatgaccccgagtctttggtgaacgcagcacgaggaggacacaacttggttgtcgaactccttctggctctgggtggcgcaaatcctgaccccgaaccggtctcaacccttccaaaggactatggaactccgatgcttgcagccatcgggcaagagaatatcgaagtggtcaagttacttctcaatgctaatggttttgatccaacacgtcggtataaaggacagacatattatgagattgcgcgacgcagggaaggtccaaattggaaagaagaggagcatattctcaaagacgcatttgatcatcataagaggggggccaaaggctcctttaaagtcaagtcgtctcccagacgcgggcgggatgttgacactgacccaaagcgaattgctcgtaatgaatctagcccagacgtgtcgcggtcgcagaaacgccgttcctccgcgactccccctcgcgatatggatgctaaaagaaagcagagtctcaacaagcctgtcaggagcccccgagaaaagcgacgttcactgtcttttggaacgcatgatgaacaaacttcacctaaacgtggaccgggcagacctaaaaaggacgagcggctcccaaatcacgtgtcttcagaccgagaaccgtcgccatcacgctcaaaactccctacgaaaccaaaattaattgaaccagagactgcaggatcttctgatggtgaagccattaaacctcgtcggaaactcatctcggggaaggatctaaagggccaacgcgaaaagcaacgtcgggcaagcatggcttctaatatctcgggtcttgagcgcagcgattctaaagccgatgaaccaactgaaaagtctcgggctgaccgtatttctgcaaagcatcatgatcggacaaaagcattgaagcgcgaagagtcaaatgatcgccatgcaaacgatacatctagcaagagacaccggccaagtgtaagcccctcccgtcttggctccggagacaaagaagatggcatagcatccgcgaagaggaggaagctagatggcgacaataaacaaaaacgtcttttggagccccgttcgcccgaaagtcgtcactcaaaaagagatccttcgcgtgactcgaacaaacgtgtacgaactgccgagaatgaacgaaaggatacgacaaaggctcaaaaagctagtcgtgatcgccgagagtcagacaagtcagcagtgtctgataagagcatcgttgtggcctccgaagagccagacattgagatgcatgacgtggccagcgcatatcctgaagaaggcgagatccaagcagagtctgacagagaagagaagtctcggaaaagacaaccagatcattcacactctgcgagtgaagataccaagaaggagaaagccaaggaggcggaacgtgagttccaagagcagcagaaaaagaaacaagaagaggaattgaaacgcaaggagcaagaggcggagcgaaaacgactggaggccgaggaacgcagccgcctcgaacgcgaggaggtgaagcggaaagaagcggccgagaaagctcgcttggaagaagagcaaaggcaaaaagaggaacaagagcgcaagattcgagaggaagaggaacgcaaagagcgtgaagaagtagagcggaagaagcgcgaggaagaggaacgggttcgtcgtgagaaagaagcagccgaagaagctcgtcgcattcgggaagaagaggaacgcaaagaaatggaacgtaagcgggccgaacgagctgcccgtgaagctgagcttgagcgagcgcgtcaactggaattggaacggattcgtgtctcaaagctaccccctctcttgagatggctcaatgtctgcccagatcctcaacagaaagagttcgcaaagctattctcgaaagtccaaggcgtacggtatgacacaattgatccctctgcaaccggcaaacctggaggacgcgagcaatggcttcttaatacccaagttgctctcctgctgggggataaggatctctcgttatctcgatgttagtcatatcttgcaccctaaatttgaagatgaccacaccctaacgacttgtagatgctggttggacgcggatacctgtccctgacattgccaaacaagccatgtggcggttggagcaggatcgatactctttgacagacagcaagctctaccctctaggcgaacaactgggtgacctctacggcggcaatcctcgctccatgggttacagacaactagagcaaatacgtggcgacgcaagcaagcgctttttcgaaacagagctgttcttcgtaaaagaatctgatttcctccacatcgttcccacgatacctcatctatgcgacgttcgagttgctatctgctaccgcgaaattccagaaaacggctcctttactgccctacccaaatggcggcaagaccaagatggtgcatctttcgctccaaggaataaatactatatcaacggacaaatcgctggtgaagagacgccacgaaaatatgtcgccagtatcgagcctgccatccgagatcatcgcgtcccccggcgatatggccttgtcgctgtgactcctgacgaacctgattatgcccgactttgtatcgaacaaaatcttgcacacctgttgactgaacaacagaaacagtctgtactaaatggatctcatcttacgcctaagagcatggtgtcagactttacaggcgatcactcatcaccttctagcgtatcgccgcgcactcatcttgtgaacggagttgtcaccaatggagaactactggacaggctgcctaacggaatccatgaaacatgagacgaaattcgattagccatgcatcacgattccacgttcacaaacgccgaccgccaactggtcctcacccaattcatgatcccttttctgtgtatgataccccgaacttgactgcagatttactgcaccacattgagaaatttgattgcagccttgccgtatgtgatagtgctttgttgtcacgggatctcggcttcaaagtatctaatgctacggcattgctttctggagtttcttgacccggattggctgtgggtcaagaaagagacgagcagtatccacaccttggatgattgctctcaggttgcgtcgggtattctgatatcggtggcgcgtctgttcatgcgtcgtatgtctagcctagatcagttgttcggagccgtctatggcttccagctatgtcagataccgaatgaaagtatatactccattcgtaaagcatgtatcgcggtacgcggtcgatgtgcatgtatatgattgtcacttgtgacgcagctgtatgtgactagcaagacaaatatcacctattggtagaggcttcgtctcggtccctggcacagcatgatcgaaagtcgcgaatgattagtcgtatcacaagtcagcatctgcattagacccatacgaagccacatatccagtcaataccgctaactagcgtactggtatcaggtatgatggtaggtgaggcaacctggacgtcgaaatcaagaaccatgtcacaccattaaatgcagtctgccgcctcaggtttcctgtcccaggcagcagagacagggtcgcattggaaatgcaataaataacgggagggtgactgtgagccaaggatttagaacattgcggctgtgtgcgcccctcacaatctgcaaggtagagagaatgccttggttgccttagcagactctagtcgtccgaataggtagttatccaaacggtcgtccaaataaccgttcgaacaactgcgcgaatgactctgtgaacaactattggaatagtttatataaacattgttgggatgttagtccgga

SEQ ID NO: 22878 - DNA, 765 bp, Muscodor strobelii
  misc_feature: SGI cDNA ID NO. 567775
  misc_feature: Encodes the peptide sequence at SEQ ID NO 22879
atgtctaccgctacgcacgtgcaactgcctgcagatctaaatgatgcgcgccttgtctcgctaccatcggctgcattctatatcccggatttcatcaccgaggatgaagagcgacatattttagacaaaatagcgtccgcgccaaagcctaggtggaagcaattgacacgacggcgtctacagacatggccatcagatctcgtgaagaacagactcgttgaggcagctcttcctccttggctagacgatcccattgtgccccggttgcaatcccttcatacaggctccgacacgggatcgactgccaatgtattcgccaacagcccccatcttcgaccaaaccatgtgttgatcaatgaatatcccccaggtgttggaatcatgccacacaaagacggttctgcttaccatcccatcgtatgtaccgtgagcctaggtgctagtatatgcctgaatattcatgagatgaagaaagatggcacattagaaaaagctcctagctggaggattttgcaagagccaagaagtcttctcatcactaccgcagatctctacaccgactatcttcatggtatttctgacatagaagaagacgtcgagctttgcgatacgacaattgctaactggtccttactcggatcaccggaaagattcgaaagtggccgaaacccacgccaactacggactagtttgacctatcgagatgtgataagcgttaccaagctgggaaccaaattcggcctcttcaaccacaggaaatcatga

SEQ ID NO: 22879 - protein, 254 aa, Muscodor strobelii
  misc_feature: SGI Peptide ID NO. 567775
  misc_feature (7)..(252): NCBI GI: 156051132 Blast Desc: SS1G_06973 [Sclerotinia sclerotiorum 1980] gi|154704751|gb|EDO04490.1| SS1G_06973 [Sclerotinia sclerotiorum 1980]
  misc_feature (2)..(247): NCBI GI: 171685734 Blast Desc: protein product [Podospora anserina] gi|170942828|emb|CAP68481.1| protein product [Podospora anserina]
  misc_feature (9)..(252): NCBI GI: 256732794 Blast Desc: NECHADRAFT_100201 [Nectria haematococca mpVI 77-13-4]
  misc_feature (7)..(252): NCBI GI: 240108080 Blast Desc: CPC735_004250 [Coccidioides posadasii C735 delta SOWgp]
  misc_feature (13)..(253): NCBI GI: 242785186 Blast Desc: conserved [Talaromyces stipitatus ATCC 10500] gi|218720690|gb|EED20109.1| conserved [Talaromyces stipitatus ATCC 10500]
  misc_feature (13)..(252): NCBI GI: 212527904 Blast Desc: conserved [Penicillium marneffei ATCC 18224] gi|210073507|gb|EEA27594.1| conserved [Penicillium marneffei ATCC 18224]
  misc_feature (13)..(252): NCBI GI: 261197427 Blast Desc: Alkbh6 protein [Ajellomyces dermatitidis SLH14081] gi|239595746|gb|EEQ78327.1| Alkbh6 protein [Ajellomyces dermatitidis SLH14081]
  misc_feature (13)..(252): NCBI GI: 239606740 Blast Desc: Alkbh6 protein [Ajellomyces dermatitidis ER-3]
  misc_feature (3)..(252): NCBI GI: 226289797 Blast Desc: calpain [Paracoccidioides brasiliensis Pb18]
  misc_feature (3)..(252): NCBI GI: 225682400 Blast Desc: calpain [Paracoccidioides brasiliensis Pb03]
MSTATHVQLPADLNDARLVSLPSAAFYIPDFITEDEERHILDKIASAPKPRWKQLTRRRLQTWPSDLVKNRLVEAALPPWLDDPIVPRLQSLHTGSDTGSTANVFANSPHLRPNHVLINEYPPGVGIMPHKDGSAYHPIVCTVSLGASICLNIHEMKKDGTLEKAPSWRILQEPRSLLITTADLYTDYLHGISDIEEDVELCDTTIANWSLLGSPERFESGRNPRQLRTSLTYRDVISVTKLGTKFGLFNHRKS

SEQ ID NO: 22880 - DNA, 2784 bp, Muscodor strobelii
  misc_feature: SGI EST ID NO. CUFF.53763.1
  misc_feature: Variant of the nucleotide sequence at SEQ ID NO 22878
gcgaaagcgggttctgggtgggcatcggcttgggcttctgtgcgtgtgcatcgtccgagtgggctgatggtgcagtgatgcagtggtgctgctgttgctgcaaaattgcacttcccgcgcccccctttctcgtctctatcccagtgatccgtctaggtctccatcattgtgtgcttgtttgtgtctgagcagaccttgtcgcaagtctggctgccttcttgatgtaatctcttccttaccccccttgttggccccttgaactttgcagaacgcgagtgtggtcgcggaaaagtcctgccacagtgcaagttgaaatgagcagatttggagtgattcgccttgccccctcactcatcacaccaccaactcctcttgccatcaacatctccatccgcgtcgatctgccattccacccactttcctgcgcctatctgcttacactttctcccacgccttcgcctcattaatatttaggctgctagccatcgttattcatcgccaatgttgtgtagcattttgcagactcgctacagcatctagatttgctgatctagtccgacacggtggaataggggctataaaaagcgcaacgaggcgtcgcaggaacgatcgtccagcttgctatgaaaattcgattaccctttctgcccccaccctgcccctctgctgtcgagtgtgtcatcttatctactcaccgcattaaggacttgtcgtgtcaccatcacaacagcaaataccaagtcgacgaccacagtctcctcccctttctcgctttcctctctcgaatctctttggcagtcgagcggtggtgacaattccggatgacggcgtgaacacacctacccatcatgtctaccgctacgcacgtgcaactgcctgcagatctaaatgatgcgcgccttgtctcgctaccatcggctgcattctatatcccggatttcatcaccgaggatgaagagcgacatattttagacaaaatagcgtccgcgccaaagcctaggtggaagcaattgacacgacggcgtctacagacatggccatcagatctcgtgaagaacagactcgttgaggcagctcttcctccttggctagacgatcccattgtgccccggttgcaatcccttcatacaggctccgacacgggatcgactgccaatgtattcgccaacagcccccatcttcgaccaaaccatgtgttgatcaatgaatatcccccaggtgttggaatcatgccacacaaagacggttctgcttaccatcccatcgtatgtaccgtgagcctaggtgctagtatatgcctgaatattcatgagatgaagaaagatggcacattagaaaaagctcctagctggaggattttgcaagagccaagaagtcttctcatcactaccgcagatctctacaccgactatcttcatggtatttctgacatagaagaagacgtcgagctttgcgatacgacaattgctaactggtccttactcggatcaccggaaagattcgaaagtggccgaaacccacgccaactacggactagtttgacctatcgagatgtgataagcgttaccaagctgggaaccaaattcggcctcttcaaccacaggaaatcatgacgtgctgagcgctatgctcaaaatatgaatggtatcattttccacttttgccgtgcttcgttgccgaatttttcgatataccactgtcttgtgccgttggctgtgacgccaaggttgactgcagtaaatagcagagcacaagctaacgtctggttataccaccgaccctcgggacttgcgacaattgtcaagcacaggtaaagcaggcattcacaggtgtaatgtgggcacacaaggtaccgaaagagcccatcactcgggagtgaatatttcttgaggccagccagatgtcgatgacaccagaactgcgcataccatgcgcataagaatactgacgttgcagtcgttgttctcagtgacaggtgtctactaaattgcagagttcgagcagagtctcttatcgaccctatgtcatagttaacgtcgtgtcggatgtttcaggggtatttgcaacctactgcatccctcaacccaaacggccacgctcgtgcataagtagaaagcattaccaaggagccagtgaacaatccacatactggatgacgacggccgcattaccgccaagtattcatataagcgtcttgcaccttgcagactcatcagaaaccatgcaagctgaacttgctcgatggtcatggaagaggagggccgagatgtctgagtcttggtgatgatctcaaggagtgtcccgcgcatggagaactcgacggcccagaagatgctgcagcagaaagatagagcatagaaatgaatgaaccatgagtgtgatacattgctcacggatgtgatccaagtgaagaaacggatagaaagtgacatgccatccctcgcttgcgtcgttgtctcattgttcgataaatcagaacttcgtgctccgtactgcatcaggaggcgctggagtgagtcgggcatcatggctatggcaaggacagctgctgcgccgagcacatagaaatgctggcatatcgttgctggtgtctgttcagctgcatagtcgtagacgtgactgagtaacgtagccatgggaacaggaattgtgaatgccacagcttgactatgcgttcgccttaaactatgccatctactcaatggcagattcaaggggcatgaaatttaaattgctgccgggcttttgctggtgagtcttttcagtgtcaagaggagaccaatt

SEQ ID NO: 22881 - DNA, 954 bp, Muscodor strobelii
  misc_feature: SGI cDNA ID NO. 567776
  misc_feature: Encodes the peptide sequence at SEQ ID NO 22882
atggctacgttactcagtcacgtctacgactatgcagctgaacagacaccagcaacgatatgccagcatttctatgtgctcggcgcagcagctgtccttgccatagccatgatgcccgactcactccagcgcctcctgatgcagtacggagcacgaagttctgatttatcgaacaatgagacaacgacgcaagcgagggatggcatgtcactttctatccgtttcttcacttggatcacatccgtgagcaatgtatcacactcatggttcattcatttctatgctctatctttctgctgcagcatcttctgggccgtcgagttctccatgcgcgggacactccttgagatcatcaccaagactcagacatctcggccctcctcttccatgaccatcgagcaagttcagcttgcatggtttctgatgagtctgcaaggtgcaagacgcttatatgaatacttggcggtaatgcggccgtcgtcatccagtatgtggattgttcactggctccttggtaatgctttctacttatgcacgagcgtggccgtttgggttgagggatgcaggtcgataagagactctgctcgaactctgcaatttagtagacacctgtcactgagaacaacgactgcaacgtcagtattcttatgcgcatggtatgcgcagttctggtgtcatcgacatctggctggcctcaagaaatattcactcccgagtgatgggctctttcggtaccttgtgtgcccacattacacctgtgaatgcctgctttacctgtgcttgacaattgtcgcaagtcccgagggtcggtggtataaccagacgttagcttgtgctctgctatttactgcagtcaaccttggcgtcacagccaacggcacaagacagtggtatatcgaaaaattcggcaacgaagcacggcaaaagtggaaaatgataccattcatattttga

SEQ ID NO: 22882 - protein, 317 aa, Muscodor strobelii
  misc_feature: SGI Peptide ID NO. 567776
  misc_feature (162)..(317): Pfam Id: PF02544 Pfam Desc: 3-oxo-5-alpha-steroid 4-dehydrogenase
  misc_feature (214)..(317): Pfam Id: PF02544 Pfam Desc: 3-oxo-5-alpha-steroid 4-dehydrogenase
  misc_feature (11)..(317): NCBI GI: 116207206 Blast Desc: CHGG_02896 [Chaetomium globosum CBS 148.51] gi|88183493|gb|EAQ90961.1| CHGG_02896 [Chaetomium globosum CBS 148.51]
  misc_feature (4)..(317): NCBI GI: 256733245 Blast Desc: NECHADRAFT_104200 [Nectria haematococca mpVI 77-13-4]
  misc_feature (1)..(317): NCBI GI: 46125723 Blast Desc: FG07239.1 [Gibberella zeae PH-1]
  misc_feature (16)..(317): NCBI GI: 145615631 Blast Desc: MGG_13163 [Magnaporthe grisea 70-15] gi|145022428|gb|EDK06448.1| MGG_13163 [Magnaporthe grisea 70-15]
  misc_feature (5)..(317): NCBI GI: 171685732 Blast Desc: protein product [Podospora anserina] gi|170942827|emb|CAP68480.1| protein product [Podospora anserina]
  misc_feature (1)..(297): NCBI GI: 164429052 Blast Desc: NCU00387 [Neurospora crassa OR74A] gi|157072389|gb|EAA28037.2| [Neurospora crassa OR74A]
  misc_feature (24)..(317): NCBI GI: 121702705 Blast Desc: 3-oxo-5-alpha-steroid 4-dehydrogenase, [Aspergillus clavatus NRRL 1] gi|119397760|gb|EAW08191.1| 3-oxo-5-alpha-steroid 4-dehydrogenase, [Aspergillus clavatus NRRL
  misc_feature (24)..(317): NCBI GI: 119496697 Blast Desc: 3-oxo-5-alpha-steroid 4-dehydrogenase, [Neosartorya fischeri NRRL 181] gi|119413284|gb|EAW23225.1| 3-oxo-5-alpha-steroid 4-dehydrogenase, [Neosartorya fischeri NRRL
  misc_feature (32)..(317): NCBI GI: 70990894 Blast Desc: 3-oxo-5-alpha-steroid 4-dehydrogenase [Aspergillus fumigatus Af293] gi|66847928|gb|EAL88258.1| 3-oxo-5-alpha-steroid 4-dehydrogenase, [Aspergillus fumigatus Af293] 4-dehydrogenase,
  misc_feature (42)..(317): NCBI GI: 212527906 Blast Desc: 3-oxo-5-alpha-steroid 4-dehydrogenase, [Penicillium marneffei ATCC 18224] gi|210073508|gb|EEA27595.1| 3-oxo-5-alpha-steroid 4-dehydrogenase, [Penicillium marneffei
MATLLSHVYDYAAEQTPATICQHFYVLGAAAVLAIAMMPDSLQRLLMQYGARSSDLSNNETTTQARDGMSLSIRFFTWITSVSNVSHSWFIHFYALSFCCSIFWAVEFSMRGTLLEIITKTQTSRPSSSMTIEQVQLAWFLMSLQGARRLYEYLAVMRPSSSSMWIVHWLLGNAFYLCTSVAVWVEGCRSIRDSARTLQFSRHLSLRTTTATSVFLCAWYAQFWCHRHLAGLKKYSLPSDGLFRYLVCPHYTCECLLYLCLTIVASPEGRWYNQTLACALLFTAVNLGVTANGTRQWYIEKFGNEARQKWKMIPFIF

SEQ ID NO: 22883 - DNA, 2732 bp, Muscodor strobelii
  misc_feature: SGI EST ID NO. CUFF.53764.0
  misc_feature: Variant of the nucleotide sequence at SEQ ID NO 22881
aattggtctcctcttgacactgaaaagactcaccagcaaaagcccggcagcaatttaaatttcatgccccttgaatctgccattgagtagatggcatagtttaaggcgaacgcatagtcaagctgtggcattcacaattcctgttcccatggctacgttactcagtcacgtctacgactatgcagctgaacagacaccagcaacgatatgccagcatttctatgtgctcggcgcagcagctgtccttgccatagccatgatgcccgactcactccagcgcctcctgatgcagtacggagcacgaagttctgatttatcgaacaatgagacaacgacgcaagcgagggatggcatgtcactttctatccgtttcttcacttggatcacatccgtgagcaatgtatcacactcatggttcattcatttctatgctctatctttctgctgcagcatcttctgggccgtcgagttctccatgcgcgggacactccttgagatcatcaccaagactcagacatctcggccctcctcttccatgaccatcgagcaagttcagcttgcatggtttctgatgagtctgcaaggtgcaagacgcttatatgaatacttggcggtaatgcggccgtcgtcatccagtatgtggattgttcactggctccttggtaatgctttctacttatgcacgagcgtggccgtttgggttgagggatgcaggtcgataagagactctgctcgaactctgcaatttagtagacacctgtcactgagaacaacgactgcaacgtcagtattcttatgcgcatggtatgcgcagttctggtgtcatcgacatctggctggcctcaagaaatattcactcccgagtgatgggctctttcggtaccttgtgtgcccacattacacctgtgaatgcctgctttacctgtgcttgacaattgtcgcaagtcccgagggtcggtggtataaccagacgttagcttgtgctctgctatttactgcagtcaaccttggcgtcacagccaacggcacaagacagtggtatatcgaaaaattcggcaacgaagcacggcaaaagtggaaaatgataccattcatattttgagcatagcgctcagcacgtcatgatttcctgtggttgaagaggccgaatttggttcccagcttggtaacgcttatcacatctcgataggtcaaactagtccgtagttggcgtgggtttcggccactttcgaatctttccggtgatccgagtaaggaccagttagcaattgtcgtatcgcaaagctcgacgtcttcttctatgtcagaaataccatgaagatagtcggtgtagagatctgcggtagtgatgagaagacttcttggctcttgcaaaatcctccagctaggagctttttctaatgtgccatctttcttcatctcatgaatattcaggcatatactagcacctaggctcacggtacatacgatgggatggtaagcagaaccgtctttgtgtggcatgattccaacacctgggggatattcattgatcaacacatggtttggtcgaagatgggggctgttggcgaatacattggcagtcgatcccgtgtcggagcctgtatgaagggattgcaaccggggcacaatgggatcgtctagccaaggaggaagagctgcctcaacgagtctgttcttcacgagatctgatggccatgtctgtagacgccgtcgtgtcaattgcttccacctaggctttggcgcggacgctattttgtctaaaatatgtcgctcttcatcctcggtgatgaaatccgggatatagaatgcagccgatggtagcgagacaaggcgcgcatcatttagatctgcaggcagttgcacgtgcgtagcggtagacatgatgggtaggtgtgttcacgccgtcatccggaattgtcaccaccgctcgactgccaaagagattcgagagaggaaagcgagaaaggggaggagactgtggtcgtcgacttggtatttgctgttgtgatggtgacacgacaagtccttaatgcggtgagtagataagatgacacactcgacagcagaggggcagggtgggggcagaaagggtaatcgaattttcatagcaagctggacgatcgttcctgcgacgcctcgttgcgctttttatagcccctattccaccgtgtcggactagatcagcaaatctagatgctgtagcgagtctgcaaaatgctacacaacattggcgatgaataacgatggctagcagcctaaatattaatgaggcgaaggcgtgggagaaagtgtaagcagataggcgcaggaaagtgggtggaatggcagatcgacgcggatggagatgttgatggcaagaggagttggtggtgtgatgagtgagggggcaaggcgaatcactccaaatctgctcatttcaacttgcactgtggcaggacttttccgcgaccacactcgcgttctgcaaagttcaaggggccaacaaggggggtaaggaagagattacatcaagaaggcagccagacttgcgacaaggtctgctcagacacaaacaagcacacaatgatggagacctagacggatcactgggatagagacgagaaaggggggcgcgggaagtgcaattttgcagcaacagcagcaccactgcatcactgcaccatcagcccactcggacgatgcacacgcacagaagcccaagccgatgcccacccagaacccgctttcgc

SEQ ID NO: 22884 - DNA, 1107 bp, Muscodor strobelii
  misc_feature: SGI cDNA ID NO. 567777
  misc_feature: Encodes the peptide sequence at SEQ ID NO 22885
atggcgacaacagtggataagatcaaggagatcgaggccgaaatggcccgaactcaaaaaaacaaagcgacttcttttcatctgggccagctaaaggcaaaactcgccaagctgaagcgagaactactcacaccttccagcagtggaggcggtggtggaggagcaggcttcgatgttgccaggacaggagttgctagcgttggattcatcggctttccatctgttggaaagagtacacttatgagcaggttgaccggtcagcactccgaggcggcagcatacgaatttacgactttgacatctgtgccgggtcaggtcatgtataatggtgccccactccagatgatcgacttgcctggtattatcgagggagctaaggatggaagaggccgaggtcgtcaagtcattgctgttgctaagacttgccacctgatcttcatcgtcttggatgtgaacaaacccttaacagacaagagagtcatcgaatcggaactagaaggcttcggtatccgtatcaacaaagagccgcccaacatcactttcaaaaagaaagataagggtggtcttaacatcaccagcactgtgcctctgtcacacatagaccacgatgaaatcaaggctgttatgaacgagtaccggatcaattctgctgacatagctattcgctgtgatgctacgattgacgatctcattgacatcctggaagctaagagtcgcagctacatacccgtggtctacgtcctgaataaaatggatgcaatcagcatcgaagaattggatctcttatatcgaatcccaaacgcagttcctatcagctctgagcatggttggaacgttgatgaactcatggaagtaatgtgggataagctgaagttagtacgggtctacaccaagccaaagggaaaaatgccggattattccgcaccggttgtgcttcgttctacacgatgtactgttgaagacttctgtaacgctatccatcgaagcattgtggagcagtttaagaccgcgatcgtctatggcaagtccgtgaagcatcaaccgcaacgtgtgggtcttgctcacgaattggccgacgaggatatagttacgattgttaagcgatga

SEQ ID NO: 22885 - protein, 368 aa, Muscodor strobelii
  misc_feature: SGI Peptide ID NO. 567777
  misc_feature (65)..(185): Pfam Id: PF01926 Pfam Desc: GTPase of function
  misc_feature (293)..(367): Pfam Id: PF02824 Pfam Desc: TGS domain
  misc_feature (15)..(368): NCBI GI: 145615643 Blast Desc: GTP binding protein [Magnaporthe grisea 70-15] gi|145022435|gb|EDK06455.1| GTP binding protein [Magnaporthe grisea 70-15]
  misc_feature (1)..(368): NCBI GI: 119187731 Blast Desc: CIMG_03913 [Coccidioides immitis RS] gi|240108089|gb|EER26263.1| GTP-binding protein RBG1, [Coccidioides posadasii C735 delta SOWgp]
  misc_feature (1)..(368): NCBI GI: 242785133 Blast Desc: GTP binding protein, [Talaromyces stipitatus ATCC 10500] gi|218720678|gb|EED20097.1| GTP binding protein, [Talaromyces stipitatus ATCC 10500]
  misc_feature (1)..(368): NCBI GI: 119496681 Blast Desc: GTP binding protein, [Neosartorya fischeri NRRL 181] gi|119413276|gb|EAW23217.1| GTP binding protein, [Neosartorya fischeri NRRL 181]
  misc_feature (15)..(362): NCBI GI: 116207200 Blast Desc: conserved [Chaetomium globosum CBS 148.51] gi|88183490|gb|EAQ90958.1| conserved [Chaetomium globosum CBS 148.51]
  misc_feature (1)..(368): NCBI GI: 225682390 Blast Desc: GTP-binding protein 128up [Paracoccidioides brasiliensis Pb03]
  misc_feature (15)..(362): NCBI GI: 164429058 Blast Desc: developmentally regulated GTP-binding protein 1 [Neurospora crassa OR74A] gi|157072392|gb|EAA28039.2| developmentally regulated GTP-binding protein 1 [Neurospora
  misc_feature (1)..(368): NCBI GI: 225556730 Blast Desc: developmentally regulated GTP-binding protein [Ajellomyces capsulatus G186AR] gi|240281587|gb|EER45090.1| GTP binding protein [Ajellomyces capsulatus H143]
  misc_feature (15)..(368): NCBI GI: 171685738 Blast Desc: protein product [Podospora anserina] gi|170942830|emb|CAP68483.1| protein product [Podospora anserina]
  misc_feature (1)..(368): NCBI GI: 261197453 Blast Desc: developmentally regulated GTP-binding protein 1 [Ajellomyces dermatitidis SLH14081] gi|239595759|gb|EEQ78340.1| developmentally regulated GTP-binding protein 1 [Ajellomyces 1
MATTVDKIKEIEAEMARTQKNKATSFHLGQLKAKLAKLKRELLTPSSSGGGGGGAGFDVARTGVASVGFIGFPSVGKSTLMSRLTGQHSEAAAYEFTTLTSVPGQVMYNGAPLQMIDLPGIIEGAKDGRGRGRQVIAVAKTCHLIFIVLDVNKPLTDKRVIESELEGFGIRINKEPPNITFKKKDKGGLNITSTVPLSHIDHDEIKAVMNEYRINSADIAIRCDATIDDLIDILEAKSRSYIPVVYVLNKMDAISIEELDLLYRIPNAVPISSEHGWNVDELMEVMWDKLKLVRVYTKPKGKMPDYSAPVVLRSTRCTVEDFCNAIHRSIVEQFKTAIVYGKSVKHQPQRVGLAHELADEDIVTIVKR

SEQ ID NO: 22886 - DNA, 2057 bp, Muscodor strobelii
  misc_feature: SGI EST ID NO. CUFF.53813.1
  misc_feature: Variant of the nucleotide sequence at SEQ ID NO 22884
cccggctcgttgggaattaggcgccatcgtcatcatccattggatcaaccagtgacctcagacacaagtatatactcacaccggactgagaaggcctataatcaagatggcgacaacagtggataagatcaaggagatcgaggccgaaatggcccgaactcaaaaaaacaaagcgacttcttttcatctgggccagctaaaggcaaaactcgccaagctgaagcgagaactactcacaccttccagcagtggaggcggtggtggaggagcaggcttcgatgttgccaggacaggagttgctagcgttggattcatcggctttccatctgttggaaagagtacacttatgagcaggttgaccggtcagcactccgaggcggcagcatacgaatttacgactttgacatctgtgccgggtcaggtcatgtataatggtgccccactccagatgatcgacttgcctggtattatcgagggagctaaggatggaagaggccgaggtcgtcaagtcattgctgttgctaagacttgccacctgatcttcatcgtcttggatgtgaacaaacccttaacagacaagagagtcatcgaatcggaactagaaggcttcggtatccgtatcaacaaagagccgcccaacatcactttcaaaaagaaagataagggtggtcttaacatcaccagcactgtgcctctgtcacacatagaccacgatgaaatcaaggctgttatgaacgagtaccggatcaattctgctgacatagctattcgctgtgatgctacgattgacgatctcattgacatcctggaagctaagagtcgcagctacatacccgtggtctacgtcctgaataaaatggatgcaatcagcatcgaagaattggatctcttatatcgaatcccaaacgcagttcctatcagctctgagcatggttggaacgttgatgaactcatggaagtaatgtgggataagctgaagttagtacgggtctacaccaagccaaagggaaaaatgccggattattccgcaccggttgtgcttcgttctacacgatgtactgttgaagacttctgtaacgctatccatcgaagcattgtggagcagtttaagaccgcgatcgtctatggcaagtccgtgaagcatcaaccgcaacgtgtgggtcttgctcacgaattggccgacgaggatataggtaatacaaagcatatgtgcggcggctgatgatcctatactaacctagcatgttgcagttacgattgttaagcgatgagccgttggtactttggactaccctatcgcgcctcaactcgctgttagaacgaaatttggtcaagaaaatggacatactcccgtggtgggaggatagtaggagacgccgagcgtttgggtctgttccagtaaatggtcacatctgtgtcgtattgtggcggccaacaattactgcacacggatctcaatgatctgtgcaattgtggtgggccactcgcattaatgcaagtggtcgctgcatcacggctgtttgccgtcagcgggtcagggacgaggccgcagccgatacggcgcgctacagcaagattgccagcattcgttcagggggacgaacctggtttatgcaagtcaggccgaccgtcatgaatgatgaaaggcctggttatctacgggtacccgaaatatagcatgggtttcgccatgcacagcaagaggttgacttcaaatcattactctaggcaaagccacaggtggaatatacttccggaatgaagtacaagtagtttcactagctgttctcagtcctaaaatactgacgaattcaaacgtgtctcacttgtgacacctgcaatatgcatgatctacaacaacaggcaaacgagcgttcagagcaggataatgttataatacagataccattgaagtacccttgcactcagttgaatagagcctaccctgcttctgggtttgtatttcgaaacaaggctcgagccagaattatagatcgttgagaccatttccattcggggagccgaactggctcttgtcaaatcaagtctttgttgcg

SEQ ID NO: 22887 - DNA, 1116 bp, Muscodor strobelii
  misc_feature: SGI cDNA ID NO. 567778
  misc_feature: Reduced expression when VOC is produced
  misc_feature: Encodes the peptide sequence at SEQ ID NO 22888
atggcgacaacagtggataagatcaaggagatcgaggccgaaatggcccgaactcaaaaaaacaaagcgacttcttttcatctgggccagctaaaggcaaaactcgccaagctgaagcgagaactactcacaccttccagcagtggaggcggtggtggaggagcaggcttcgatgttgccaggacaggagttgctagcgttggattcatcggctttccatctgttggaaagagtacacttatgagcaggttgaccggtcagcactccgaggcggcagcatacgaatttacgactttgacatctgtgccgggtcaggtcatgtataatggtgccccactccagatgatcgacttgcctggtattatcgagggagctaaggatggaagaggccgaggtcgtcaagtcattgctgttgctaagacttgccacctgatcttcatcgtcttggatgtgaacaaacccttaacagacaagagagtcatcgaatcggaactagaaggcttcggtatccgtatcaacaaagagccgcccaacatcactttcaaaaagaaagataagggtggtcttaacatcaccagcactgtgcctctgtcacacatagaccacgatgaaatcaaggctgttatgaacgagtaccggatcaattctgctgacatagctattcgctgtgatgctacgattgacgatctcattgacatcctggaagctaagagtcgcagctacatacccgtggtctacgtcctgaataaaatggatgcaatcagcatcgaagaattggatctcttatatcgaatcccaaacgcagttcctatcagctctgagcatggttggaacgttgatgaactcatggaagtaatgtgggataagctgaagttagtacgggtctacaccaagccaaagggaaaaatgccggattattccgcaccggttgtgcttcgttctacacgatgtactgttgaagacttctgtaacgctatccatcgaagcattgtggagcagtttaagaccgcgatcgtctatggcaagtccgtgaagcatcaaccgcaacgtgtgggtcttgctcacgaattggccgacgaggatataggtaatacaaagcatatgtgcggcggctga

SEQ ID NO: 22888 - protein, 371 aa, Muscodor strobelii
  misc_feature: SGI Peptide ID NO. 567778
  misc_feature (65)..(185): Pfam Id: PF01926 Pfam Desc: GTPase of function
  misc_feature (293)..(367): Pfam Id: PF02824 Pfam Desc: TGS domain
  misc_feature (293)..(362): Pfam Id: PF02824 Pfam Desc: TGS domain
  misc_feature (15)..(362): NCBI GI: 145615643 Blast Desc: GTP binding protein [Magnaporthe grisea 70-15] gi|145022435|gb|EDK06455.1| GTP binding protein [Magnaporthe grisea 70-15]
  misc_feature (15)..(363): NCBI GI: 116207200 Blast Desc: conserved [Chaetomium globosum CBS 148.51] gi|88183490|gb|EAQ90958.1| conserved [Chaetomium globosum CBS 148.51]
  misc_feature (15)..(363): NCBI GI: 164429058 Blast Desc: developmentally regulated GTP-binding protein 1 [Neurospora crassa OR74A] gi|157072392|gb|EAA28039.2| developmentally regulated GTP-binding protein 1 [Neurospora
  misc_feature (15)..(363): NCBI GI: 46125727 Blast Desc: FG07241.1 [Gibberella zeae PH-1]
  misc_feature (1)..(362): NCBI GI: 119187731 Blast Desc: CIMG_03913 [Coccidioides immitis RS] gi|240108089|gb|EER26263.1| GTP-binding protein RBG1, [Coccidioides posadasii C735 delta SOWgp]
  misc_feature (1)..(362): NCBI GI: 154295193 Blast Desc: conserved [Botryotinia fuckeliana B05.10] gi|150844137|gb|EDN19330.1| conserved [Botryotinia fuckeliana B05.10]
  misc_feature (1)..(362): NCBI GI: 242785133 Blast Desc: GTP binding protein, [Talaromyces stipitatus ATCC 10500] gi|218720678|gb|EED20097.1| GTP binding protein, [Talaromyces stipitatus ATCC 10500]
  misc_feature (1)..(362): NCBI GI: 242785138 Blast Desc: GTP binding protein, [Talaromyces stipitatus ATCC 10500] gi|218720679|gb|EED20098.1| GTP binding protein, [Talaromyces stipitatus ATCC 10500]
  misc_feature (15)..(363): NCBI GI: 61744139 Blast Desc: GTP binding protein [Gibberella moniliformis]
  misc_feature (1)..(362): NCBI GI: 119496681 Blast Desc: GTP binding protein, [Neosartorya fischeri NRRL 181] gi|119413276|gb|EAW23217.1| GTP binding protein, [Neosartorya fischeri NRRL 181]
  misc_feature: Useful for introducing or modulating the production of volatile compounds
MATTVDKIKEIEAEMARTQKNKATSFHLGQLKAKLAKLKRELLTPSSSGGGGGGAGFDVARTGVASVGFIGFPSVGKSTLMSRLTGQHSEAAAYEFTTLTSVPGQVMYNGAPLQMIDLPGIIEGAKDGRGRGRQVIAVAKTCHLIFIVLDVNKPLTDKRVIESELEGFGIRINKEPPNITFKKKDKGGLNITSTVPLSHIDHDEIKAVMNEYRINSADIAIRCDATIDDLIDILEAKSRSYIPVVYVLNKMDAISIEELDLLYRIPNAVPISSEHGWNVDELMEVMWDKLKLVRVYTKPKGKMPDYSAPVVLRSTRCTVEDFCNAIHRSIVEQFKTAIVYGKSVKHQPQRVGLAHELADEDIGNTKHMCGG

SEQ ID NO: 22889 - DNA, 2057 bp, Muscodor strobelii; identical to SEQ ID NO: 22886
  misc_feature: SGI EST ID NO. CUFF.53813.1
  misc_feature: Variant of the nucleotide sequence at SEQ ID NO 22887

SEQ ID NO: 22890 - DNA, 1359 bp, Muscodor strobelii
  misc_feature: SGI cDNA ID NO. 567781
  misc_feature: Encodes the peptide sequence at SEQ ID NO 22891
atgactgaggccacctcatcggctcctctcccaggcggtctacctgtcgcagctgcagctggcgcaaaggcgccgaccatagcgactactatcgacgactccgccactacaaccgcgaggccgcccgctgcgactcgcgttgcctcgtcatctgctgcctatcgtcgcccagcgcgacctctgtcttcggacttcctgtcagacaaggccactgccgcgctcatacggcggacgctgtgcgctcgtcacctggccgacagagggagagatacgcctgcgcccatccacgatctgttgccccctctcaccagccgcaacgacgtcgatctccagctctatgctctcctatccattatcctgagggagtttgtccagaactggtacaacaagatcaccccggacgagaccttcgtcgccgagattgtgcagatcatcgcccactgcacccgcgcgttggagcagagactgcgcaacgtcgatctcgagagcttacttttcgacgagctgcccgagcttcttgacgcgcacgtccaagcctatcgcgttgccaacacccccacctcccggccgcctctcaagacagatccacgtcaggtctatcattcgctgtatcctttgcctgctctgtcgccagttcctcgaccgggcgacgcggacagtatcgaattgcagagcgagaacgagagcacgtaccgccaacttttggtacagggcgttttagctgtcctacttcccaccgaggacctggaaaatgagtgtctcacgtcattggttggacagctcctatcagagctggtcattggcaacctggtagctaccaaagtctccgagccttggctgatatgggagattttgatcatgctcacccggctggcttacagaaagaacgatcgcgaagagccgaacaaagactcagataactcagcaccggcttcggaacccacacgcgacatcaatgtgaccaccaccagcaagcgagcatggtcgttagatcggaccttctggtcctttgtccactgggtctttctcatcttcggaattgtacgattggccataagtacaattgctcgttcgagatcattaccactgaggtcttcccacaacgttgtacggtcgacagattccagtgacccgaagtcaatactgaaacaaacccagactatctcacaggagtctcctatccaaccacagtcgcacaatgttccactcgtcgacgttcgcctctggtcttgcatgagcacactgctggagatggacctacgaatgccctggctacacggagcattgtcaatgttacagtgggttgctatcaagggcccgacaaaagttggcggtttcaacggagaacttgataggtag

SEQ ID NO: 22891 - protein, 452 aa, Muscodor strobelii
  misc_feature: SGI Peptide ID NO. 567781
  misc_feature (105)..(293): Pfam Id: PF02194 Pfam Desc: PXA domain
  misc_feature (42)..(452): NCBI GI: 116207190 Blast Desc: CHGG_02888 [Chaetomium globosum CBS 148.51] gi|88183485|gb|EAQ90953.1| CHGG_02888 [Chaetomium globosum CBS 148.51]
  misc_feature (57)..(452): NCBI GI: 171685744 Blast Desc: protein product [Podospora anserina] gi|170942833|emb|CAP68486.1| protein product [Podospora anserina]
  misc_feature (48)..(452): NCBI GI: 256732793 Blast Desc: [Nectria haematococca mpVI 77-13-4]
  misc_feature (18)..(452): NCBI GI: 85084262 Blast Desc: NCU00394 [Neurospora crassa OR74A] gi|28918369|gb|EAA28044.1| conserved [Neurospora crassa OR74A]
  misc_feature (60)..(452): NCBI GI: 46125733 Blast Desc: FG07244.1 [Gibberella zeae PH-1]
  misc_feature (33)..(452): NCBI GI: 145615633 Blast Desc: MGG_05728 [Magnaporthe grisea 70-15] gi|145022430|gb|EDK06450.1| MGG_05728 [Magnaporthe grisea 70-15]
  misc_feature (42)..(452): NCBI GI: 169617273 Blast Desc: SNOG_11814 [Phaeosphaeria nodorum SN15] gi|111059738|gb|EAT80858.1| SNOG_11814 [Phaeosphaeria nodorum SN15]
  misc_feature (37)..(283): NCBI GI: 156051144 Blast Desc: SS1G_06979 [Sclerotinia sclerotiorum 1980] gi|154704757|gb|EDO04496.1| SS1G_06979 [Sclerotinia sclerotiorum 1980]
  misc_feature (34)..(452): NCBI GI: 240108086 Blast Desc: PXA domain containing protein [Coccidioides posadasii C735 delta SOWgp]
  misc_feature (29)..(452): NCBI GI: 119187743 Blast Desc: CIMG_03919 [Coccidioides immitis RS]
MTEATSSAPLPGGLPVAAAAGAKAPTIATTIDDSATTTARPPAATRVASSSAAYRRPARPLSSDFLSDKATAALIRRTLCARHLADRGRDTPAPIHDLLPPLTSRNDVDLQLYALLSIILREFVQNWYNKITPDETFVAEIVQIIAHCTRALEQRLRNVDLESLLFDELPELLDAHVQAYRVANTPTSRPPLKTDPRQVYHSLYPLPALSPVPRPGDADSIELQSENESTYRQLLVQGVLAVLLPTEDLENECLTSLVGQLLSELVIGNLVATKVSEPWLIWEILIMLTRLAYRKNDREEPNKDSDNSAPASEPTRDINVTTTSKRAWSLDRTFWSFVHWVFLIFGIVRLAISTIARSRSLPLRSSHNVVRSTDSSDPKSILKQTQTISQESPIQPQSHNVPLVDVRLWSCMSTLLEMDLRMPWLHGALSMLQWVAIKGPTKVGGFNGELDR

SEQ ID NO: 22892 - DNA, 9124 bp, Muscodor strobelii
  misc_feature: SGI EST ID NO. CUFF.54620.2
  misc_feature: Variant of the nucleotide sequence at SEQ ID NO 22890
cacgtatctaacacatgttatgtgaggtaccgagacatatgcggactacaacttctaaaatcgaaccaccagaatttctattcgttacgtcccgggcacctaatccacgacttgacctgcatctgcctcgtgattgagcttcgagtgcgcaatggaacctctgtcccggcatgccacggccaccacctgccgctcgtgtctaaagtctgcactgtctcatggcttctatgcgcgttctgcgcggcccttctcgagagctgcctcgtctcgccatggccaactgaacccaagcccatccggggccactgctagatccaggctatctcgccgccccaacccagcgcccaactcagtctctcctgccgcccagaggtctctttcgctatttgggtcgcagcccaaggaaactcataatgagtcatctgcatttgcatccactacgccgccgcgcaacgataaccagaagcctcccgttctcaagcccgacgacctcttccactcctacacgaactcgcccatccctgagatccgcaagcgtgccgccttcatcaggcagcatgcctactgtcctcatcccgaccatgccgccactcgcatgcccgtcgagcccgacaaccctcgcctctctcccagcgcgggctccgaagcccccgcgcatgtcgatttcgagtgcccggactgtggcatccccgtctactgcagcgagcaacactgggccgaggactacgaggcccatctgcagatatgtgacaccctgaggcagatcaacgaggacgaccacgatctccgctctggccgcttcttccccgagttcgaatatgccggcccccagatggaggaagccatggtcaacatgaccaattgggacacctttctatacacgaggcagttcgaggccatcaacgacgatcggagcatgcgccaggtcacccgactcttgacctaccctctgaccgtcggaagcatcctccacgagctcagcccctacaacatccagaagggcggccgcctcacaccggaaggcctcaagagtctgagtgctctgcgttacactctgcatcctcccaggaccggcggcgggatcggtatcaaagggttgcggccagaagcaccgcccgtgcgcatcttcatcctcggggcccgcgccgaatcctcgctgccccgcaatgtctgggtgcagctggcccatctcttcccgagaggcaagttccacctcgtctttgtcggcccggagagcatggcgaaccgagacgacgagttcccgttgcccccgcgcacggcatcgaacccctttggcgccattgtcgaggaccgtgtgtggccgacgatgaagatcagtaccatcgtagactattaccacaccctccacaagacgggccatttccacccgtacgacccgtactttgattgcttcgtcatgttccatccgggcctcggacacccggccagctcgcacgagtgggtcgagacggtgccgctgctgctcgagacgaaagcgcccatcattgtgacgggctacacgcagcacgacatggagagagacatcgggtgggtcaacgagacgtgccggggcgagttcgacctgctcatggagcccggggagaacaagttccgcagcttgcggtgggatctcaacgacatggacccccaggacgtgagctgcggtaactggggagtgtgggccttccgaggcaaacgatacgaaacaactcataaaaacaccgaacagagctaagttgttctaccatgtcttactgtaatcatagattggtggacttgtctcgaaccattgccatcacgaatgttggaagagtgtactatttgtaacaactgggcagtaagctgtttgtatatatatacatgtgcattctcaagatattttatagagaacaaaccggtacgattcggctttggaaatattcatttgctgtggaaaataagggtgcctagatcgattcgaactatggttttatagtgagtggaagtgtaggtcaactaatctcacgtgggcgaggctgaagctgaggagctgagacaggggtcatcccagcgaaacacatggcgtcgtagaatttcaatccatgcatactgcagatcaactacatcattaatcctgtcacagcaggctgtaagtgaataagacggtggcgctgaccattcagtgttgagagggtggccattttcggtgaggtgtgcgccaaacaagaaagaaagaataagaggggcaggtcccgccaaccacgtcgtcacaggcccagggattagttgggattatttgggattattttgcaacgtgcctgaggttgcatattgcacacacctcctacatctactcgccaaccagcacacctaacccacaaccactccatcgacatcgcgggcgacaatctcatcaccactgcggcggcacatgcgggcacggccgattccccagatgtgtggtgagcttgtcctctccgcaccatgcgccatcgcatcgtgaggaagcccagccgccactcatcggggcgcagtaccgaaacatcgctcaggcctcccatgcacacttgatcaccgcgacactcgccttagcagccgactctctcccatgcagccatgactgaggccacctcatcggctcctctcccaggcggtctacctgtcgcagctgcagctggcgcaaaggcgccgaccatagcgactactatcgacgactccgccactacaaccgcgaggccgcccgctgcgactcgcgttgcctcgtcatctgctgcctatcgtcgcccagcgcgacctctgtcttcggacttcctgtcagacaaggccactgccgcgctcatacggcggacgctgtgcgctcgtcacctggccgacagagggagagatacgcctgcgcccatccacgatctgttgccccctctcaccagccgcaacgacgtcgatctccagctctatgctctcctatccattatcctgagggagtttgtccagaactggtacaacaagatcaccccggacgagaccttcgtcgccgagattgtgcagatcatcgcccactgcacccgcgcgttggagcagagactgcgcaacgtcgatctcgagagcttacttttcgacgagctgcccgagcttcttgacgcgcacgtccaagcctatcgcgttgccaacacccccacctcccggccgcctctcaagacagatccacgtcaggtctatcattcgctgtatcctttgcctgctctgtcgccagttcctcgaccgggcgacgcggacagtatcgaattgcagagcgagaacgagagcacgtaccgccaacttttggtacagggcgttttagctgtcctacttcccaccgaggacctggaaaatgagtgtctcacgtcattggttggacagctcctatcagagctggtcattggcaacctggtagctaccaaagtctccgagccttggctgatatgggagattttgatcatgctcacccggctggcttacagaaagaacgatcgcgaagagccgaacaaagactcagataactcagcaccggcttcggaacccacacgcgacatcaatgtgaccaccaccagcaagcgagcatggtcgttagatcggaccttctggtcctttgtccactgggtctttctcatcttcggaattgtacgattggccataagtacaattgctcgttcgagatcattaccactgaggtcttcccacaacgttgtacggtcgacagattccagtgacccgaagtcaatactgaaacaaacccagactatctcacaggagtctcctatccaaccacagtcgcacaatgttccactcgtcgacgttcgcctctggtcttgcatgagcacactgctggagatggacctacgaatgccctggctacacggagcattgtcaatgttacagtgggttgctatcaagggcccgacaaaagttggcggtttcaacggagaacttgatagactcctctctcattacatccacatccatgttctcgatcccgcccatcttcccccacttctgcgagcgatccgcgccgcactttttcctaacaacgctccaggctcgcccagcctgacacccccctcatccgatgagcagatggccgccttgcgtcgcaggtgcgctagcgctctttggggacttatcccgaagagggtgggtaaactatattatagtactagcagctggtcttacgccggtgtgagaaatagaggcatgactaatgatgaaaggtcgcgttcgcgagttgaatcgctcaggagcgttgctaatatcgacagtggccctattgatcatgacaaagacagaaatagtggtgggatgggcgagaaacctccctacgtccggctctctagcgatagaaaggccgagacacccactgatgcaacgttatcttcttcgggtatcgaagagggctcaggggactcggacgccggcgttgacgagaccggagtaagacctcatgatgaagacgaggcgaggattctatccgagattgaacacggcatcgtcgatgtcttctcggacgcctactgtaacaagcatctgatttataacattctggaacttgtccttgtccgattgatacccgagctcgccgaacgaggcgttggggaattatgggcggaaagattagcctgatggtgctatacccgtagtttctctatagcattgtagacttgctaatgattcctaatacaacatatcattctccgttgctttttgatcattgtatttcaaatggcatgatgagcgaataaagcgtaacaaagtggaaagattttacttcccatgagctggtcgcatgcattgcgagacaacgtttagggtttgatgttctgtgacgttatgcagcttcagattcggtcacgtaaaatgatggcaaagagtgtcaagtgttcaggtacttcgctgtcgaattcattcttttcatgccgcccccaagcgtcctcgcggactaagattctgtagttatgtagaactataatttcttttcaaaaaaaaagaaaaagcaaaataattatttcccccctttcccctgggcctgaaagcgagtgaccgatggaaagcgcattatccaaaagtgcagaaatgagtaacatgcaaacttcgtagccaaaagatggagagagaaaaattagaagcaatcgtagaactgaccgctagtaaacgcctcatgcaactgcgaactgatgttgtttccaggaaatatgaaattatcaaaaagaaaccaaaaaagggaaaaaatcaaataacgtcccgtccgccattcgcccttgcgagcttccttgtggtgtatggtattggtatcaatctcgctgttcctgtttggcttgcgctagttgggtatatgataatttacgtattttttcgacgggttcgcgtgaacgattcgcgtgagcggctttgattcttttttggtttttaaatctgctgtcgaagttcggcgcataatcttgggggtctagtaactcgcgctgctgccgaagtactcttgcgagtgactgcctctctaggacatacagatgtatatatggtgaggcttatcattgaagattacgatatatggggtatacgttgttggttgttggtcgcgtgtcgcgctggaaatttctcatcgagatgtgatggcggtccgtcccgcttcgccccggactgctctcggtcgaccctgaatcccggtgatgtcgtgagactgtttgcctgtaaatgcatgtgctttgtagtttcggaatcaaaccagaatacaaccaagaaataaaccacgattgctgaaaattcgttcctagacagttcgtccatatctggatagtagaaattactcctcattgttcgatagcgttcggtaagcaagcaagggcggatcttgtgttgcaccaatagtccagtcgtgtccaagcatcttcaatgtcacatcgatcgctcagaccggcgcttcgctctctgcttgtaattcgtggttctcatggttgcaaatgtcatcccttcccggtactggacaatcgtgtaaccacgtcggagcgtcggggtgactgctgaacaagttgcaatacactcagatcggagcctcctttttagccaacggcgagttactgttgaccatttcagtgtccccttcagggattctagatagacctccaagaccttgagttgcggagtttgccttggggccgccatgttgcgacgactgtccaagaccccacttttccacgatatggacaaatgtcatgtagtcgcccatatcaaagtagttattggcggtgtagttcagaagtgtatccaccgcgcgtcgggcatcctcttgcgtgggcgatgttggcgtagagctaatggccaagcccgtggtggttgatctgccggtcaagcttccagcactgctcacatggtggagcgttcgtggggagatggcagtatcgagtccaaaggtaggagcaggcatttcatggacaggtgattcgatggccgatgatgggccggttccagaggcactatacttcggtgtcaagggctcggtggcctgctgcgatggattcatgtattctaaagctgggacattcggcactgtatgactccgaggtctatgaaatccggggtccccaaacatgcctgtgttgggatcaggggaaaatgtgaattgcgaagtcgggctaaaggcgccgctccccgaaaacgttgagcttggcgggtcggtgatggcactattcagcgaggtagtactttgtgaatgggggttcttatacccactactcccaaagccgacattaaatccaggctgttccttgtcctcagctttagtgcttgcggaagatacgagaggcgattctcgagggcccggagaagcaggtgatattccattcggtgtctgcgaggtagatatcgtgggagattcggtgtccagtctatcgagccgagtgctgtctgggatggccgtctccgaagctcttcgtatcaacttgccatggccaaccccacggccaaccccgtgtttctgtttgaacttttgtatccaagaagtggtgatatccttcagaggactctccgtgttgttcaggaacactttggccctctcctccaaatcacggtcactcacgatcacaccctttttctgttggtttttcacccagcttatgagggcacgctcaatgtcaggtggcgattttcctttgattctcttgacaggagaaccactgcggtcatcttgattcaggtacgtgtctttctttcgcaagactttagatacggtactgtggtcacattagctcttgattgtcttctacgacgaaagtaaaccgagttttctacctccgttcaacgccaaatttcaaccctatatcgtgctgtttgacgccaggattctcttccgcaaacttgcacatatctcgtcgatcctggtcgctgagtgtcctcctcggctgagatgtgttgatcgttggcaatttaggttgttgtctaacgggaggtggagcaggcggtatcgtgactggtgcgtgatgatagttctgggaaggattggtctgcagacttggccaagagacttgtccttgcgtcggtattattggcggtgggggaagctgtgtagtatagttattggagtgcatgttttgcacgaacggagattgcgccatgtggccacccaatgactctggcggtaatccatgcgcgatattgtgtataggataatattcgtctgaatagggggccatgggcatatgtccgtaagagttcaagcttccccaggcagcgcctgaatatgaagtgtcatgaacaagttgatcatcctgatcagcacctgttgaagtaatcatgctattatgcatgttgtgcgaagtgccgttccaacgagggccttatagttctcccactctcagattgcatcaagcgccagttgtgatgtcgccttggattcgctctcgcagatgttgtgagtccgcacaagggcgaagtggcctattaaaacgagactgtacgtatgtggcctggacgatatgctggaaacttgctggtttgtatctggcaaagtaagatttgcgagcgggaaacgacatgcgctctagacacagcaattggtttgtgataggtgtatcaaaagttaccgtgtagttcaacagcgttcgggtgcgctaaggtgcgctactaacaagagcagcttgtcgtcaaggcctgcgtcactcaactagtaatgacgaattataaagagcgagtagactgtttttcaataggtagagagcgtggttttgcgtacacccaccggcgggaggtggcggccgagtcctagaagtaccaaccaacaagcaaacagtctttgtattggtggctccgattcctgacagcttagtccaactgtgcgcacatccagtacagaggagctttcctctcccttcccaaaaagcggactgagtcgtttttttggatcgtccgcagttgtctcgagattacaatgagtaagaatcgtcgacagttcgctccggcgtatgtaattatcccgtagtcagaaactttattaagaaggagagcaacaaggtcgaccaaatcgtctctaaccggatcctattaactaccaagacgggacgtctgaaagagagacggcgccggactgtagtcagttcacggcgaggtcgttggtatagaactactgaggatcacggcgaaagacgctggtggacacagacatgtggaggaacccgtacataagctacatatgtatgtttgtatgcagcagcagggatacagtcgaggtgtgtgttgtgcgtgcctttcgaagccgggggtcctcgaacagtagcatcgaatacctgggggtgtggtggcagctcttgagggataaggccgggacgagagatggtatgacaagtttggaaggacaaggggcttcttctggggggcttctcaagggtacaaatgaattcaggtaagcgttagtcgtccgagacggctggactggggatttttcgtgggcctgttgtgcggaggatggcaatccacaatgtcaatgtcaccgtaggcttgtagcttgttgagaggccgaaatatgctctctgggatgtgcgagggcagccgagtacctcgaaattccatccatgcccttagttatactggagacagggttctagatggccagagtccttagtccatg

SEQ ID NO: 22893 - DNA, 1584 bp, Muscodor strobelii
  misc_feature: SGI cDNA ID NO. 567782
  misc_feature: Reduced expression when VOC is produced
  misc_feature: Encodes the peptide sequence at SEQ ID NO 22894
atggaacctctgtcccggcatgccacggccaccacctgccgctcgtgtctaaagtctgcactgtctcatggcttctatgcgcgttctgcgcggcccttctcgagagctgcctcgtctcgccatggccaactgaacccaagcccatccggggccactgctagatccaggctatctcgccgccccaacccagcgcccaactcagtctctcctgccgcccagaggtctctttcgctatttgggtcgcagcccaaggaaactcataatgagtcatctgcatttgcatccactacgccgccgcgcaacgataaccagaagcctcccgttctcaagcccgacgacctcttccactcctacacgaactcgcccatccctgagatccgcaagcgtgccgccttcatcaggcagcatgcctactgtcctcatcccgaccatgccgccactcgcatgcccgtcgagcccgacaaccctcgcctctctcccagcgcgggctccgaagcccccgcgcatgtcgatttcgagtgcccggactgtggcatccccgtctactgcagcgagcaacactgggccgaggactacgaggcccatctgcagatatgtgacaccctgaggcagatcaacgaggacgaccacgatctccgctctggccgcttcttccccgagttcgaatatgccggcccccagatggaggaagccatggtcaacatgaccaattgggacacctttctatacacgaggcagttcgaggccatcaacgacgatcggagcatgcgccaggtcacccgactcttgacctaccctctgaccgtcggaagcatcctccacgagctcagcccctacaacatccagaagggcggccgcctcacaccggaaggcctcaagagtctgagtgctctgcgttacactctgcatcctcccaggaccggcggcgggatcggtatcaaagggttgcggccagaagcaccgcccgtgcgcatcttcatcctcggggcccgcgccgaatcctcgctgccccgcaatgtctgggtgcagctggcccatctcttcccgagaggcaagttccacctcgtctttgtcggcccggagagcatggcgaaccgagacgacgagttcccgttgcccccgcgcacggcatcgaacccctttggcgccattgtcgaggaccgtgtgtggccgacgatgaagatcagtaccatcgtagactattaccacaccctccacaagacgggccatttccacccgtacgacccgtactttgattgcttcgtcatgttccatccgggcctcggacacccggccagctcgcacgagtgggtcgagacggtgccgctgctgctcgagacgaaagcgcccatcattgtgacgggctacacgcagcacgacatggagagagacatcgggtgggtcaacgagacgtgccggggcgagttcgacctgctcatggagcccggggagaacaagttccgcagcttgcggtgggatctcaacgacatggacccccaggacgtgagctgcggtaactggggagtgtgggccttccgaggcaaacgatacgaaacaactcataaaaacaccgaacagagctaa

SEQ ID NO: 22894 - protein, 527 aa, Muscodor strobelii
  misc_feature: SGI Peptide ID NO. 567782
  misc_feature (6)..(520): NCBI GI: 154295207 Blast Desc: BC1G_13417 [Botryotinia fuckeliana B05.10] gi|150844144|gb|EDN19337.1| BC1G_13417 [Botryotinia fuckeliana B05.10]
  misc_feature (109)..(525): NCBI GI: 39977111 Blast Desc: MGG_06458 [Magnaporthe grisea 70-15] gi|145016124|gb|EDK00614.1| MGG_06458 [Magnaporthe grisea 70-15]
  misc_feature (96)..(520): NCBI GI: 156051124 Blast Desc: SS1G_06969 [Sclerotinia sclerotiorum 1980] gi|154704747|gb|EDO04486.1| SS1G_06969 [Sclerotinia sclerotiorum 1980]
  misc_feature (6)..(516): NCBI GI: 164429060 Blast Desc: NCU00395 [Neurospora crassa OR74A] gi|157072393|gb|EAA28045.2| NCU00395 [Neurospora crassa OR74A]
  misc_feature (1)..(517): NCBI GI: 256732793 Blast Desc: [Nectria haematococca mpVI 77-13-4]
  misc_feature (107)..(525): NCBI GI: 225680587 Blast Desc: mRNA processing protein (Mss51) [Paracoccidioides brasiliensis Pb03]
  misc_feature (107)..(525): NCBI GI: 226292774 Blast Desc: mRNA processing protein (Mss51) [Paracoccidioides brasiliensis Pb18]
  misc_feature (107)..(525): NCBI GI: 67044147 Blast Desc: Mss51p [Paracoccidioides brasiliensis]
  misc_feature (8)..(522): NCBI GI: 67904156 Blast Desc: AN9065.2 [Aspergillus nidulans FGSC A4] gi|40742708|gb|EAA61898.1| AN9065.2 [Aspergillus nidulans FGSC A4] gi|259485524|tpe|CBF82618.1| TPA: mRNA processing protein A4]
  misc_feature (12)..(523): NCBI GI: 212546105 Blast Desc: mRNA processing protein (Mss51), [Penicillium marneffei ATCC 18224] gi|210064726|gb|EEA18821.1| mRNA processing protein (Mss51), [Penicillium marneffei ATCC 18224]
  misc_feature: Useful for introducing or modulating the production of volatile compounds
MEPLSRHATATTCRSCLKSALSHGFYARSARPFSRAASSRHGQLNPSPSGATARSRLSRRPNPAPNSVSPAAQRSLSLFGSQPKETHNESSAFASTTPPRNDNQKPPVLKPDDLFHSYTNSPIPEIRKRAAFIRQHAYCPHPDHAATRMPVEPDNPRLSPSAGSEAPAHVDFECPDCGIPVYCSEQHWAEDYEAHLQICDTLRQINEDDHDLRSGRFFPEFEYAGPQMEEAMVNMTNWDTFLYTRQFEAINDDRSMRQVTRLLTYPLTVGSILHELSPYNIQKGGRLTPEGLKSLSALRYTLHPPRTGGGIGIKGLRPEAPPVRIFILGARAESSLPRNVWVQLAHLFPRGKFHLVFVGPESMANRDDEFPLPPRTASNPFGAIVEDRVWPTMKISTIVDYYHTLHKTGHFHPYDPYFDCFVMFHPGLGHPASSHEWVETVPLLLETKAPIIVTGYTQHDMERDIGWVNETCRGEFDLLMEPGENKFRSLRWDLNDMDPQDVSCGNWGVWAFRGKRYETTHKNTEQS

SEQ ID NO: 22895 - DNA, 9124 bp, Muscodor strobelii; identical to SEQ ID NO: 22892
  misc_feature: SGI EST ID NO. CUFF.54620.2
  misc_feature: Variant of the nucleotide sequence at SEQ ID NO 22893

SEQ ID NO: 22896 - DNA, 3636 bp, Muscodor strobelii
  misc_feature: SGI cDNA ID NO. 567783
  misc_feature: Reduced expression when VOC is produced
  misc_feature: Encodes the peptide sequence at SEQ ID NO 22897
atggcgaccacgtcgaacatgttcctctactcccttacgatccagcagcccacctccatcacacaggccatcctcggtcagttctccggaaccaaggagcagcagattgtcgctgccaatggctctcgtatcacactgatgcgtcctgacccatcccagggcaaggtcatcaccctactgtcctgcgaactgttcggtatcatcagatctatcgccgccttccgcctcgccgggagtagcaaagatttcataatcttagccaccgactctggacgcattgccattatcgaatatgtcccccagcagaaccgcttcaagcagcaaaagcttgagacgtttggtaagtctggcgttcgcagagtcataccaggccagtatttggcttgcgacccgaaagggagagcctgcctgattgctgctatcgagaagaacaaattggtctacgttctgaaccgaaacgcccaggccgagctcaccatctcctcgcctctagaggctcacaaacccggcaccatggtcttggctatgatcgcgttggatgtcggctattcgaaccccgtcttcgctgccttggagattgacacactagaagtcgatcaggaccctactggccaagccatcaccgaggtcgagacgcagctcgtctactacgagctggacctcggcttgaaccacgtcgtgaggaggtggcacgaggccgttgatcccactgcgtctgtgctctttcaggtgccaggaggtaatgacggtcccagtggcgtgctagtctgcggagaagagaatattacgtatcgccactcaaatcaagaggctttccgtgtacctatccccaggagaaaaggcgctaccgaggacccacagcggaagcgaacgatcgtttctggagttatgcataagctgaagggtaacgtcggcgcattctttttccttctacagacggaagatggtgatttgttcaaggtcactatcgaaatggccgaggatgaagatggcaaagccacaggagaggtcaagagactgaggatcaagtacttcgatacagtgcccgtttctaccagcctgtgcatcctgaaaagtggcttcttgtttgtcgccagcgagtttggtaaccaccacttttatcagtttgagaaactgggcgatgatgatgaggaattggagttctctagtgatgatttcccaacagaccctcaggcatcatataaaccagcgtacttctaccccagaccagctgaaaacttaagccttgtggaaagtatcgattctatgaatccgcttgtggattgcaaggtcgcgaacttgacggccgatgacgcaccacagatctacgccatctgcggaaacggtgcaagaagtacattcaggaccctgaaacacggtcttgaagtcaacgagatcgttgcctcggagcttccgggtgttccatctgctgtgtggaccatcaaactgaatcgagacgatcagtatgatgcctatatcatcctatcgttcagcaacggcaccctagtgctcagcattggtgaaaccgtggaagaagtctccgacactggatttctgacgtctgtgcccacccttgcggtccaacagcttggtgaggatggccttctgcaggttcacccgaaaggtattcgtcacattatcaacggacagatcaatgaatggcccgcaccacaacatcggtcgatcgtcgctgcgtctacgaatgcacggcaagtcgcagtcgcattgagttctggagaaattgtgtattttgaaatggacggtgacggctcgcttgctgaatatgacgagaaaaaggagatgttcgggactgttacgtgtctgagcttaggacaagtaccagaaggccgacttagaagcaatttccttgcggtgggatgtgatgattgcacggttagagtcctgagcttggatcctgagtccaccctggagagcaaatctgtccaggcgttgacagccgcaccatcgtcactgtccatcatgtcgatggaagactcttcattcggtggccaaactctatatcttcatattggtctacattccggagtttatctgagaaccgttctggatgaggtgaccggcgagttgacggacacacgtcagaaattccttgggccaaaggccgtgcgacttttccaagttaccatacaaggtcgcacctgtgtgttggcactcagttctagaacgtggcttgggtactcggatcccattaccaaaggttttatgatgacgcctctggactacaccgatttggaatggggctggaatttcagcagtgagcaatgtgaagagggtatggtcggtattcagggccaaaatctgaagatcttttctatcgacaagttgacagatacagtacttcagcaaaccattccgcttacttacactcccaaacgccttgtaaagcatccagagcagccttatttctacactatcgaatcggataacaatacattacctccagagcttcgtgcccaacttctagcggacccggccgtcgttaacggtgacgctgcagtcttggcacctgaggattttggctacccgaagggtcgtggccgttgggcatcgtgtattagtgttgtcgatcctctcatcgagagacgcgttcttcagactctcgatcttaccgacaatgaggctgctgtgagcatggctgtcgtttcgttcgccagtcaagataatgaaaccttcctcgtggtaggtaccgggaaagacatgattctgagtccgcgccagttcagtgaggggtacatccacgtctacagattccgagacggtggtagggaaattgagtttatccacaagaccaaggttgacgaaccgcctatggcactcgcccagttccaaggacgcttactagctggggtggggaagacccttttgtcatatgaccttggtctccgacagttgctccgaaaatcacaggccgatgtaactcctcagctcatcgtgtcgttacaaacacaagggagtcgcatcatcgttggcgatgtacaacagagtgttaccttcgttgcttacaagtacgagagtaacaagttgatccctttcgctgatgatactataccccggtggaccaactgctccgctatggtggactatgagtcggttgcgggaggcgataagtttggcaacatatggattgttcgatgtccccagaaggccagcgaggaagccgacgaggataacgtgggagcacatcttcaacacgcccgcgaatatcttcatggctcaaaccaccggttgagtctaatgacgcatttctatgcgcaagacgttcccacaagcatcagcaaaactaatctggtcgtcggcggtcaggatgttctgctctggagcggcatacaaggcacagttggtgtcttcataccgttcttgagtcgtgaggatgtcgacttcttccagaatctagaatcccatatgcgcagcgaggatccaccactcgccggcagagatcacttgatataccgaagctactacgcaccggtcaaaggtgtcattgacggcgatctctgcgagagatttgctcttcttcttaatgacaagaagcagattattgcgggagagctcgatcgttctgtgagagaaattgagaggaaaatttcggatatccgaactcggtctgcattttga

SEQ ID NO: 22897 - protein, 1211 aa, Muscodor strobelii
  misc_feature: SGI Peptide ID NO. 567783
  misc_feature (853)..(1153): Pfam Id: PF03178 Pfam Desc: CPSF A subunit region
  misc_feature (1)..(1203): NCBI GI: 115390120 Blast Desc: splicing factor 3B subunit 3 [Aspergillus terreus NIH2624] gi|114194961|gb|EAU36661.1| splicing factor 3B subunit 3 [Aspergillus terreus NIH2624]
  misc_feature (1)..(1211): NCBI GI: 259485100 Blast Desc: TPA: Pre-mRNA-splicing factor rse1 [Source:UniProtKB/Swiss-Prot;Acc:Q5B1X8] [Aspergillus nidulans FGSC A4]
  misc_feature (1)..(1211): NCBI GI: 258570355 Blast Desc: pre-mRNA splicing factor rse1 [Uncinocarpus reesii 1704] gi|237904251|gb|EEP78652.1| pre-mRNA splicing factor rse1 [Uncinocarpus reesii 1704]
  misc_feature (1)..(1203): NCBI GI: 67538564 Blast Desc: AN5452.2 [Aspergillus nidulans FGSC A4] gi|74595133|sp|Q5B1X8.1|RSE1_EMENI RecName: Full=Pre-mRNA-splicing factor rse1 gi|40743422|gb|EAA62612.1| A4]
  misc_feature (1)..(1211): NCBI GI: 255946770 Blast Desc: Pc22g01070 [Penicillium chrysogenum Wisconsin 54-1255] gi|211591169|emb|CAP97395.1| Pc22g01070 [Penicillium chrysogenum Wisconsin 54-1255]
  misc_feature (1)..(1208): NCBI GI: 238487250 Blast Desc: nuclear mRNA splicing factor, [Aspergillus flavus NRRL3357] gi|220699742|gb|EED56081.1| nuclear mRNA splicing factor, [Aspergillus flavus NRRL3357]
  misc_feature (1)..(1208): NCBI GI: 169770351 Blast Desc: [Aspergillus oryzae RIB40] gi|83767504|dbj|BAE57643.1| protein product [Aspergillus oryzae]
  misc_feature (1)..(1127): NCBI GI: 156051126 Blast Desc: SS1G_06970 [Sclerotinia sclerotiorum 1980] gi|154704748|gb|EDO04487.1| SS1G_06970 [Sclerotinia sclerotiorum 1980]
  misc_feature (1)..(1057): NCBI GI: 261360227 Blast Desc: pre-mRNA-splicing factor rse-1 [Verticillium albo-atrum VaMs.102]
  misc_feature (1)..(995): NCBI GI: 154295205 Blast Desc: pre-mRNA splicing factor 3b [Botryotinia fuckeliana B05.10] gi|150844143|gb|EDN19336.1| pre-mRNA splicing factor 3b [Botryotinia fuckeliana B05.10]
  misc_feature: Useful for introducing or modulating the production of volatile compounds
MATTSNMFLYSLTIQQPTSITQAILGQFSGTKEQQIVAANGSRITLMRPDPSQGKVITLLSCELFGIIRSIAAFRLAGSSKDFIILATDSGRIAIIEYVPQQNRFKQQKLETFGKSGVRRVIPGQYLACDPKGRACLIAAIEKNKLVYVLNRNAQAELTISSPLEAHKPGTMVLAMIALDVGYSNPVFAALEIDTLEVDQDPTGQAITEVETQLVYYELDLGLNHVVRRWHEAVDPTASVLFQVPGGNDGPSGVLVCGEENITYRHSNQEAFRVPIPRRKGATEDPQRKRTIVSGVMHKLKGNVGAFFFLLQTEDGDLFKVTIEMAEDEDGKATGEVKRLRIKYFDTVPVSTSLCILKSGFLFVASEFGNHHFYQFEKLGDDDEELEFSSDDFPTDPQASYKPAYFYPRPAENLSLVESIDSMNPLVDCKVANLTADDAPQIYAICGNGARSTFRTLKHGLEVNEIVASELPGVPSAVWTIKLNRDDQYDAYIILSFSNGTLVLSIGETVEEVSDTGFLTSVPTLAVQQLGEDGLLQVHPKGIRHIINGQINEWPAPQHRSIVAASTNARQVAVALSSGEIVYFEMDGDGSLAEYDEKKEMFGTVTCLSLGQVPEGRLRSNFLAVGCDDCTVRVLSLDPESTLESKSVQALTAAPSSLSIMSMEDSSFGGQTLYLHIGLHSGVYLRTVLDEVTGELTDTRQKFLGPKAVRLFQVTIQGRTCVLALSSRTWLGYSDPITKGFMMTPLDYTDLEWGWNFSSEQCEEGMVGIQGQNLKIFSIDKLTDTVLQQTIPLTYTPKRLVKHPEQPYFYTIESDNNTLPPELRAQLLADPAVVNGDAAVLAPEDFGYPKGRGRWASCISVVDPLIERRVLQTLDLTDNEAAVSMAVVSFASQDNETFLVVGTGKDMILSPRQFSEGYIHVYRFRDGGREIEFIHKTKVDEPPMALAQFQGRLLAGVGKTLLSYDLGLRQLLRKSQADVTPQLIVSLQTQGSRIIVGDVQQSVTFVAYKYESNKLIPFADDTIPRWTNCSAMVDYESVAGGDKFGNIWIVRCPQKASEEADEDNVGAHLQHAREYLHGSNHRLSLMTHFYAQDVPTSISKTNLVVGGQDVLLWSGIQGTVGVFIPFLSREDVDFFQNLESHMRSEDPPLAGRDHLIYRSYYAPVKGVIDGDLCERFALLLNDKKQIIAGELDRSVREIERKISDIRTRSAF

SEQ ID NO: 22898 - DNA, 10655 bp, Muscodor strobelii
  misc_feature: SGI EST ID NO. CUFF.54068.1
  misc_feature: Variant of the nucleotide sequence at SEQ ID NO 22896
ggaagcttgagtgggctctccaggcagcccagccactaggaaccatgctgcacaacccaccaatgctgtctctaacagagcttcacctcgcagacatacaaaaattcgccagccgtggcagacatacctctcccgcaatctcatcatactaatgtgtacaacgctgcgactctgaacttcacgactgtcacgactctttatatgtaataaaacacgtctggctctatcctatacccctcgattatcgcgagtatctccttcaacactaggccgcgcaggctttctgcgcattcgttacagccatggcgaccacgtcgaacatgttcctctactcccttacgatccagcagcccacctccatcacacaggccatcctcggtcagttctccggaaccaaggagcagcagattgtcgctgccaatggctctcgtatcacactgatgcgtcctgacccatcccagggcaaggtcatcaccctactgtcctgcgaactgttcggtatcatcagatctatcgccgccttccgcctcgccgggagtagcaaaggtatgtctacagcctcctatgtcttgaccttccacttagtcattctcaagcgccgatggtaatcctttgatgccagatccctcctccacgacctctctcgttatgatttcataatcttagccaccgactctggacgcattgccattatcgaatatgtcccccagcagaaccgcttcaagcagcaaaagcttgagacgtttggtaagtctggcgttcgcagagtcataccaggccagtatttggcttgcgacccgaaagggagagcctgcctgattgctgctatcgagaagaacaaattggtctacgttctgaaccgaaacgcccaggccgagctcaccatctcctcgcctctagaggctcacaaacccggcaccatggtcttggctatgatcgcgttggatgtcggctattcgaaccccgtcttcgctgccttggagattgacacactagaagtcgatcaggaccctactggccaagccatcaccgaggtcgagacgcagctcgtctactacgagctggacctcggcttgaaccacgtcgtgaggaggtggcacgaggccgttgatcccactgcgtctgtgctctttcaggtgccaggaggtaatgacggtcccagtggcgtgctagtctgcggagaagagaatattacgtatcgccactcaaatcaagaggctttccgtgtacctatccccaggagaaaaggcgctaccgaggacccacagcggaagcgaacgatcgtttctggagttatgcataagctgaagggtaacgtcggcgcattctttttccttctacagacggaagatggtgatttgttcaaggtcactatcgaaatggccgaggatgaagatggcaaagccacaggagaggtcaagagactgaggatcaagtacttcgatacagtgcccgtttctaccagcctgtgcatcctgaaaagtggcttcttgtttgtcgccagcgagtttggtaaccaccacttttatcagtttgagaaactgggcgatgatgatgaggaattggagttctctagtgatgatttcccaacagaccctcaggcatcatataaaccagcgtacttctaccccagaccagctgaaaacttaagccttgtggaaagtatcgattctatgaatccgcttgtggattgcaaggtcgcgaacttgacggccgatgacgcaccacagatctacgccatctgcggaaacggtgcaagaagtacattcaggaccctgaaacacggtcttgaagtcaacgagatcgttgcctcggagcttccgggtgttccatctgctgtgtggaccatcaaactgaatcgagacgatcagtatgatgcctatatcatcctatcgttcagcaacggcaccctagtgctcagcattggtgaaaccgtggaagaagtctccgacactggatttctgacgtctgtgcccacccttgcggtccaacagcttggtgaggatggccttctgcaggttcacccgaaaggtattcgtcacattatcaacggacagatcaatgaatggcccgcaccacaacatcggtcgatcgtcgctgcgtctacgaatgcacggcaagtcgcagtcgcattgagttctggagaaattgtgtattttgaaatggacggtgacggctcgcttgctgaatatgacgagaaaaaggagatgttcgggactgttacgtgtctgagcttaggacaagtaccagaaggccgacttagaagcaatttccttgcggtgggatgtgatgattgcacggttagagtcctgagcttggatcctgagtccaccctggagagcaaatctgtccaggcgttgacagccgcaccatcgtcactgtccatcatgtcgatggaagactcttcattcggtggccaaactctatatcttcatattggtctacattccggagtttatctgagaaccgttctggatgaggtgaccggcgagttgacggacacacgtcagaaattccttgggccaaaggccgtgcgacttttccaagttaccatacaaggtcgcacctgtgtgttggcactcagttctagaacgtggcttgggtactcggatcccattaccaaaggttttatgatgacgcctctggactacaccgatttggaatggggctggaatttcagcagtgagcaatgtgaagagggtatggtcggtattcagggccaaaatctgaagatcttttctatcgacaagttgacagatacagtacttcagcaaaccattccgcttacttacactcccaaacgccttgtaaagcatccagagcagccttatttctacactatcgaatcggataacaatacattacctccagagcttcgtgcccaacttctagcggacccggccgtcgttaacggtgacgctgcagtcttggcacctgaggattttggctacccgaagggtcgtggccgttgggcatcgtgtattagtgttgtcgatcctctcatcgagagacgcgttcttcagactctcgatcttaccgacaatgaggctgctgtgagcatggctgtcgtttcgttcgccagtcaagataatgaaaccttcctcgtggtaggtaccgggaaagacatgattctgagtccgcgccagttcagtgaggggtacatccacgtctacagattccgagacggtggtagggaaattgagtttatccacaagaccaaggttgacgaaccgcctatggcactcgcccagttccaaggacgcttactagctggggtggggaagacccttttgtcatatgaccttggtctccgacagttgctccgaaaatcacaggccgatgtaactcctcagctcatcgtgtcgttacaaacacaagggagtcgcatcatcgttggcgatgtacaacagagtgttaccttcgttgcttacaagtacgagagtaacaagttgatccctttcgctgatgatactataccccggtggaccaactgctccgctatggtggactatgagtcggttgcgggaggcgataagtttggcaacatatggattgttcgatgtccccagaaggccagcgaggaagccgacgaggataacgtgggagcacatcttcaacacgcccgcgaatatcttcatggctcaaaccaccggttgagtctaatgacgcatttctatgcgcaagacgttcccacaagcatcagcaaaactaatctggtcgtcggcggtcaggatgttctgctctggagcggcatacaaggcacagttggtgtcttcataccgttcttgagtcgtgaggatgtcgacttcttccagaatctagaatcccatatgcgcagcgaggatccaccactcgccggcagagatcacttgatataccgaagctactacgcaccggtcaaaggtgtcattgacggcgatctctgcgagagatttgctcttcttcttaatgacaagaagcagattattgcgggagagctcgatcgttctgtgagagaaattgagaggaaaatttcggatatccgaactcggtctgcattttgatgcgaacacgaccgcttaggagaggtacatctatgggtctcatcatttggtagccggtaccttaggttggcattggcaaagccgccgacacaggatgctatccgccacggttcgaaattgctctcacaccactcctctcgccccgggctggctttttaccccttttgacggcctcgatggggtgggtccgctcccattcttcatcggcaaagtaggcatcggaagcggcttgcaggtcgtagccggcctgttcgagatagagcagagctacctcatagtcatgtactttacaggcaaccatccaccgacggatcttggctttcctggcttcttcctcctcgccctcgacgggcctcggggacaggctgacaccgcccttatagtactcgccaggtatgattacggttcgccgcccgagaatcagattatcggaatgaatatggtttgcacgcctcagggctgaagccgggacgccatagcggagcgacagcgagtttatactgtcgtgtgcatggtctacaaagtgaaggacatcctcggcgggctcatctcgggccgcggccgacttctcgtcttgtggcgtcagaggtgacaggcctttggcactggggaaatacggaggcggtggagcgaggttggaggagctgttggcgccggagacggaatatgacggtggatcccgcaaaccgggcggtagggttgaatcggtatgggagatttgacaatagggacaataggtttggaagcggtagttattctgcaggtatcacggcagtcagcccaagtgcgtcgaagctgagcgaggacagctttggacttcaatgatcaaattattcccaaacatacatgaatgcagtggccacatataacgcgggggcaacagtctaagcggcgatgctggggcaagggcttttcagagccggtaaattgaggcacctccgagagcaaggttgcgcaagtgcagcaagactctgtgacggaggcaacaggccgctctttggcgatagtcatgacgggtgggatctagatgtcttcgcagctatctacggtagtatcggagcctggaggatgagacggatcaaatgatatctagctaacaatgttggtaatgatagtacttagtaagccaatctcggcagagtgagggctacggtgatgattgatattgaatatacaatctatatggtggtgtagacagttgtctttgacatttatgaggcgaagatatttacaggtagagtgcagataatgaatgacctcttctaaatggtcgattgcgttgtcgtgtgtctgagacgaggaccctgggttgggggggttagagatggatgacgttagcgttatccacggcgcatttccatggtgcatgcatgtaccctgttccgccgctgcgggtggagaggtcgagcctcttaggcgccgatggagagcctctcgcctccatgccagagcggtggttcaaattgttggggttctattggaggttcgaatcggggactgatgtcaatgtcgggttaccttagtaattcgagatacttcagttcagtttagttctttgttgtgcagctgctaaacattccaacaagcttcgtgcgggagacatcgcatgcaacgacgtaattaattagcgggcgcatttgttttggaacctaaggaagccgatccccatacttataatcccaattcttcgtcttctcgagcccatggtttttgcgataggcaagtaaagaccgccgcccaacggcttaggcggcttcgacagtaaccggcgagctctcttgcaacaagacgttgttggtagcggcgtatccgtcggattgtacactattgacccccgacgcatactcgtaactccagtcctagagagtaataaaccgacaaagcatctacagtataaccgcatccgaatctatcctatatcgtgatcagattcgagcagatatacctcattttaccttgctggacctacgccctaccgtacgacctaactcgatgatccgataacaccgtcagatatccgcacagagacgtttcttctctggccatgtctgacggcgctcctgcggcctcgcccgcccctccgcctgcgccggccaagtactcgagtccctccatacctgtcaccctcaacgaggccggtctcgactctccatctttccgagccaatgccgtcttcttcgccgaccaggccgatgccatcgagcgctggctggatggctacgtcaagactacctcgaagctttcccacgacatcacaggccttgaagagtgcataaacaactacttgtccaagatcgtgcccccgccgaccatcacctccgtcgaccatgactatactgcgctcgctctcaagagaatcagtgagggctccaaggagtggtggacccaggtgttgaacacggcgaggaagatagacactctctctgtagaccccatccgcatttttcttcagggtgacctgcggaacttcaaagagacaaagcggaccctcgagcagacgcagaagacgtttgattccacactggcccgttatgtcagccagtccaagacgaaggagccctctgctctccgcgaggatgccttcactgtatacgagacccgcaaggcctacctcaaggcatccatggacttttgtttcttcgctccccagctccgcctcaatctcgacaagttgctggtacgtgtctccttcgacatctttcgtgagatgaagaaatctcgagacagctccgggagcttctcgaagtacggtcaggagatggatcgtctgaggggttggtccaaagagatggagttgactgaatccatcttcaaacgtgagcttcagatggctagacgcgatattggagagtacacgttgtcgagccaaaagccatcgcgagagatcgacgactacagtgcctcaacggtgccattcttggggtccaggggtcccatgaacgtcgcaactcagggcaagaccgcaatcatctcggagaagcaaggctggctcttcttgcggactatatacggaaagccgtcccgcacgagttggatccggcgatggtactactgtagagatggtatctttggctggctcgtcaactcgcctcaaggcgtacttcagggcgatgagattggcgtcttgctttgtaacgcaaagcccgctgttcaagaggagcgtcgattctgtttcgaagtgaaaacgaaaaatcagacgctactcttacaggctgaaacacaatctcagttgatggaatggctagaagtcttcgaagtggctaaaaagcgtgcattcgaagccagcgtaggacgcgatacatcgtctctccccggcggtgttgatccggctttctccatcacgcctcctttcctaccagagttctctgccaaatcgttcgatacgcaatttgatgaacaagccggcccggatcgagttgggacccttccagtcccagctggagagggcgggcttgccacgaggccgagcttcgatgttacccaagcacccccaaagcgctcagtgacatcattagctcgcgaagaaggcgaaagcggacgcgagcatgcagctagaatcatgcagaagcttgacctccatcggaagacagctttcgcatcaggggctgattcgcccgtcgctgcgccgtcgcctggtccaactggaggcattgccagtctcatatctgctagtcacggtcttctacctggatattccgtaccttccatcaatcaaacggggactaataagcctcaacaagggcagatgccgcttggtccagagttacagcccggcagtctggcgcctgctactttggcgaagccgccatccgccactgtacttagcaagacagctgtagcatatagtggtgaaagggcactcacagcgaatcccacgcagctgatgcccactgccatcatggctaattactggggaagcaatgcttgggccatcgagcattccgctagatcaagtcgtacagatctcgcttctgacgaccccttcggccctaattcaccttccatcaagatgaccaccttgggagaggacgagactctgcaaagcccgtcttccacatctctacataaaaaagctatcagtatggatgcaaagatgagtgttccaaaggttgtgcagcctcctcgagagaaggtggtccaagaaaccttcccgcctaaatatcctacggagctcaagacaaactccgctcaattccgactgctttttcccaacgtgccgctggacgagaagctggtgctggtgttccgggcatcgtggagtagtacttctgaatccgacaaggacatgccccaaatggctggtaatggtcgagtctatgtcacttcggataatatgtacttctatgggcatcaaatgggccttgttgtggcatatacaatcagtcttgacacgatcacagaagtgacatcagcaccgggcaaggattgtgacttcattttcctccatttaaatcaagagtctagtgacgtcggctatacacggatcactataaagacgttcctcgaggacctggatctcttacatgcgcgcttgaacctcctcatcgatgacttacaagcagaagagcccatggatgtccccgaactcatcaaggcccttaccacgatggagaaagaagatgtcaaacagcgaagccccagtgcggatagttgggaagacgtttctgcacacacgcctattgatgacgggacggcggctggaagggcagttagcccccgagcaactgactttgcgtataagtcacgaaaaggagctgcacgcaagccttatcctcagcttcaacttccaacccatgccgtaatctacgaaccagaagacacgccaaacaaggttgcagagcggagttttgagatcagcgctaaagcatgcttccatgtgttgtttggagacaagagcttcatcttcccgaaactctacttcgaacgaagggctcagcaaatcgctcaaggcccctggaagacaaacgagtctgggaacatgcaaagaatgttccgcttcaaagtcaattacaatcgtcttggccgcggccacgaggaagaaattactgattatcagaccatcgaactcttcagtgaccacgttacatacgtgattacacatgagaagacaccttggcacttaccgcatgcgcatggattcaaactcgtcactaaaatcgtcatcacgcatgtggccaagtcgaaatgtaaactcgcgattttcacgaaggtcgtctggtcaaacgcaccgacattcaccaagaagcttgtcgagcggcaagcgcttaacgatgcgaaggacgatggtgaggagttagccgaggtggctacggaccaagttcggagactaggccatcatagccgaacgaaacgggctatccaagtctatggcaacgtaggactacagtcgcaagtcgtcgtcttctcgccaaacgagtcggaagcatcgaggaaacctctgatcaacccccgatctctgagttctatgttattcgacactggccggtcatttggggagagtgtcgcgtcgtcgctcgtgatgtgggcttttgctgtgctaaaaaagctgtggaatgtcgtgtctgcgcagcggattctcatcgcgttgctggcgtttagcgttcttgccaatgtcactttctcgtcgcagggtacggcgacgtggtggagcgagagacgggctgcggggtttatgaatcggattggtgtccatccgaatgttatgatgagcaaggctatctacttgtcggacttggatgaggcggctgagagctccgcgattcgcgtctcttggccgcaggagagctattgttactcgacattccaatctatagcgaacacaagcagtatcgacacaccagccgaagacgcgggctccacgctttcacattggggcccgagccgtgctacggcgagacgcctccggaatacgcgccagaaacttggatcgtatcggcatgatctcgtcgtggcgatgagactggtgaatagcgtggagaaggagatgttgaggagcgagtgggagaattggttgtttgatgagaataggaggtgtgagcaggttggtgatgtgctaagagaacctatcgctagcgctagcgcacaggcaagatcggggaaggaacagaaggtgattgggggtgggggacaggatgatggtaggaaagagggtttgaggaagtggtatgaggagtattgtgggagttgtaggatggatcatgaggtgcttttgagagagagggaggggggtagtttgggtagtattgcataaaggagaagggaggaggatggaaaggaatgacaggaattgtatatggagactaagatatgaatattggtattgggtattgaatattacttggtataccctttctggttattttgagatttgcggagtaaagtggtggtgatatactgtttgcgcaatagctgggcgcggtggtttccttgggtattattgcatgaccatggtgagagagtcgaagggttatagtgctcaactgttggcatagcatctgtgggatatcaataaggatcattgaattgcacagtgtccttcgggacaaaatagcgcaatcagtagtggtacttcaaatacaacagcaccgagatactgttcaacgaaggatctgg

SEQ ID NO: 22899 - DNA, 693 bp, Muscodor strobelii
  misc_feature: SGI cDNA ID NO. 567784
  misc_feature: Encodes the peptide sequence at SEQ ID NO 22900
atgactatcgccaaagagcggcctgttgcctccaataactaccgcttccaaacctattgtccctattgtcaaatctcccataccgattcaaccctaccgcccggtttgcgggatccaccgtcatattccgtctccggcgccaacagctcctccaacctcgctccaccgcctccgtatttccccagtgccaaaggcctgtcacctctgacgccacaagacgagaagtcggccgcggcccgagatgagcccgccgaggatgtccttcactttgtagaccatgcacacgacagtataaactcgctgtcgctccgctatggcgtcccggcttcagccctgaggcgtgcaaaccatattcattccgataatctgattctcgggcggcgaaccgtaatcatacctggcgagtactataagggcggtgtcagcctgtccccgaggcccgtcgagggcgaggaggaagaagccaggaaagccaagatccgtcggtggatggttgcctgtaaagtacatgactatgaggtagctctgctctatctcgaacaggccggctacgacctgcaagccgcttccgatgcctactttgccgatgaagaatgggagcggacccaccccatcgaggccgtcaaaaggggtaaaaagccagcccggggcgagaggagtggtgtgagagcaatttcgaaccgtggcggatag

SEQ ID NO: 22900 - protein, 230 aa, Muscodor strobelii
  misc_feature: SGI Peptide ID NO. 567784
  misc_feature (96)..(133): Pfam Id: PF01476 Pfam Desc: LysM domain
  misc_feature (11)..(230): NCBI GI: 189209007 Blast Desc: conserved [Pyrenophora tritici-repentis Pt-1C-BFP] gi|187976929|gb|EDU43555.1| conserved [Pyrenophora tritici-repentis Pt-1C-BFP]
  misc_feature (11)..(219): NCBI GI: 169598396 Blast Desc: SNOG_02002 [Phaeosphaeria nodorum SN15] gi|160704386|gb|EAT90214.2| SNOG_02002 [Phaeosphaeria nodorum SN15]
  misc_feature (35)..(221): NCBI GI: 46125737 Blast Desc: FG07246.1 [Gibberella zeae PH-1]
  misc_feature (12)..(212): NCBI GI: 39977107 Blast Desc: MGG_06456 [Magnaporthe grisea 70-15] gi|145016126|gb|EDK00616.1| MGG_06456 [Magnaporthe grisea 70-15]
  misc_feature (13)..(205): NCBI GI: 156051128 Blast Desc: SS1G_06971 [Sclerotinia sclerotiorum 1980] gi|154704749|gb|EDO04488.1| SS1G_06971 [Sclerotinia sclerotiorum 1980]
  misc_feature (39)..(228): NCBI GI: 154295203 Blast Desc: BC1G_13415 [Botryotinia fuckeliana B05.10] gi|150844142|gb|EDN19335.1| BC1G_13415 [Botryotinia fuckeliana B05.10]
  misc_feature (13)..(213): NCBI GI: 171685750 Blast Desc: protein product [Podospora anserina] gi|170942836|emb|CAP68489.1| protein product [Podospora anserina]
  misc_feature (81)..(206): NCBI GI: 261360226 Blast Desc: conserved [Verticillium albo-atrum VaMs.102]
  misc_feature (13)..(217): NCBI GI: 116207184 Blast Desc: CHGG_02885 [Chaetomium globosum CBS 148.51] gi|88183482|gb|EAQ90950.1| CHGG_02885 [Chaetomium globosum CBS 148.51]
MTIAKERPVASNNYRFQTYCPYCQISHTDSTLPPGLRDPPSYSVSGANSSSNLAPPPPYFPSAKGLSPLTPQDEKSAAARDEPAEDVLHFVDHAHDSINSLSLRYGVPASALRRANHIHSDNLILGRRTVIIPGEYYKGGVSLSPRPVEGEEEEARKAKIRRWMVACKVHDYEVALLYLEQAGYDLQAASDAYFADEEWERTHPIEAVKRGKKPARGERSGVRAISNRGG

SEQ ID NO: 22901 - DNA, 4206 bp, Muscodor strobelii
  misc_feature: SGI cDNA ID NO. 567785
  misc_feature: Encodes the peptide sequence at SEQ ID NO 22902
atgtctgacggcgctcctgcggcctcgcccgcccctccgcctgcgccggccaagtactcgagtccctccatacctgtcaccctcaacgaggccggtctcgactctccatctttccgagccaatgccgtcttcttcgccgaccaggccgatgccatcgagcgctggctggatggctacgtcaagactacctcgaagctttcccacgacatcacaggccttgaagagtgcataaacaactacttgtccaagatcgtgcccccgccgaccatcacctccgtcgaccatgactatactgcgctcgctctcaagagaatcagtgagggctccaaggagtggtggacccaggtgttgaacacggcgaggaagatagacactctctctgtagaccccatccgcatttttcttcagggtgacctgcggaacttcaaagagacaaagcggaccctcgagcagacgcagaagacgtttgattccacactggcccgttatgtcagccagtccaagacgaaggagccctctgctctccgcgaggatgccttcactgtatacgagacccgcaaggcctacctcaaggcatccatggacttttgtttcttcgctccccagctccgcctcaatctcgacaagttgctggtacgtgtctccttcgacatctttcgtgagatgaagaaatctcgagacagctccgggagcttctcgaagtacggtcaggagatggatcgtctgaggggttggtccaaagagatggagttgactgaatccatcttcaaacgtgagcttcagatggctagacgcgatattggagagtacacgttgtcgagccaaaagccatcgcgagagatcgacgactacagtgcctcaacggtgccattcttggggtccaggggtcccatgaacgtcgcaactcagggcaagaccgcaatcatctcggagaagcaaggctggctcttcttgcggactatatacggaaagccgtcccgcacgagttggatccggcgatggtactactgtagagatggtatctttggctggctcgtcaactcgcctcaaggcgtacttcagggcgatgagattggcgtcttgctttgtaacgcaaagcccgctgttcaagaggagcgtcgattctgtttcgaagtgaaaacgaaaaatcagacgctactcttacaggctgaaacacaatctcagttgatggaatggctagaagtcttcgaagtggctaaaaagcgtgcattcgaagccagcgtaggacgcgatacatcgtctctccccggcggtgttgatccggctttctccatcacgcctcctttcctaccagagttctctgccaaatcgttcgatacgcaatttgatgaacaagccggcccggatcgagttgggacccttccagtcccagctggagagggcgggcttgccacgaggccgagcttcgatgttacccaagcacccccaaagcgctcagtgacatcattagctcgcgaagaaggcgaaagcggacgcgagcatgcagctagaatcatgcagaagcttgacctccatcggaagacagctttcgcatcaggggctgattcgcccgtcgctgcgccgtcgcctggtccaactggaggcattgccagtctcatatctgctagtcacggtcttctacctggatattccgtaccttccatcaatcaaacggggactaataagcctcaacaagggcagatgccgcttggtccagagttacagcccggcagtctggcgcctgctactttggcgaagccgccatccgccactgtacttagcaagacagctgtagcatatagtggtgaaagggcactcacagcgaatcccacgcagctgatgcccactgccatcatggctaattactggggaagcaatgcttgggccatcgagcattccgctagatcaagtcgtacagatctcgcttctgacgaccccttcggccctaattcaccttccatcaagatgaccaccttgggagaggacgagactctgcaaagcccgtcttccacatctctacataaaaaagctatcagtatggatgcaaagatgagtgttccaaaggttgtgcagcctcctcgagagaaggtggtccaagaaaccttcccgcctaaatatcctacggagctcaagacaaactccgctcaattccgactgctttttcccaacgtgccgctggacgagaagctggtgctggtgttccgggcatcgtggagtagtacttctgaatccgacaaggacatgccccaaatggctggtaatggtcgagtctatgtcacttcggataatatgtacttctatgggcatcaaatgggccttgttgtggcatatacaatcagtcttgacacgatcacagaagtgacatcagcaccgggcaaggattgtgacttcattttcctccatttaaatcaagagtctagtgacgtcggctatacacggatcactataaagacgttcctcgaggacctggatctcttacatgcgcgcttgaacctcctcatcgatgacttacaagcagaagagcccatggatgtccccgaactcatcaaggcccttaccacgatggagaaagaagatgtcaaacagcgaagccccagtgcggatagttgggaagacgtttctgcacacacgcctattgatgacgggacggcggctggaagggcagttagcccccgagcaactgactttgcgtataagtcacgaaaaggagctgcacgcaagccttatcctcagcttcaacttccaacccatgccgtaatctacgaaccagaagacacgccaaacaaggttgcagagcggagttttgagatcagcgctaaagcatgcttccatgtgttgtttggagacaagagcttcatcttcccgaaactctacttcgaacgaagggctcagcaaatcgctcaaggcccctggaagacaaacgagtctgggaacatgcaaagaatgttccgcttcaaagtcaattacaatcgtcttggccgcggccacgaggaagaaattactgattatcagaccatcgaactcttcagtgaccacgttacatacgtgattacacatgagaagacaccttggcacttaccgcatgcgcatggattcaaactcgtcactaaaatcgtcatcacgcatgtggccaagtcgaaatgtaaactcgcgattttcacgaaggtcgtctggtcaaacgcaccgacattcaccaagaagcttgtcgagcggcaagcgcttaacgatgcgaaggacgatggtgaggagttagccgaggtggctacggaccaagttcggagactaggccatcatagccgaacgaaacgggctatccaagtctatggcaacgtaggactacagtcgcaagtcgtcgtcttctcgccaaacgagtcggaagcatcgaggaaacctctgatcaacccccgatctctgagttctatgttattcgacactggccggtcatttggggagagtgtcgcgtcgtcgctcgtgatgtgggcttttgctgtgctaaaaaagctgtggaatgtcgtgtctgcgcagcggattctcatcgcgttgctggcgtttagcgttcttgccaatgtcactttctcgtcgcagggtacggcgacgtggtggagcgagagacgggctgcggggtttatgaatcggattggtgtccatccgaatgttatgatgagcaaggctatctacttgtcggacttggatgaggcggctgagagctccgcgattcgcgtctcttggccgcaggagagctattgttactcgacattccaatctatagcgaacacaagcagtatcgacacaccagccgaagacgcgggctccacgctttcacattggggcccgagccgtgctacggcgagacgcctccggaatacgcgccagaaacttggatcgtatcggcatgatctcgtcgtggcgatgagactggtgaatagcgtggagaaggagatgttgaggagcgagtgggagaattggttgtttgatgagaataggaggtgtgagcaggttggtgatgtgctaagagaacctatcgctagcgctagcgcacaggcaagatcggggaaggaacagaaggtgattgggggtgggggacaggatgatggtaggaaagagggtttgaggaagtggtatgaggagtattgtgggagttgtaggatggatcatgaggtgcttttgagagagagggaggggggtagtttgggtagtattgcataa

SEQ ID NO: 22902 - protein, 1401 aa, Muscodor strobelii
  misc_feature: SGI Peptide ID NO. 567785
  misc_feature (310)..(408): Pfam Id: PF00169 Pfam Desc: PH domain
  misc_feature (23)..(1393): NCBI GI: 145614228 Blast Desc: MGG_08887 [Magnaporthe grisea 70-15] gi|145021171|gb|EDK05300.1| MGG_08887 [Magnaporthe grisea 70-15]
  misc_feature (10)..(1392): NCBI GI: 256733142 Blast Desc: [Nectria haematococca mpVI 77-13-4]
  misc_feature (25)..(1388): NCBI GI: 164429159 Blast Desc: NCU00495 [Neurospora crassa OR74A] gi|157072432|gb|EAA26944.2| conserved [Neurospora crassa OR74A]
  misc_feature (6)..(1393): NCBI GI: 46125097 Blast Desc: FG06926.1 [Gibberella zeae PH-1]
  misc_feature (18)..(1389): NCBI GI: 171686184 Blast Desc: protein product [Podospora anserina] gi|170943053|emb|CAP68706.1| protein product [Podospora anserina]
  misc_feature (19)..(1323): NCBI GI: 116207722 Blast Desc: CHGG_03154 [Chaetomium globosum CBS 148.51] gi|88183751|gb|EAQ91219.1| CHGG_03154 [Chaetomium globosum CBS 148.51]
  misc_feature (24)..(1398): NCBI GI: 156051998 Blast Desc: SS1G_07407 [Sclerotinia sclerotiorum 1980] gi|154705184|gb|EDO04923.1| SS1G_07407 [Sclerotinia sclerotiorum 1980]
  misc_feature (11)..(1247): NCBI GI: 154309720 Blast Desc: BC1G_07330 [Botryotinia fuckeliana B05.10] gi|150851791|gb|EDN26984.1| BC1G_07330 [Botryotinia fuckeliana B05.10]
  misc_feature (11)..(1388): NCBI GI: 169764797 Blast Desc: [Aspergillus oryzae RIB40] gi|83764724|dbj|BAE54868.1| protein product [Aspergillus oryzae]
  misc_feature (5)..(1390): NCBI GI: 212527966 Blast Desc: transcription factor SipA3, [Penicillium marneffei ATCC 18224] gi|210073538|gb|EEA27625.1| transcription factor SipA3, [Penicillium marneffei ATCC 18224]
MSDGAPAASPAPPPAPAKYSSPSIPVTLNEAGLDSPSFRANAVFFADQADAIERWLDGYVKTTSKLSHDITGLEECINNYLSKIVPPPTITSVDHDYTALALKRISEGSKEWWTQVLNTARKIDTLSVDPIRIFLQGDLRNFKETKRTLEQTQKTFDSTLARYVSQSKTKEPSALREDAFTVYETRKAYLKASMDFCFFAPQLRLNLDKLLVRVSFDIFREMKKSRDSSGSFSKYGQEMDRLRGWSKEMELTESIFKRELQMARRDIGEYTLSSQKPSREIDDYSASTVPFLGSRGPMNVATQGKTAIISEKQGWLFLRTIYGKPSRTSWIRRWYYCRDGIFGWLVNSPQGVLQGDEIGVLLCNAKPAVQEERRFCFEVKTKNQTLLLQAETQSQLMEWLEVFEVAKKRAFEASVGRDTSSLPGGVDPAFSITPPFLPEFSAKSFDTQFDEQAGPDRVGTLPVPAGEGGLATRPSFDVTQAPPKRSVTSLAREEGESGREHAARIMQKLDLHRKTAFASGADSPVAAPSPGPTGGIASLISASHGLLPGYSVPSINQTGTNKPQQGQMPLGPELQPGSLAPATLAKPPSATVLSKTAVAYSGERALTANPTQLMPTAIMANYWGSNAWAIEHSARSSRTDLASDDPFGPNSPSIKMTTLGEDETLQSPSSTSLHKKAISMDAKMSVPKVVQPPREKVVQETFPPKYPTELKTNSAQFRLLFPNVPLDEKLVLVFRASWSSTSESDKDMPQMAGNGRVYVTSDNMYFYGHQMGLVVAYTISLDTITEVTSAPGKDCDFIFLHLNQESSDVGYTRITIKTFLEDLDLLHARLNLLIDDLQAEEPMDVPELIKALTTMEKEDVKQRSPSADSWEDVSAHTPIDDGTAAGRAVSPRATDFAYKSRKGAARKPYPQLQLPTHAVIYEPEDTPNKVAERSFEISAKACFHVLFGDKSFIFPKLYFERRAQQIAQGPWKTNESGNMQRMFRFKVNYNRLGRGHEEEITDYQTIELFSDHVTYVITHEKTPWHLPHAHGFKLVTKIVITHVAKSKCKLAIFTKVVWSNAPTFTKKLVERQALNDAKDDGEELAEVATDQVRRLGHHSRTKRAIQVYGNVGLQSQVVVFSPNESEASRKPLINPRSLSSMLFDTGRSFGESVASSLVMWAFAVLKKLWNVVSAQRILIALLAFSVLANVTFSSQGTATWWSERRAAGFMNRIGVHPNVMMSKAIYLSDLDEAAESSAIRVSWPQESYCYSTFQSIANTSSIDTPAEDAGSTLSHWGPSRATARRLRNTRQKLGSYRHDLVVAMRLVNSVEKEMLRSEWENWLFDENRRCEQVGDVLREPIASASAQARSGKEQKVIGGGGQDDGRKEGLRKWYEEYCGSCRMDHEVLLREREGGSLGSIA

SEQ ID NO: 22903 - DNA, 10655 bp, Muscodor strobelii; identical to SEQ ID NO: 22898
  misc_feature: SGI EST ID NO. CUFF.54068.1
  misc_feature: Variant of the nucleotide sequence at SEQ ID NO 22901

SEQ ID NO: 22904 - DNA, 3564 bp, Muscodor strobelii
  misc_feature: SGI cDNA ID NO. 567786
  misc_feature: Encodes the peptide sequence at SEQ ID NO 22905
atggctcctccgcaggcaaaaccaagtgagactgaatggctgcaatataagcagcagattcgacgcctgtacctcgaagaagacaagccgcttggtgagctgaaaggcgaattagatgaatgccaattagaatataagctcaagaggtggggatttcggaagaatatcgacaaaagcacatgggcctacatcgatcatcgcattcgaaaacgaaagcgcgtggaagaaaaagagagccaagtcctttactacggcaaggtattgaagcctgaaaagattgtcaaagaaaccaaccgacatagagacattagcatctttgcccaactcacgcgaggacgaagtttgacaccagaggcgcgacacaatgctgcaattgagattcgcactccgccagctacattggtacagattagctggccatcgactctgccttggctccagttcctgacgaaggatatggccatattcatcaatccagccatcgagttagctttaaaacgatcaccatctcagtctcccctttcagccatactgtgccagatgaacggaacacgagcgatattggggagctctatactcaacaccattgagttactttcccgaattgcggctgggctacccgagatctaccctcaggagcattgtcgacaagcccaatgcatatcgaaatggtcgaacgagaagactccatacgaggctttgttacagttcacttacatgctggcaaatggccatttgaggtttggtggccgcaacggagtaaagacacagtggctcgcaattgtcaacatcatgcagcatttcgggctactgaaattggatttgaagcagttaaagttcaaaagcacgatattcgacgggtttctagagagtctttttcgcatgacagtaagtaagttgtcttattgcgccaatccagtgcataaaacatacgccaatgaagaagaggtcgtgcccgttttaatgtggctgctcacatgggctagccgacatctcgacgatgaaattctgcgaagtgccataaacctgggcaacttggagctagtcaatgctattctagacaggtatttcgataacccgtacgattcggagttcattccctacttgcacctggattcggaatcttcgcctcacaagtacttgcagcttgctgtggataacgagcacgatgaagcaacttcactacaaatgatcggctgcctactagcctgcggtgttgaaaatagcattactgaagcgcttcattcagctattgctagggggtattggaacattgcaacaacgctatctgaacaatgtcctgatatcctattcgaaacagtagagtcatgtcaggtgtacatatatcaaaacactgccctgactaccgcagctgcgaccggcctcattcatacaaaagtcgtgttggaaatgcttgcacgccaaagatctaccagctttgtggatagcttcgttacggccgacgcactcattgctgcagcagcagaagggcatgacgaagtacttgtcttcctattgtctctttcaaaaaccaacttcgctagctgtgacggtataacgccgttgcatgcggccgcgctgtacggacatctttcaacttgccaaatactgtggcctctgtactacacacacgtacctgaagttccagtaccactctccccgctccaagtcgcgagctgggctcaacatgatcacatcgtgcgcttcttgattgaaaacggcgaagatgttgaggcagtgactgagcgttctacctcggtaagatcaaaggttgtcaataaatatcttgactgtaactactacgatatcaaacaccgagttaaccatagatattcaccactacaactcacgctgatgtcgagcagctggtattatgagccagacgcacatacatgtgcaactttactactccgcgccggtgcacgagtagtgaaaggcgtcgtcacttggtctgcgtcggcttggcgaattgacgatctcactgcagcactggacacaggcggtaacccaaacgagaaatactacgaggatagatccgcgttacaacttgcactcaatatggatccgaataaggacccccaaaagcagtacccactcaacattttgcgtgacgtcgtggctttacttctgcgtcgtggcgcattgctactcggcggtgaggttgtgtcagccatccagctcaaagcttgggacgtcgtagacctcttgatcgtttacggtggctcgtttcgggacagacatcaactcggcacgaccgcactggaagccctgattaacagcggccagaccgataaagcagtgagggttctgcaagataatccagcacgttacactgctggtgctctttatgccgccaccatgtctggcaacgatatgctgactcggcatatactgtgcaaccgccctacgacgactgagcctgatgcgcttgaggtgacagcgcttgggctggccgcgaagtctgggaacctagaggtgttgcggcttatgctcgtgaaaatcccgagcaaaacggaggccttgactccatatacccgattgaaaggcgatatggtaaagcttgatgactcgcttaaaagttattggtattatcggtatgattttcgtcaccagcgaggaagccctttagctctcgtggcgcaggaaaacagttctctagcactcacggcctctcggatattaattcaagatggatttcaagcggatagattgacttgggttctggcggcttcttcgaacaatcttgcctttgcgcaaatgctgctggacaatggtcagaggttcttagacaatggtacgttgaccagatacgatctcggaaaccctctcgcaatcgcggttgaacaccacaaccaagagctcttcgacgtgctcttgaaggccggattcaaagtcaaggagcataacagatcccggcaatacagtcgatccccactgcaaacagcagcggaagggggcgatatggcgttcatatgtcgcttgctagaattaggcgctgagatcaacgaacttcccgcacgtgatggcggtggaacagcattgcagctcgcggcaatagaaggacacgtcggagtagcgaaatatctcatggaccatggtgccgacgtcaatgcttcaccagcggaccgcagaggtaggaccgctctggagggagcggcagagcacgggagacttgatttgctacatctattgcttgagaacggagctgccatcacaggagcttggcgtcgacattacattagggcagtcaagcttgcaacaggaagaggccactacaccgcggcgaggctcctgaaacgacaaggggagtggacagcaagagatgaagaagaactcgaacttggcattattgatcacggctacgtacgacctattaagtctcgtagttcggtggtccctgactggatgagtgaaggttgtggtgaccttgacagtgctagtgactctgattctgacgatattgttccttctgaggatgaggagggatccagtacgggcgtccccgccatctacagcgacgagttcatgggtgacacagacaactttctattcagtgtaaattag

SEQ ID NO: 22905 - protein, 1187 aa, Muscodor strobelii
  misc_feature: SGI Peptide ID NO. 567786
  misc_feature (1009)..(1041): Pfam Id: PF00023 Pfam Desc: Ankyrin repeat
  misc_feature (517)..(582): Pfam Id: PF00023 Pfam Desc: Ankyrin repeat
  misc_feature (517)..(537): Pfam Id: PF00023 Pfam Desc: Ankyrin repeat
  misc_feature (6)..(1109): NCBI GI: 256730275 Blast Desc: NECHADRAFT_82615 [Nectria haematococca mpVI 77-13-4]
  misc_feature (126)..(1110): NCBI GI: 226294082 Blast Desc: [Paracoccidioides brasiliensis Pb18]
  misc_feature (392)..(1110): NCBI GI: 225684431 Blast Desc: conserved [Paracoccidioides brasiliensis Pb03]
  misc_feature (450)..(1110): NCBI GI: 226284810 Blast Desc: [Paracoccidioides brasiliensis Pb01]
  misc_feature (942)..(1114): NCBI GI: 115492243 Blast Desc: [Aspergillus terreus NIH2624] gi|114197609|gb|EAU39309.1| [Aspergillus terreus NIH2624]
  misc_feature (974)..(1098): NCBI GI: 145252920 Blast Desc: An16g06710 [Aspergillus niger] gi|134083528|emb|CAK47005.1| protein product [Aspergillus niger]
  misc_feature (976)..(1098): NCBI GI: 67516937 Blast Desc: AN0750.2 [Aspergillus nidulans FGSC A4] gi|40746236|gb|EAA65392.1| AN0750.2 [Aspergillus nidulans FGSC A4] gi|259488972|tpe|CBF88858.1| TPA: [Aspergillus nidulans FGSC
  misc_feature (381)..(1112): NCBI GI: 115893423 Blast Desc: : similar to ankyrin 2,3/unc44 [Strongylocentrotus purpuratus] gi|115969040|ref|XP_001185875.1| : similar to ankyrin 2,3/unc44 [Strongylocentrotus purpuratus]
  misc_feature (708)..(1118): NCBI GI: 239607884 Blast Desc: BDCG_08140 [Ajellomyces dermatitidis ER-3]
  misc_feature (538)..(1099): NCBI GI: 238843722 Blast Desc: ankyrin repeat protein [Microsporum canis CBS 113480]
MAPPQAKPSETEWLQYKQQIRRLYLEEDKPLGELKGELDECQLEYKLKRWGFRKNIDKSTWAYIDHRIRKRKRVEEKESQVLYYGKVLKPEKIVKETNRHRDISIFAQLTRGRSLTPEARHNAAIEIRTPPATLVQISWPSTLPWLQFLTKDMAIFINPAIELALKRSPSQSPLSAILCQMNGTRAILGSSILNTIELLSRIAAGLPEIYPQEHCRQAQCISKWSNEKTPYEALLQFTYMLANGHLRFGGRNGVKTQWLAIVNIMQHFGLLKLDLKQLKFKSTIFDGFLESLFRMTVSKLSYCANPVHKTYANEEEVVPVLMWLLTWASRHLDDEILRSAINLGNLELVNAILDRYFDNPYDSEFIPYLHLDSESSPHKYLQLAVDNEHDEATSLQMIGCLLACGVENSITEALHSAIARGYWNIATTLSEQCPDILFETVESCQVYIYQNTALTTAAATGLIHTKVVLEMLARQRSTSFVDSFVTADALIAAAAEGHDEVLVFLLSLSKTNFASCDGITPLHAAALYGHLSTCQILWPLYYTHVPEVPVPLSPLQVASWAQHDHIVRFLIENGEDVEAVTERSTSVRSKVVNKYLDCNYYDIKHRVNHRYSPLQLTLMSSSWYYEPDAHTCATLLLRAGARVVKGVVTWSASAWRIDDLTAALDTGGNPNEKYYEDRSALQLALNMDPNKDPQKQYPLNILRDVVALLLRRGALLLGGEVVSAIQLKAWDVVDLLIVYGGSFRDRHQLGTTALEALINSGQTDKAVRVLQDNPARYTAGALYAATMSGNDMLTRHILCNRPTTTEPDALEVTALGLAAKSGNLEVLRLMLVKIPSKTEALTPYTRLKGDMVKLDDSLKSYWYYRYDFRHQRGSPLALVAQENSSLALTASRILIQDGFQADRLTWVLAASSNNLAFAQMLLDNGQRFLDNGTLTRYDLGNPLAIAVEHHNQELFDVLLKAGFKVKEHNRSRQYSRSPLQTAAEGGDMAFICRLLELGAEINELPARDGGGTALQLAAIEGHVGVAKYLMDHGADVNASPADRRGRTALEGAAEHGRLDLLHLLLENGAAITGAWRRHYIRAVKLATGRGHYTAARLLKRQGEWTARDEEELELGIIDHGYVRPIKSRSSVVPDWMSEGCGDLDSASDSDSDDIVPSEDEEGSSTGVPAIYSDEFMGDTDNFLFSVN

SEQ ID NO: 22906 - DNA, 1133 bp, Muscodor strobelii
  misc_feature: SGI EST ID NO. CUFF.53793.0
  misc_feature: Variant of the nucleotide sequence at SEQ ID NO 22904
gccaattagaatataagctcaagaggtggggatttcggaagaatatcgacaaaagcacatgggcctacatcgatcatcgcattcgaaaacgaaagcgcgtggaagaaaaagagagccaagtcctttactacggcaaggtattgaagcctgaaaagattgtcaaagaaaccaaccgacatagagacattagcatctttgcccaactcacgcgaggacgaagtttgacaccagaggcgcgacacaatgctgcaattgagattcgcactccgccagctacattggtacagattagctggccatcgactctgccttggctccagttcctgacgaaggatatggccagtgagttgaaacataccaggcacagtacagaaagagtctaatacttgatgatcaagtattcatcaatccagccatcgagttagctttaaaacgatcaccatctcagtctcccctttcagccatactgtgccagatgaacggaacacgagcgatattggggagctctatactcaacaccattgagttactttcccgaattgcggctgggctacccgagatctaccctcaggagcattgtcgacaagcccaatgcatatcgaaatggtcgaacgagaagactccatacgaggctttgttacagttcacttacatgctggcaaatggccatttgaggtttggtggccgcaacggagtaaagacacagtggctcgcaattgtcaacatcatgcagcatttcgggctactgaaattggatttgaagcagttaaagttcaaaagcacgatattcgacgggtttctagagagtctttttcgcatgacagtaagtaagttgtcttattgcgccaatccagtgcataaaacatacgccaatgaagaagaggtcgtgcccgttttaatgtggctgctcacatgggctagccgacatctcgacgatgaaattctgcgaagtgccataaacctgggcaacttggagctagtcaatgctattctagacaggtatttcgataacccgtacgattcggagttcattccctacttgcacctggattcggaatcttcgcctcacaagtacttgcagcttgctgtggataacgagcacgatgaagcaacttcactacaaatgatcggct

SEQ ID NO: 22907 - DNA, 903 bp, Muscodor strobelii
  misc_feature: SGI cDNA ID NO. 567787
  misc_feature: Elevated expression when VOC is produced
  misc_feature: Encodes the peptide sequence at SEQ ID NO 22908
atgctaaacctcctagttcatcgtgaaggtatggatataaatattgaggatcacaacggggcatctcctctggtctatgcatttgagaatagtcaaaggcatgcctttgactggctgattcagaatggcgcaaatattgacgcaaaaccgacgcctgatcgaacgattttcctctttgcatgccagacaggaagattccaagatgctatttatctcatcgagatcggtgccaatgtgtcatacgcatctcctgccgacggaatcaccgctctacacttggcctgcagttacaacgctcctaaactctcagagcctctccagaaccctctcccccagtatgtatatcaagaagacttgatcaaactcttgatcaacaaaggttgcgatgtcaacttgggggacacacatcaaaattctcctctcggttttgctgctagtcgaggtctaaccaacatagtcgagatgctccttgctaatggtgcagatctggagagcgaagatttccaaggcaacaccccgctaatgcaagcggtgatggacaacggcgcccatgtgctacatataaggactatcgaacttctcgtacactctggcgcttccgccagcgcaagaaacagcgcgaatgaagattcactgtacctgctattcagggatagaaaacaaagagttgtcgaaattcttctacagaataacgctccatatgagcataccgataagaacggctggacagcgctgcaccatgcgtgtaagcacggattcgcagaaattgctcgcgagcttgtgggtcgcggtctcgatccaaatacgactacgaaatcgggcgaaagtgcgattgcaatagctaagaggcaaggacacttcgaccttgcggaagatttaagaaacaatccagtactcgtttaa

SEQ ID NO: 22908 - protein, 300 aa, Muscodor strobelii
  misc_feature: SGI Peptide ID NO. 567787
  misc_feature (240)..(272): Pfam Id: PF00023 Pfam Desc: Ankyrin repeat
  misc_feature (86)..(135): Pfam Id: PF00023 Pfam Desc: Ankyrin repeat
  misc_feature (136)..(168): Pfam Id: PF00023 Pfam Desc: Ankyrin repeat
  misc_feature (169)..(206): Pfam Id: PF00023 Pfam Desc: Ankyrin repeat
  misc_feature (10)..(291): NCBI GI: 123437955 Blast Desc: ankyrin repeat protein [Trichomonas vaginalis G3] gi|121891508|gb|EAX96837.1| ankyrin repeat protein, [Trichomonas vaginalis G3]
  misc_feature (10)..(274): NCBI GI: 123398905 Blast Desc: ankyrin repeat protein [Trichomonas vaginalis G3] gi|121882541|gb|EAX88438.1| ankyrin repeat protein, [Trichomonas vaginalis G3]
  misc_feature (10)..(296): NCBI GI: 123437955 Blast Desc: ankyrin repeat protein [Trichomonas vaginalis G3] gi|121891508|gb|EAX96837.1| ankyrin repeat protein, [Trichomonas vaginalis G3]
  misc_feature (10)..(296): NCBI GI: 123437955 Blast Desc: ankyrin repeat protein [Trichomonas vaginalis G3] gi|121891508|gb|EAX96837.1| ankyrin repeat protein, [Trichomonas vaginalis G3]
  misc_feature (10)..(293): NCBI GI: 123491948 Blast Desc: ankyrin repeat protein [Trichomonas vaginalis G3] gi|121908864|gb|EAY13734.1| ankyrin repeat protein, [Trichomonas vaginalis G3]
  misc_feature (1)..(296): NCBI GI: 157106389 Blast Desc: ankyrin 2,3/unc44 [Aedes aegypti] gi|108868849|gb|EAT33074.1| ankyrin 2,3/unc44 [Aedes aegypti]
  misc_feature (10)..(274): NCBI GI: 123452981 Blast Desc: ankyrin repeat protein [Trichomonas vaginalis G3] gi|121897077|gb|EAY02209.1| ankyrin repeat protein, [Trichomonas vaginalis G3]
  misc_feature (10)..(296): NCBI GI: 123437955 Blast Desc: ankyrin repeat protein [Trichomonas vaginalis G3] gi|121891508|gb|EAX96837.1| ankyrin repeat protein, [Trichomonas vaginalis G3]
  misc_feature (12)..(296): NCBI GI: 157106389 Blast Desc: ankyrin 2,3/unc44 [Aedes aegypti] gi|108868849|gb|EAT33074.1| ankyrin 2,3/unc44 [Aedes aegypti]
  misc_feature (10)..(293): NCBI GI: 154417488 Blast Desc: ankyrin repeat protein [Trichomonas vaginalis G3] gi|121915994|gb|EAY20778.1| ankyrin repeat protein, [Trichomonas vaginalis G3]
  misc_feature (19)..(299): SWISSPROT Homolog: EC 2.7.11.1 Non-specific serine/threonine protein kinase
  misc_feature: Useful for introducing or modulating the production of volatile compounds
MLNLLVHREGMDINIEDHNGASPLVYAFENSQRHAFDWLIQNGANIDAKPTPDRTIFLFACQTGRFQDAIYLIEIGANVSYASPADGITALHLACSYNAPKLSEPLQNPLPQYVYQEDLIKLLINKGCDVNLGDTHQNSPLGFAASRGLTNIVEMLLANGADLESEDFQGNTPLMQAVMDNGAHVLHIRTIELLVHSGASASARNSANEDSLYLLFRDRKQRVVEILLQNNAPYEHTDKNGWTALHHACKHGFAEIARELVGRGLDPNTTTKSGESAIAIAKRQGHFDLAEDLRNNPVLV

SEQ ID NO: 22909 - DNA, 1602 bp, Muscodor strobelii
  misc_feature: SGI EST ID NO. CUFF.53802.0
  misc_feature: Variant of the nucleotide sequence at SEQ ID NO 22907
tgattttctacattagattgcaagctacaagggacaaatagatatgctaaacctcctagttcatcgtgaaggtatggatataaatattgaggatcacaacggggcatctcctctggtctatgcatttgagaatagtcaaaggcatgcctttgactggctgattcagaatggcgcaaatattgacgcaaaaccgacgcctgatcgaacgattttcctctttgcatgccagacaggaagattccaagatgctatttatctcatcgagatcggtgccaatgtgtcatacgcatctcctgccgacggaatcaccgctctacacttggcctgcagttacaacgctcctaaactctcagagcctctccagaaccctctcccccagtatgtatatcaagaagacttgatcaaactcttgatcaacaaaggttgcgatgtcaacttgggggacacacatcaaaattctcctctcggttttgctgctagtcgaggtctaaccaacatagtcgagatgctccttgctaatggtgcagatctggagagcgaagatttccaaggcaacaccccgctaatgcaagcggtgatggacaacggcgcccatgtgctacatataaggactatcgaacttctcgtacactctggcgcttccgccagcgcaagaaacagcgcgaatgaagattcactgtacctgctatgtaggcgtggtagcctagacagctgcaagcatacatccgacatagagctacaatctctaatcgagcttttactagcacatataaagtcccgaattcctgattactcattggatggctcgctagtacattcattgttcatgagctcatacaccgagtctgcgaaatttatcgctccacactcaacatcgcctctcaggcaccagctcgcggcgatgattcagaaatccgtcaaagattccaatgctgacgcgttgtgtttcgtgttatcgtatgatgcggctaagctgtccttgaaaccgaaaagagccttactccaaaacgcagtcagggatagaaaacaaagagttgtcgaaattcttctacagaataacgctccatatgagcataccgataagaacggctggacagcgctgcaccatgcgtgtaagcacggattcgcagaaattgctcgcgagcttgtgggtcgcggtctcgatccaaatacgactacgaaatcgggcgaaagtgcgattgcaatagctaagaggcaaggacacttcgaccttgcggaagatttaagaaacaatccagtactcgtttaatcaagaaaattcccgagaggatcgtggtagagaggcgggggaacatgttgaacaactcaagtctttgagtgttgttcggggagatttgggttgatatgtaatcgctgcgtctaaatcagtagtcacttgaagtactgggcttgaaactaggtcgtccccatgccctttaccccaggcataacagattgtttgtggtttcaatatcctactgatcaagtccttgatatcaggcatacggccatcgtttcctagttactgaaattaaggttgtcaccacaattctaccatgatgtatatgaggcggaaccgtacttctatgaaaacaataaata

SEQ ID NO: 22910 - DNA, 1377 bp, Muscodor strobelii
  misc_feature: SGI cDNA ID NO. 567788
  misc_feature: Encodes the peptide sequence at SEQ ID NO 22911
atgagcgctccaatccccgctgccgcccgctttgttcggtctcctgctctctccagatcagcccgtcctattctgagatcatcgccctttgcccgagcgagaactgcggtgcctgcagctttcttccacgccgccagaatcgacatgtctaagatcaaggtcaagaatcccatcgtggagctcgatggtgatgagatgaccagggtgatctggaaggacatcaaggacaagttcatcttcccgtacctagatgtcgatctcaagtactacgatctcggtctcgagtaccgtgacgagacaaacgaccaggtcaccattgatgccgccgaggctattaagaagtactcggtcggcgtcaagtgcgccaccatcacccccgacgaggcgcgcgtcgaagaattcaaactcaagcaaatgtggctgtccccgaacggcaccatccgaaatgctcttggcggaaccgtcttccgtgagcccatcgtcatccctcgcgttccccgacttgtacctggctggaagaagcccatcatcatcggacgtcacgctttcggtgaccagtaccgcgctaaggatcgcgtcattcctggacccggcaagttgactatggtcttcactcccgagggtggcaagcctgaagagatcgaggtcttccagttcaaggagggcggcggtgtctcacagacacagtacaacaccgatgagagtatcaccggcttcgcgcacgccagtttcaagctcgctcttgacaaggagcttcccctctacatgagcaccaagaacaccatcctgaagaagtacgatggaagattcaaggacatcttccaggagatctacgagacgacctacaagaaggacttcgaagccaagaagatttggtacgagcaccgtctcatcgacgacatggtcgctcagatgatcaagagcgccggtggatacatcatggccctcaagaactacgatggcgacgtccagtccgatatcgtcgctcagggcttcggctctctgggtctcatgacctcggtcctcatcaccccggacggcaagacattcgaatctgaagccgcccacggcaccgtcacgcgccactaccgcgagcaccagaagggccgcgagacgtcgaccaaccccatcgcctccatcttcgcctggacccgtggtctcgtccagcgcggcaagctcgacgacacacccgaagttgttgcctttgctgagagcctcgagcaggcctgtatagacaccgtcgatgtcgatggaatcatgaccaaggatctcgcgctagcgtgcggcaagaccgcccgcgaggactacgtgacgactaccgagtacctgaacgctgttgagcgccgcatgaagaacattctcaaggagaagctatag

SEQ ID NO: 22911 - protein, 458 aa, Muscodor strobelii
  misc_feature: SGI Peptide ID NO. 567788
  misc_feature (53)..(446): Pfam Id: PF00180 Pfam Desc: Isocitrate/isopropylmalate dehydrogenase
  misc_feature (7)..(458): NCBI GI: 240107662 Blast Desc: Isocitrate dehydrogenase, mitochondrial precursor, [Coccidioides posadasii C735 delta SOWgp]
  misc_feature (7)..(458): NCBI GI: 119177488 Blast Desc: isocitrate dehydrogenase NADP, mitochondrial precursor [Coccidioides immitis RS]
  misc_feature (14)..(456): NCBI GI: 212546509 Blast Desc: isocitrate dehydrogenase Idp1, [Penicillium marneffei ATCC 18224] gi|210064928|gb|EEA19023.1| isocitrate dehydrogenase Idp1, [Penicillium marneffei ATCC 18224]
  misc_feature (50)..(458): NCBI GI: 119492270 Blast Desc: isocitrate dehydrogenase Idp1, [Neosartorya fischeri NRRL 181] gi|119411734|gb|EAW21677.1| isocitrate dehydrogenase Idp1, [Neosartorya fischeri NRRL 181]
  misc_feature (49)..(456): NCBI GI: 242823140 Blast Desc: isocitrate dehydrogenase Idp1, [Talaromyces stipitatus ATCC 10500] gi|218712951|gb|EED12376.1| isocitrate dehydrogenase Idp1, [Talaromyces stipitatus ATCC 10500]
  misc_feature (50)..(458): NCBI GI: 121705246 Blast Desc: isocitrate dehydrogenase Idp1, [Aspergillus clavatus NRRL 1] gi|119399032|gb|EAW09460.1| isocitrate dehydrogenase Idp1, [Aspergillus clavatus NRRL 1]
  misc_feature (12)..(451): NCBI GI: 50422415 Blast Desc: DEHA0E11286g [Debaryomyces hansenii CBS767]
  misc_feature (12)..(451): NCBI GI: 199432711 Blast Desc: DEHA2E10692p [Debaryomyces hansenii]
  misc_feature (44)..(454): NCBI GI: 210075951 Blast Desc: YALI0F04095p [Yarrowia lipolytica] gi|199424918|emb|CAG77785.2| YALI0F04095p [Yarrowia lipolytica]
  misc_feature (14)..(458): NCBI GI: 225680607 Blast Desc: isocitrate dehydrogenase [Paracoccidioides brasiliensis Pb03]
  misc_feature (48)..(458): SWISSPROT Homolog: EC 1.1.1.42 Isocitrate dehydrogenase (NADP(+))
MSAPIPAAARFVRSPALSRSARPILRSSPFARARTAVPAAFFHAARIDMSKIKVKNPIVELDGDEMTRVIWKDIKDKFIFPYLDVDLKYYDLGLEYRDETNDQVTIDAAEAIKKYSVGVKCATITPDEARVEEFKLKQMWLSPNGTIRNALGGTVFREPIVIPRVPRLVPGWKKPIIIGRHAFGDQYRAKDRVIPGPGKLTMVFTPEGGKPEEIEVFQFKEGGGVSQTQYNTDESITGFAHASFKLALDKELPLYMSTKNTILKKYDGRFKDIFQEIYETTYKKDFEAKKIWYEHRLIDDMVAQMIKSAGGYIMALKNYDGDVQSDIVAQGFGSLGLMTSVLITPDGKTFESEAAHGTVTRHYREHQKGRETSTNPIASIFAWTRGLVQRGKLDDTPEVVAFAESLEQACIDTVDVDGIMTKDLALACGKTAREDYVTTTEYLNAVERRMKNILKEKL

SEQ ID NO: 22912 - DNA, 2783 bp, Muscodor strobelii
  misc_feature: SGI EST ID NO. CUFF.54029.0
  misc_feature: Variant of the nucleotide sequence at SEQ ID NO 22910
caatattctatctcttggagaaagcgcagagagagacatgacacgacagctttgcccctgaactcgacataccgacggcatcccagcctctccagtaatttaccctgcacacaaacgcccaatgtaacacgacaacagcctgtggcatctccgaatatctgcaggtgtcgttagttctaacttctccgcaggcctgagctctgctaagtttgcttgaagacagaaatggcaagcccgtatccccgacagaatgtgggggagagccaaatgcccccgtggccacattcttgacttgcctgattactcgtacatcatgtccagctcattaagccctggccatctcatcgcgcaccgaagccaacacgctgaacactgctgacagtttctccgcatggcatgatgctgtagcgcagaccccggacaagccaaacctggggcagagctggagaagaggaaacaatgcaacatcaaccgcgcgtaacctgcctcacccgtctctgcccgcgcactcgcgtgctggcccgtctcatccgttctggctgttgttgggtgaggacacagggaattgaaaccccgccggatcacattgccccttcagaccgaaccaccccgtgacttgtcgatgtgctgtacgtagcagtatgagccgtttaaatagacagcggacggcccatctgaacaagtcgattaagcagttgactttaacggtgttttgaccagctcgagcttgactattccccattattcatcggtgacctagacaattgattgttaattgaactggagacggctgctccgctgtcggctttcgctccaaactccagacggttggcattttccctgcgctggaccctgcgcggctttttgtgctcccttagatcgaccggttgcttttaaaacaactacgacacgctcgtgagtcaggaagatttagggaagccagagttatttaaaccggtgcatcgtcagctatatctacaaccagctccaacgtctacggaagcctaaacccactggtggccgacggctcttaccccgacccggatctaactaccgattatcgcgtttgacttcctcggcttgtcgagggacagctgtggtcccctcggtcctgacgccaccctttggagcggcgcctcgcgtataattatcgtgtgccttctcttcccgatttatgtcacaatgagcgctccaatccccgctgccgcccgctttgttcggtctcctgctctctccagatcagcccgtcctattctgagatcatcgccctttgcccgagcgagaactgcggtgcctgcagctttcttccacgccgccagaatcgacatgtctaagatcaaggtcaagaatcccatcgtggagctcgatggtgatgagatgaccagggtgatctggaaggacatcaaggacaagttcatcttcccgtacctagatgtcgatctcaagtactacgatctcggtctcgagtaccgtgacgagacaaacgaccaggtcaccattgatgccgccgaggctattaagaagtactcggtcggcgtcaagtgcgccaccatcacccccgacgaggcgcgcgtcgaagaattcaaactcaagcaaatgtggctgtccccgaacggcaccatccgaaatgctcttggcggaaccgtcttccgtgagcccatcgtcatccctcgcgttccccgacttgtacctggctggaagaagcccatcatcatcggacgtcacgctttcggtgaccagtaccgcgctaaggatcgcgtcattcctggacccggcaagttgactatggtcttcactcccgagggtggcaagcctgaagagatcgaggtcttccagttcaaggagggcggcggtgtctcacagacacagtacaacaccgatgagagtatcaccggcttcgcgcacgccagtttcaagctcgctcttgacaaggagcttcccctctacatgagcaccaagaacaccatcctgaagaagtacgatggaagattcaaggacatcttccaggagatctacgagacgacctacaagaaggacttcgaagccaagaagatttggtacgagcaccgtctcatcgacgacatggtcgctcagatgatcaagagcgccggtggatacatcatggccctcaagaactacgatggcgacgtccagtccgatatcgtcgctcagggcttcggctctctgggtctcatgacctcggtcctcatcaccccggacggcaagacattcgaatctgaagccgcccacggcaccgtcacgcgccactaccgcgagcaccagaagggccgcgagacgtcgaccaaccccatcgcctccatcttcgcctggacccgtggtctcgtccagcgcggcaagctcgacgacacacccgaagttgttgcctttgctgagagcctcgagcaggcctgtatagacaccgtcgatgtcgatggaatcatgaccaaggatctcgcgctagcgtgcggcaagaccgcccgcgaggactacgtgacgactaccgagtacctgaacgctgttgagcgccgcatgaagaacattctcaaggagaagctatagatacccaatgcatgactggttagattcgcttcacgaccgcattttgcattttcattacatgatagatgcattggaggagtatatttgtcgagcacttcgatggcgattcgtgttgggtttaagagatgaacggggagattttgtatatagatcatgaaacctttgtctatatccatgattagcatctttactactcgtgtcgtacgtgtgtctgtgaattgcca

SEQ ID NO: 22913 - DNA, 1221 bp, Muscodor strobelii
  misc_feature: SGI cDNA ID NO. 567789
  misc_feature: Reduced expression when VOC is produced
  misc_feature: Encodes the peptide sequence at SEQ ID NO 22914
atgtcgatccgcatctcactcgacaagccccccgaattctacacgaatctcgacatcctgagcggacgggtcatcctcaacctgacgcgccccgagacggttggcaacatcattgtcaagctcgaaggcgagtcgcagactgccctcgtcctgccgccgccgggccagcgcgacgactacaacacgggcaacgaggtggtcagcgagaaccacaagatcctgtacaaggtcttccaggtctaccccgacgacggcgtcgccctgctgctgcagcccggccagcacgagttcaagttcaacttcaagctgcccctcaacaacatctgccacgatgtgaaggccctgctcagcgccggcgccggcgtcatgggcaaaggcggcatccgcaccatggacccgaccaagcagatgatgctcctccacgtcaagtccaccctcccgccctccatcaccggcttcccccgccaggcagagatccgctactacatcaaagtcaccatccagcgccccagcatcttcaaggagaactggcgctactccctcggcctcaagttcctccccatcgagcctccacgccccaacgcctccacccaggaagccttcgcccgccggcccttcaccttcaagccgcggactcccctcaacccctcccgcaagtccttcttctccaagtcctcgacctcgacccccgatccgaacgccgtactgccgtccatcgagatgtccgcccgtctcccccaccccaccatcctaacctgcaacgagcctatccccctgcgcataatatccaagaagctcgccgcagctgacgaacaaatctacctgaccgccatcgaagtcgccctcatcggccacacacacatccgcgtgcacaacctcgagaacgtcgaacgctcaacatggatcgtcgtctcggccctcaacctctcaatcgcactgggcaaagccaacgacgccccacaaaccgagttcgaaatccccaataccatctgggcaggaagacgtgtcggcggcgcaccaagccaaccaccacgaccgctcgacccattatacccgccccagctcggaccaggaaacgtcgtaggagacgacgacgcgccgcccccgagctacgacgaggctatggccgagagtttatcaggtccccaggagagaccggcgtatagcggcatcacggctgagaactcacctagtaccatgccgggggagaagggccattag

SEQ ID NO: 22914 - protein, 406 aa, Muscodor strobelii
  misc_feature: SGI Peptide ID NO. 567789
  misc_feature (3)..(192): Pfam Id: PF00339 Pfam Desc: Arrestin (or S-antigen), N-terminal domain
  misc_feature (3)..(106): Pfam Id: PF00339 Pfam Desc: Arrestin (or S-antigen), N-terminal domain
  misc_feature (1)..(333): NCBI GI: 116197623 Blast Desc: CHGG_06967 [Chaetomium globosum CBS 148.51] gi|88178246|gb|EAQ85714.1| CHGG_06967 [Chaetomium globosum CBS 148.51]
  misc_feature (1)..(331): NCBI GI: 171694433 Blast Desc: protein product [Podospora anserina] gi|170947165|emb|CAP73970.1| protein product [Podospora anserina]
  misc_feature (1)..(334): NCBI GI: 164423770 Blast Desc: NCU08967 [Neurospora crassa OR74A] gi|157070226|gb|EAA31553.2| conserved [Neurospora crassa OR74A]
  misc_feature (1)..(331): NCBI GI: 261355745 Blast Desc: arrestin [Verticillium albo-atrum VaMs.102]
  misc_feature (1)..(331): NCBI GI: 256731653 Blast Desc: [Nectria haematococca mpVI 77-13-4]
  misc_feature (1)..(331): NCBI GI: 46137011 Blast Desc: FG10021.1 [Gibberella zeae PH-1]
  misc_feature (1)..(331): NCBI GI: 156065893 Blast Desc: SS1G_00957 [Sclerotinia sclerotiorum 1980] gi|154691816|gb|EDN91554.1| SS1G_00957 [Sclerotinia sclerotiorum 1980]
  misc_feature (1)..(331): NCBI GI: 39975207 Blast Desc: MGG_00250 [Magnaporthe grisea 70-15] gi|145018883|gb|EDK03162.1| MGG_00250 [Magnaporthe grisea 70-15]
  misc_feature (1)..(331): NCBI GI: 154301709 Blast Desc: BC1G_10006 [Botryotinia fuckeliana B05.10] gi|150855668|gb|EDN30860.1| BC1G_10006 [Botryotinia fuckeliana B05.10]
  misc_feature (1)..(331): NCBI GI: 225680547 Blast Desc: conserved [Paracoccidioides brasiliensis Pb03]
  misc_feature: Useful for introducing or modulating the production of volatile compounds
MSIRISLDKPPEFYTNLDILSGRVILNLTRPETVGNIIVKLEGESQTALVLPPPGQRDDYNTGNEVVSENHKILYKVFQVYPDDGVALLLQPGQHEFKFNFKLPLNNICHDVKALLSAGAGVMGKGGIRTMDPTKQMMLLHVKSTLPPSITGFPRQAEIRYYIKVTIQRPSIFKENWRYSLGLKFLPIEPPRPNASTQEAFARRPFTFKPRTPLNPSRKSFFSKSSTSTPDPNAVLPSIEMSARLPHPTILTCNEPIPLRIISKKLAAADEQIYLTAIEVALIGHTHIRVHNLENVERSTWIVVSALNLSIALGKANDAPQTEFEIPNTIWAGRRVGGAPSQPPRPLDPLYPPQLGPGNVVGDDDAPPPSYDEAMAESLSGPQERPAYSGITAENSPSTMPGEKGH

SEQ ID NO: 22915 - DNA, 2460 bp, Muscodor strobelii
  misc_feature: SGI cDNA ID NO. 567790
  misc_feature: Reduced expression when VOC is produced
  misc_feature: Encodes the peptide sequence at SEQ ID NO 22916
atgtctctcgtcaagtcttacatacccgtggcactttgcctagggcaggctgttgcggccaatgttgactattctcagtatgtcaatccatttataggctcagagggaccctacgaaggtctcgccttcggtggcggcgacatcttcgtaggcggcgcattacctttcggcgtagccaaagtcggcattgacacatacgagcaaaatgtcagttactcgaccatcaatggtggctatacaccaaaggggctcgtcacagccatctcgatgatgcacgagagcggtacaggtggtggacccaagtacggcatcgtcccacagatgcccctgacgactgtggaagctcctgtcaacatcttggataatcggacatattggcaacagcgtgtgggagaggacacggccagcgttggatacttcgctatgcagctcgagaacggcgttggcgttgaagtctctgcgtctcggcatgccggtataatgcaatacagtttcccggatggagaagcccatgttctagtggatgtatcacattatcttccccaggaagccggcgcaagcaattcacaatactacgtcgctggtgaaatggagcttcaggacgatggaaagacgtacaccggctacactgcagtgggtggtggttttggtgaaggcccgcccatcacggtgtatttctgcggcgagtttgactcgacaccggataatgctaagacgttttctggtcgattgacagatcagacgaagttcgcccatactttctcgaacggacctgttcaacaagcgacgttgtatgacacagatacgaaagtgacttccggccctctcagcaatcgcgttggtgcattgtttagctgggattcatcgtctgcatcgactgtcacatcgcgagttggcatctcgttcatgaacacgacgagagcgtgcgactatatcaaggatgagatcccaacttggacacttaacgataccgtaaatgcagctgtggaagagtggaacaaggatgtgtttagcaaaatccaagtcccattggacgattcgcagaatgtcacggatatccgcctgatgtactcgagtctttactttatgcatctcatgccatcggatcgtactggcgagaatcctctttgggaatctgacgaaccttcatgggatgattggtacacgttttgggacattttccgatgcacaacatctctgtaccatttaatacaaccggagtactacacctccatgctgcgtggagtcatagatgtttggagatttgatggtttcctgcctgatggtcgctcaggaaactggaacggcctagtccagggcggctccaacgcagacaacactctcgcagacgcgtacgtaaaaggtctaccgggcataaactggacagccgcctaccaagccatggtaaaagacgcagaagtcgtcccctacaacggctactcccccattgacatgacaaacggcatcgcccaaggccgtggcgcgcttcaagactggctcgacttcggatacatctcctccgaccgcagcacccgcgccctctcccgctccgtcgaatacgcgctgaacgactttgcactctcccaagtagccaaaggaatcgcaccagatgacgtagacaaatatctaaaccgctcagcaggctggcaactgacctggtcccacaacataacccacacaccgccctcctccccaaacctaacattcacgggcttcctcgccccacggaaaagtaccggagaattcgacctagaagactacaatcccgcgctctgcgggggttgtgaatggagcgacatatcctacgaagcgacgccgttcgagtactccttcacggtaccgcacgacatgcagacactaatctccttcatgggggggcccgaaaaattcgaggagcgactagattttatattccaacctaacagtagcgagcaggatctatcggcgaatggagcaggtattacgacgctgatgaatattggaaatgagcctgattttgctacgccgttggaatatcattatatcggcaagagtcataagagtgtgacgcgcagtaggatgcttgcgaatacgtattttcatgatgcgaagtatggggttccgggtaattctgatgcgggagcactgaatagttggttgatttggcagatgcttggactgtatcctgttgttacacagccggtttatttactggggtccccgtggtttagggatgttaatgttagtgttgggatgcagggggaggtgcttagggtcaaggcggagggattggataataggggggctttttatgtccagagtgttagggttaatggggtggattgggataggaattggcttgagcatggggatgttatgaatggtggactgattgagtttgagatggggagtgaagggaagatttgggagagtggtgatgtgccgcctagtcctggacatgttgtgcttccgaggccgtag

SEQ ID NO: 22916 - protein, 819 aa, Muscodor strobelii
  misc_feature: SGI Peptide ID NO. 567790
  misc_feature (277)..(799): Pfam Id: PF07971 Pfam Desc: Glycosyl hydrolase family 92
  misc_feature (2)..(814): NCBI GI: 259485999 Blast Desc: TPA: alpha-1,2-mannosidase family protein (AFU_orthologue; AFUA_5G10520) [Aspergillus nidulans FGSC A4]
  misc_feature (1)..(813): NCBI GI: 145252180 Blast Desc: An16g02910 [Aspergillus niger] gi|134083148|emb|CAK48600.1| protein product [Aspergillus niger]
  misc_feature (22)..(816): NCBI GI: 119492043 Blast Desc: glycosyl hydrolase, family 92 protein [Neosartorya fischeri NRRL 181] gi|119411676|gb|EAW21619.1| glycosyl hydrolase, family 92 protein [Neosartorya fischeri NRRL 181]
  misc_feature (2)..(814): NCBI GI: 67525193 Blast Desc: AN3054.2 [Aspergillus nidulans FGSC A4] gi|40744449|gb|EAA63625.1| AN3054.2 [Aspergillus nidulans FGSC A4]
  misc_feature (9)..(816): NCBI GI: 238484443 Blast Desc: conserved [Aspergillus flavus NRRL3357] gi|220701510|gb|EED57848.1| conserved [Aspergillus flavus NRRL3357]
  misc_feature (17)..(816): NCBI GI: 115384740 Blast Desc: conserved [Aspergillus terreus NIH2624] gi|114196609|gb|EAU38309.1| conserved [Aspergillus terreus NIH2624]
  misc_feature (22)..(814): NCBI GI: 169617241 Blast Desc: SNOG_11797 [Phaeosphaeria nodorum SN15] gi|160703368|gb|EAT80841.2| SNOG_11797 [Phaeosphaeria nodorum SN15]
  misc_feature (58)..(816): NCBI GI: 189201307 Blast Desc: glycosyl hydrolase [Pyrenophora tritici-repentis Pt-1C-BFP] gi|187984089|gb|EDU49577.1| glycosyl hydrolase [Pyrenophora tritici-repentis Pt-1C-BFP]
  misc_feature (1)..(802): NCBI GI: 189204262 Blast Desc: glycosyl hydrolase [Pyrenophora tritici-repentis Pt-1C-BFP] gi|187985565|gb|EDU51053.1| glycosyl hydrolase [Pyrenophora tritici-repentis Pt-1C-BFP]
  misc_feature (58)..(816): NCBI GI: 169618311 Blast Desc: SNOG_12347 [Phaeosphaeria nodorum SN15] gi|160703594|gb|EAT80160.2| SNOG_12347 [Phaeosphaeria nodorum SN15]
  misc_feature: Useful for introducing or modulating the production of volatile compounds
MSLVKSYIPVALCLGQAVAANVDYSQYVNPFIGSEGPYEGLAFGGGDIFVGGALPFGVAKVGIDTYEQNVSYSTINGGYTPKGLVTAISMMHESGTGGGPKYGIVPQMPLTTVEAPVNILDNRTYWQQRVGEDTASVGYFAMQLENGVGVEVSASRHAGIMQYSFPDGEAHVLVDVSHYLPQEAGASNSQYYVAGEMELQDDGKTYTGYTAVGGGFGEGPPITVYFCGEFDSTPDNAKTFSGRLTDQTKFAHTFSNGPVQQATLYDTDTKVTSGPLSNRVGALFSWDSSSASTVTSRVGISFMNTTRACDYIKDEIPTWTLNDTVNAAVEEWNKDVFSKIQVPLDDSQNVTDIRLMYSSLYFMHLMPSDRTGENPLWESDEPSWDDWYTFWDIFRCTTSLYHLIQPEYYTSMLRGVIDVWRFDGFLPDGRSGNWNGLVQGGSNADNTLADAYVKGLPGINWTAAYQAMVKDAEVVPYNGYSPIDMTNGIAQGRGALQDWLDFGYISSDRSTRALSRSVEYALNDFALSQVAKGIAPDDVDKYLNRSAGWQLTWSHNITHTPPSSPNLTFTGFLAPRKSTGEFDLEDYNPALCGGCEWSDISYEATPFEYSFTVPHDMQTLISFMGGPEKFEERLDFIFQPNSSEQDLSANGAGITTLMNIGNEPDFATPLEYHYIGKSHKSVTRSRMLANTYFHDAKYGVPGNSDAGALNSWLIWQMLGLYPVVTQPVYLLGSPWFRDVNVSVGMQGEVLRVKAEGLDNRGAFYVQSVRVNGVDWDRNWLEHGDVMNGGLIEFEMGSEGKIWESGDVPPSPGHVVLPRP

SEQ ID NO: 22917 - DNA, 3791 bp, Muscodor strobelii
  misc_feature: SGI EST ID NO. CUFF.53822.0
  misc_feature: Variant of the nucleotide sequence at SEQ ID NO 22915
tgccactcaacctcagctaggctggcatcttcgctgctgctgatatcccatcttgtaaccacttaattgcaatagaggaatcaaaggtcaatggctgaaagatccagaacctttctcggctgtttcactgcctacttcatttgtgagtctggtaccaggtatacacgttgaaagaaaccgcacaatcgccttcgggcaaatgcacagttgtttctgtcatttgcgtcgagtcgtatgattccaatgaaacgagttcgcttccgaatcacatttggtgattaggaatcaaagttgaggccttagcgcagactttaaagctgcattgcccttgagatattcacttctcgtctgccctctcaggaatcacgtcgtgaataacagcgatctcataggggtccgaaccagcaattcttttccattgtatacgtccacaagctatccgttcctcattttgaaacttggagacgaatcttacatccattttttacccacaacataagaccttagtttcctggcttgttaccatcaattctgtttgcgcaaagcgctaaatatcttttgctgaagacatcgggcctaatatgtttagctcaagaaccagtgcaaacatgacacaacaaactgaacctacggtaatcaggtaccgatatgtgaaaatcagaactccttacgcgaagtgacgtaaattatttacttcccctctctcaatcctcaccgctagcagtgctgaacaggccgtatccccatgtcgtcccatgttgcaatgtggagatctccaaactgttagatgcggaggagctcaagcttctcgcaacaccaaacctatctgagctgatctgctgcactaccccagatttcgtgacattgagctgccggtttggtcacaacattgtaccgacgaatcgacgatgatggaatactacgaaccgcccggaccggcttcgtataagctcaaggcgggggaagacggttgatgtataatagaagcactaagctctccccaatgccaatgtttgcgcgaggctttccaagacacttcttgctcggatacattgcacccggcaaagatgtctctcgtcaagtcttacatacccgtggcactttgcctagggcaggctgttgcggccaatgttgactattctcagtatgtcaatccatttataggctcagagggaccctacgaaggtctcgccttcggtggcggcgacatcttcgtaggcggcgcattacctttcggcgtagccaaagtcggcattgacacatacgagcaaaatgtcagttactcgaccatcaatggtggctatacaccaaaggggctcgtcacagccatctcgatgatgcacgagagcggtacaggtggtggacccaagtacggcatcgtcccacagatgcccctgacgactgtggaagctcctgtcaacatcttggataatcggacatattggcaacagcgtgtgggagaggacacggccagcgttggatacttcgctatgcagctcgagaacggcgttggcgttgaagtctctgcgtctcggcatgccggtataatgcaatacagtttcccggatggagaagcccatgttctagtggatgtatcacattatcttccccaggaagccggcgcaagcaattcacaatactacgtcgctggtgaaatggagcttcaggacgatggaaagacgtacaccggctacactgcagtgggtggtggttttggtgaaggcccgcccatcacggtgtatttctgcggcgagtttgactcgacaccggataatgctaagacgttttctggtcgattgacagatcagacgaagttcgcccatactttctcgaacggacctgttcaacaagcgacgttgtatgacacagatacgaaagtgacttccggccctctcagcaatcgcgttggtgcattgtttagctgggattcatcgtctgcatcgactgtcacatcgcgagttggcatctcgttcatgaacacgacgagagcgtgcgactatatcaaggatgagatcccaacttggacacttaacgataccgtaaatgcagctgtggaagagtggaacaaggatgtgtttagcaaaatccaagtcccattggacgattcgcagaatgtcacggatatccgcctgatgtactcgagtctttactttatgcatctcatgccatcggatcgtactggcgagaatcctctttgggaatctgacgaaccttcatgggatgattggtacacgttttgggacattttccgatgcacaacatctctgtaccatttaatacaaccggagtactacacctccatgctgcgtggagtcatagatgtttggagatttgatggtttcctgcctgatggtcgctcaggaaactggaacggcctagtccagggcggctccaacgcagacaacactctcgcagacgcgtacgtaaaaggtctaccgggcataaactggacagccgcctaccaagccatggtaaaagacgcagaagtcgtcccctacaacggctactcccccattgacatgacaaacggcatcgcccaaggccgtggcgcgcttcaagactggctcgacttcggatacatctcctccgaccgcagcacccgcgccctctcccgctccgtcgaatacgcgctgaacgactttgcactctcccaagtagccaaaggaatcgcaccagatgacgtagacaaatatctaaaccgctcagcaggctggcaactgacctggtcccacaacataacccacacaccgccctcctccccaaacctaacattcacgggcttcctcgccccacggaaaagtaccggagaattcgacctagaagactacaatcccgcgctctgcgggggttgtgaatggagcgacatatcctacgaagcgacgccgttcgagtactccttcacggtaccgcacgacatgcagacactaatctccttcatgggggggcccgaaaaattcgaggagcgactagattttatattccaacctaacagtagcgagcaggatctatcggcgaatggagcaggtattacgacgctgatgaatattggaaatgagcctgattttgctacgccgttggaatatcattatatcggcaagagtcataagagtgtgacgcgcagtaggatgcttgcgaatacgtattttcatgatgcgaagtatggggttccgggtaattctgatgcgggagcactgaatagttggttgatttggcagatgcttggactgtatcctgttgttacacagccggtttatttactggggtccccgtggtttagggatgttaatgttagtgttgggatgcagggggaggtgcttagggtcaaggcggagggattggataataggggggctttttatgtccagagtgttagggttaatggggtggattgggataggaattggcttgagcatggggatgttatgaatggtggactgattgagtttgagatggggagtgaagggaagatttgggagagtggtgatgtgccgcctagtcctggacatgttgtgcttccgaggccgtaggagggggtggacagtagggaattgtcacgaagtggtgaatttatatgaagtcgggctgtgaggtaatacgccgtgctcatagcacctgatgtaggggttcgggagtttatgtatacggtggttcttcgctagttaattcggtaatgagacagaagaaattcctggtcccagcatcgtttttgggcgctctgtggctcctcggtcgttccataggcgacggttctgttgatggctggttgtgccaaggcaggcattctagtccct

SEQ ID NO: 22918 - DNA, 357 bp, Muscodor strobelii
  misc_feature: SGI cDNA ID NO. 567791
  misc_feature: Encodes the peptide sequence at SEQ ID NO 22919
atgatcacccagcccagcccgtccccagccgccgcagtagacgaggcaaacaagttgaggactgtttccgcgaaacgatttctggtacgaggcggcactgctgcgccttctaaggccagcaaagaacctcatccgaatgacggaactgtcttctctcagtctccggcctgtgagaaacgatttctggtacacgtaatggctgctgaacgaaggaggaaccgagggactagaatgcctgccttggcacaaccagccatcaacagaaccgtcgcctatggaacgaccgaggagccacagagcgcccaaaaacgatgctgggaccaggaatttcttctgtctcattaccgaattaactag

SEQ ID NO: 22919 - protein, 118 aa, Muscodor strobelii
  misc_feature: SGI Peptide ID NO. 567791
MITQPSPSPAAAVDEANKLRTVSAKRFLVRGGTAAPSKASKEPHPNDGTVFSQSPACEKRFLVHVMAAERRRNRGTRMPALAQPAINRTVAYGTTEEPQSAQKRCWDQEFLLSHYRIN

SEQ ID NO: 22920 - DNA, 579 bp, Muscodor strobelii
  misc_feature: SGI cDNA ID NO. 567792
  misc_feature: Encodes the peptide sequence at SEQ ID NO 22921
atgctgctcaccactaggacgatatacacaccgctaacgctacctaatgacgagcacacagtagtatttcccgggaaagacttacctccgatcgaagtcatcacacacaagatgcagcacaagaacttcgtaaaggatcgcctagccgcgctcgtgcagcagtactcgaagaccttggatctcaacaacctcgacaatgagcgggcggtgcaaaagacctacgaaaccaagctaggcaacatcgaatcgtcgtcatcggaaggcgctagactcaattgtcgtgccatgcacattatgcagatttcgtcattcaactggctcgaataccagctactaaacaaaataaacgggagcatattcacgagcgcccaagcagccggcgctagctatgcaatccggacgacatctagtgcgtcgcgcaccaaggtcacgagacgaaccgataagaaggcccaagcggccaaagcgaaggccgccccaaagtcggtgcccctgggtatccagcacgctgagcagctgataaacacggagccggacggcggcctgactgcaatgacggaccaaagggcaggattctga

SEQ ID NO: 22921 - protein, 192 aa, Muscodor strobelii
  misc_feature: SGI Peptide ID NO. 567792
MLLTTRTIYTPLTLPNDEHTVVFPGKDLPPIEVITHKMQHKNFVKDRLAALVQQYSKTLDLNNLDNERAVQKTYETKLGNIESSSSEGARLNCRAMHIMQISSFNWLEYQLLNKINGSIFTSAQAAGASYAIRTTSSASRTKVTRRTDKKAQAAKAKAAPKSVPLGIQHAEQLINTEPDGGLTAMTDQRAGF

SEQ ID NO: 22922 - DNA, 792 bp, Muscodor strobelii
  misc_feature: SGI EST ID NO. CUFF.53828.0
  misc_feature: Variant of the nucleotide sequence at SEQ ID NO 22920
agcatattcacgagcgcccaagcagccggcgctagctatgcaatccggacgacatctagtgcgtcgcgcaccaaggtcacgagacgaaccgataagaaggcccaagcggccaaagcgaaggccgccccaaagtcggtgcccctgggtatccagcacgctgagcagctgataaacacggagccggacggcggcctgactgcaatgacggaccaaagggcaggattctgacattcttccagttcttccatgatcaagtgtgaggctgagaagtatcggcgaagcttactttcgtgggcggctgtatgggttgcacgtactgtcctagctgttgccaacttcttctcgtaaatgttctccactacttttgcagcgttgtcgatgagtgctgcagtattgtctgtcttctgcatcatattcatccgacttcttgttgttgggatgttggagtccgaaaaggttgcaatggcgctatctttacactagactcacttcaggggatatgtcacgaacttgctgggaagagcacatagagtaattgcaacttcttgcgtgataggatgtataatgcacaactcgctcgcaagcgctttaatatctcgcaatttgtgtgtgtcacttgtcttcgacgacaagaccactaccacgtcccggactgcacccatcagcagaagattgatcgcaccaagctctacaaatgtcgccactgcaatacacctgtgatctagtctacggcgttgaggtgtgagagtatgagagtatgggaatgtcaagccgaattactgctcagcagaa

SEQ ID NO: 22923 - DNA, 1137 bp, Muscodor strobelii
  misc_feature: SGI cDNA ID NO. 567793
  misc_feature: Encodes the peptide sequence at SEQ ID NO 22924
atggcacctttgcttgccttgagagaagatggagatcttgatgtgatctcatcctcgtcctcatcctccggagaattcttgttcggcaggagttttaccagcaagacgaacaagggtaagggcaaagcgacagatccgtacttgaaagcctgggccgatcgaccttggcccttgatcgatccgccttcgcgaagacagcatatcacccacccagtcattcacatcgcgaatgaaatctcacaaatacacaatgccatgatccgaggcctcaacgcgatctatctacaagcgccaagcgttcacaaaacccaagatgttgtggacctgctattcctgacacaaagctggagcgcctggatcctcgatcaccatgatctcaaagaagcgatcatcttacccggattcgagggcatcctcgggctacgccctaacgtcctgacactcaggcgaggagactccggctcagactctggcgtggaggcggatgccgcgccatctcctctatcctctggcaaagatagtggcattcatctaaacgctatcattgaggggacgaaagagaacgaaagtaggaggagagacatggataccgaagaagaggtatcattcctcctacgccgtgtctacgcctactcgacagccatacacaaagaaccccactcctataacgtaactatcttcgaagctctcctcgcatctctaggagatgtcctagtgccccatctcacgacacaggtcggcatgatgctcggcatgcgggagatgtgcttcgctgtgcctcccgccctagctctaccaacaccgcagatcataatcacgggctcatcttcagacaacccgacaatccgcccagcactcgtccgaacatctacttccctagcaccattcaacccgcgccccgtcaacagaaggacacaatccagcagtgccctacccgaagaaacagtcagcacgatacccaaaccagaatccactaaactcttcgaagcagaagaccgcgcaaacagactcctacaattctacctttcaacagagggcagagcctcagcgactatggaccggtacataatcccgcctatgattggactcggccctcaggccgctcctgccgcctctggtcaacctgcgaaggtctag

SEQ ID NO: 22924 - protein, 378 aa, Muscodor strobelii
  misc_feature: SGI Peptide ID NO. 567793
  misc_feature (43)..(146): NCBI GI: 145234108 Blast Desc: An02g12940 [Aspergillus niger] gi|134057367|emb|CAK37922.1| protein product [Aspergillus niger]
  misc_feature (51)..(158): NCBI GI: 212529434 Blast Desc: conserved [Penicillium marneffei ATCC 18224] gi|210074272|gb|EEA28359.1| conserved [Penicillium marneffei ATCC 18224]
  misc_feature (51)..(183): NCBI GI: 212537829 Blast Desc: conserved [Penicillium marneffei ATCC 18224] gi|210068812|gb|EEA22903.1| conserved [Penicillium marneffei ATCC 18224]
  misc_feature (44)..(255): NCBI GI: 238492217 Blast Desc: conserved [Aspergillus flavus NRRL3357] gi|220695839|gb|EED52181.1| conserved [Aspergillus flavus NRRL3357]
  misc_feature (49)..(183): NCBI GI: 242808174 Blast Desc: conserved [Talaromyces stipitatus ATCC 10500] gi|218715733|gb|EED15155.1| conserved [Talaromyces stipitatus ATCC 10500]
  misc_feature (51)..(140): NCBI GI: 121711445 Blast Desc: hemerythrin HHE cation binding domain protein [Aspergillus clavatus NRRL 1] gi|119401489|gb|EAW11912.1| hemerythrin HHE cation binding domain protein [Aspergillus NRRL
  misc_feature (43)..(143): NCBI GI: 46107772 Blast Desc: FG00769.1 [Gibberella zeae PH-1]
  misc_feature (48)..(140): NCBI GI: 256734785 Blast Desc: [Nectria haematococca mpVI 77-13-4]
  misc_feature (51)..(136): NCBI GI: 189193065 Blast Desc: conserved [Pyrenophora tritici-repentis Pt-1C-BFP] gi|187978435|gb|EDU45061.1| conserved [Pyrenophora tritici-repentis Pt-1C-BFP]
  misc_feature (49)..(138): NCBI GI: 256727598 Blast Desc: NECHADRAFT_33464 [Nectria haematococca mpVI 77-13-4]
MAPLLALREDGDLDVISSSSSSSGEFLFGRSFTSKTNKGKGKATDPYLKAWADRPWPLIDPPSRRQHITHPVIHIANEISQIHNAMIRGLNAIYLQAPSVHKTQDVVDLLFLTQSWSAWILDHHDLKEAIILPGFEGILGLRPNVLTLRRGDSGSDSGVEADAAPSPLSSGKDSGIHLNAIIEGTKENESRRRDMDTEEEVSFLLRRVYAYSTAIHKEPHSYNVTIFEALLASLGDVLVPHLTTQVGMMLGMREMCFAVPPALALPTPQIIITGSSSDNPTIRPALVRTSTSLAPFNPRPVNRRTQSSSALPEETVSTIPKPESTKLFEAEDRANRLLQFYLSTEGRASATMDRYIIPPMIGLGPQAAPAASGQPAKV

SEQ ID NO: 22925 - DNA, 2595 bp, Muscodor strobelii
  misc_feature: SGI EST ID NO. CUFF.53865.0
  misc_feature: Variant of the nucleotide sequence at SEQ ID NO 22923
gtggctgcttcgccgtgttgcacgacataatctacgaattctccgttgcatccggagaccggggtgagatgacctcagctcttcgcgatcagtagaggcgctgtgtatcgaagaggaccaaggccaccttcacggcattgcacccgtttttaccttcgcttgttctcgatatccgccaccgacctgcaccgcgcgtggaacttcaacgcctttgccccaccagccgcgggagctactgcaaccttcactcgggtactcaacggcctgcctatgtaggtgcatggcggttgaaccacgcgaggctctacctcatatgccttatatggcaagacatgcgggtataccggtgtgaagcaaccatatgtgtacaaactgctatcacacaatgtcccttgctgccccggcagagatgccgagctcaccgatatgggccctgttgagtcactaagactggccatgagtttactcgagtgacgattcgacgaacatttgggtcaacgatcctatatattggctctagggatattatagcgactgttcgtgcatgacttactactgtataccggacactgttaccgatttgacaatgcgaagtgcgatgaactgatgatatggcaattcgatagctcgatcgatctaatcccggcaagcctgatcgcgtcagtgacccttgagatgagtaccaacaacgatatttggccctggcttcgcggatctgacttgcatcgtggccggttgggacaaatgcatggttctctcgggtggtaatctgcgattgatatgcagctacctctcgttttaagtaaagatgatccccccttcactcttctacctgcgggttctgcccacgagaagagcagttggagctgaatccgcaacgttccaaaggtttggtttatgataccttgtctcccattgcggaaacaaaactgacgatcaccatggcacctttgcttgccttgagagaagatggagatcttgatgtgatctcatcctcgtcctcatcctccggagaattcttgttcggcaggagttttaccagcaagacgaacaagggtaagggcaaagcgacagatccgtacttgaaagcctgggccgatcgaccttggcccttgatcgatccgccttcgcgaagacagcatatcacccacccagtcattcacatcgcgaatgaaatctcacaaatacacaatgccatgatccgaggcctcaacgcgatctatctacaagcgccaagcgttcacaaaacccaagatgttgtggacctgctattcctgacacaaagctggagcgcctggatcctcgatcaccatgatctcaaagaagcgatcatcttacccggattcgagggcatcctcgggctacgccctaacgtcctgacactcaggcgaggagactccggctcagactctggcgtggaggcggatgccgcgccatctcctctatcctctggcaaagatagtggcattcatctaaacgctatcattgaggggacgaaagagaacgaaagtaggaggagagacatggataccgaagaagaggtatcattcctcctacgccgtgtctacgcctactcgacagccatacacaaagaaccccactcctataacgtaactatcttcgaagctctcctcgcatctctaggagatgtcctagtgccccatctcacgacacaggtcggcatgatgctcggcatgcgggagatgtgcttcgctgtgcctcccgccctagctctaccaacaccgcagatcataatcacgggctcatcttcagacaacccgacaatccgcccagcactcgtccgaacatctacttccctagcaccattcaacccgcgccccgtcaacagaaggacacaatccagcagtgccctacccgaagaaacagtcagcacgatacccaaaccagaatccactaaactcttcgaagcagaagaccgcgcaaacagactcctacaattctacctttcaacagagggcagagcctcagcgactatggaccggtacataatcccgcctatgattgtacgtctgcgagacgtgacgttctcccctccccttacattcctccctccctctccaccaccagcgtccaccgtcggttcactacttggcggaagagcagggagcgttagaggctcgataatgggaggaggtggcgggttcatgggagggagcacgagtgattggccgagattgagcgtcccggctgttcatgctgttgctgataaattgagtcctaagcatgcgggggcgtggagatttttgccttgtgatgtttgggggaggcctaaggagttgcctttttcttcttgagggaggtcaacagttgggaatgtgggttgaaggtttagagattaggagggttgttgatatcatcataggaatacgcacgttttgggctaatatagagacatggcgcatacgaagggctgcgaggtgtttggcgatagggctgttagtttcaatgtgtatacacgaggaaacacgatagagcatacggcatagtactatttagtcaattccaaggtgacagtgtacgtcgatcgggaacttactcgaatggtgattcgagagtttattactcctgcttctg

SEQ ID NO: 22926 - DNA, 1446 bp, Muscodor strobelii
  misc_feature: SGI cDNA ID NO. 567794
  misc_feature: Reduced expression when VOC is produced
  misc_feature: Encodes the peptide sequence at SEQ ID NO 22927
atgcccaacccaaaggctcacatgcgcagctctcgtcgcatacctcctctaaaagacaatgagatcgaccacgagatcggcctcgaagatcatgatgcttccaaagcaaagcagaaggcgaggcctctaagcacgcacacattccaatccggcgacccatcacctcccgatcagcctctagccccatctgaatctcgagcgcctcttaccgagaacgcggcagaaaatgggaagatatcgaacgaggatgagccagcagccggttcatctgcagcccaagccccgaatggccagcctcccgatgaggtcgatgcttcgttagaccctttagacgcctctgcttcatctccagaggatgctctgagggactcgagacgaatgagtgccaaaaagcgactatcccaacatcgtccaccgagcccgaacgaaatagaaaccgctatcgatattttatatgagaatcagcggggcggctttctttgtggcatcccgctcttctctggcgccgctttaggaaacctggatccgtcgccctggaccaattttgcgcacaaaactagtcctacagacatacacacagctcaggtgcccgatcctagttgggaatgggcttggccggagtggcgcgtcaaccacgacgagcagatccagaccgatagcgagggctgggaatattcgttcatgttctctaagaaattttcatggcacggcccaaggtggtacaactcatatgtacgaagaagagcatggattaggagacgaataaagaagggtatcggctatcaggcggttgatgagcatatgatgaacaaagcatacttcacggttgttgccaagagacaaagtcataatccactgacggatgcagatgagacagatggagcaagtttagacagacgatcacagaggtctcgaagtggatcacgaaaatcccgggacagatcgcgaggcacggaagacgacgtccccgtagctaccgaagtcaagactgccgaagctctaatgataaccctcaggagatcacgcattgaccgagaaaagctcgaagcggtcgagaactacattgaaaactgcacagacgacttattgcagctacaggaaagcatgcacgagataatgtctgtatttgtcttccaggcgtctaggaaattactattggctcgacttacaaaactgcacgacgaggttgcagataaggcgcgtaaaggaaaggggaaaggcaaatctatcacaacgcaaagggcccaacatctagcggaagcgatcaagcatgcagacgaagaagtccgcagattggaatattggagtgatatcaaagcaatggcggaagaaggcgaagcgccccgcgcggtggatcaagacaaaggctgggattcgaggtggcaaggactcgacaagagtggtgccaaaggcgtcaaggaagacgacctcccagcaccagtatga

SEQ ID NO: 22927 - protein, 481 aa, Muscodor strobelii
  misc_feature: SGI Peptide ID NO. 567794
  misc_feature (1)..(468): NCBI GI: 171691771 Blast Desc: protein product [Podospora anserina] gi|170945834|emb|CAP72635.1| protein product [Podospora anserina]
  misc_feature (7)..(468): NCBI GI: 116179796 Blast Desc: CHGG_00526 [Chaetomium globosum CBS 148.51] gi|88184823|gb|EAQ92291.1| CHGG_00526 [Chaetomium globosum CBS 148.51]
  misc_feature (1)..(468): NCBI GI: 261351868 Blast Desc: conserved [Verticillium albo-atrum VaMs.102]
  misc_feature (8)..(469): NCBI GI: 256731810 Blast Desc: NECHADRAFT_69568 [Nectria haematococca mpVI 77-13-4]
  misc_feature (8)..(469): NCBI GI: 46137449 Blast Desc: FG10240.1 [Gibberella zeae PH-1]
  misc_feature (1)..(468): NCBI GI: 85091326 Blast Desc: NCU04604 [Neurospora crassa OR74A] gi|28920235|gb|EAA29611.1| [Neurospora crassa OR74A] gi|28950044|emb|CAD70799.1| conserved [Neurospora crassa]
  misc_feature (11)..(475): NCBI GI: 154316450 Blast Desc: BC1G_04156 [Botryotinia fuckeliana B05.10] gi|150845956|gb|EDN21149.1| BC1G_04156 [Botryotinia fuckeliana B05.10]
  misc_feature (148)..(475): NCBI GI: 156043239 Blast Desc: SS1G_10622 [Sclerotinia sclerotiorum 1980] gi|154695010|gb|EDN94748.1| SS1G_10622 [Sclerotinia sclerotiorum 1980]
  misc_feature (9)..(468): NCBI GI: 39971791 Blast Desc: MGG_07211 [Magnaporthe grisea 70-15] gi|145019703|gb|EDK03931.1| MGG_07211 [Magnaporthe grisea 70-15]
  misc_feature (139)..(470): NCBI GI: 169617307 Blast Desc: SNOG_11831 [Phaeosphaeria nodorum SN15] gi|111059755|gb|EAT80875.1| SNOG_11831 [Phaeosphaeria nodorum SN15]
  misc_feature: Useful for introducing or modulating the production of volatile compounds
MPNPKAHMRSSRRIPPLKDNEIDHEIGLEDHDASKAKQKARPLSTHTFQSGDPSPPDQPLAPSESRAPLTENAAENGKISNEDEPAAGSSAAQAPNGQPPDEVDASLDPLDASASSPEDALRDSRRMSAKKRLSQHRPPSPNEIETAIDILYENQRGGFLCGIPLFSGAALGNLDPSPWTNFAHKTSPTDIHTAQVPDPSWEWAWPEWRVNHDEQIQTDSEGWEYSFMFSKKFSWHGPRWYNSYVRRRAWIRRRIKKGIGYQAVDEHMMNKAYFTVVAKRQSHNPLTDADETDGASLDRRSQRSRSGSRKSRDRSRGTEDDVPVATEVKTAEALMITLRRSRIDREKLEAVENYIENCTDDLLQLQESMHEIMSVFVFQASRKLLLARLTKLHDEVADKARKGKGKGKSITTQRAQHLAEAIKHADEEVRRLEYWSDIKAMAEEGEAPRAVDQDKGWDSRWQGLDKSGAKGVKEDDLPAPV

SEQ ID NO: 22928 - DNA, 2414 bp, Muscodor strobelii
  misc_feature: SGI EST ID NO. CUFF.53870.0
  misc_feature: Variant of the nucleotide sequence at SEQ ID NO 22926
gcttgacaaagcttttgtcgcgatctggtggagattacatcatagctgtcaacaattcgacagagcaaattcgctgcctgcattactgaaacgcatcgtgacctgcagaatcgccatagcagaagatggtttaattgagccttgatgcgtgaagttcccttgccttccccaatccagctctgagtacgcacatccagtccaagccagcttgctgtgctcagctatggactcatcacccgatcatcgtcatcatcgctagtgggcagcaactagctcccgcctcatcgtgtctagctcctcggtagcaagctcttagctcccaattgacaaacacctccctttccacaacttatgcctgttgccttcgttgttttctagcccaaaccccatgagcgatgcgtatctcagcctagtccatagcaacacatacgcgcctatccatttagagacttgccgtcctggcgtagacctgctcaacgactgccaattcggcttctccttttctaagcgcccccctcgcgctcgaagctcagcacgtgatcatcataattgatagcgccataagatcatgcttaatgtattgtagttatctcgacccgtcattttcttcgttttgggtgttgtaaggtgttgagagcacgcggggagtgagtcgagacggcccgctacaaatcaggatcgctcggtccgtaatgctgagcgcgacgagcccgaaccatgcccaacccaaaggctcacatgcgcagctctcgtcgcatacctcctctaaaagacaatgagatcgaccacgagatcggcctcgaagatcatgatgcttccaaagcaaagcagaaggcgaggcctctaagcacgcacacattccaatccggcgacccatcacctcccgatcagcctctagccccatctgaatctcgagcgcctcttaccgagaacgcggcagaaaatgggaagatatcgaacgaggatgagccagcagccggttcatctgcagcccaagccccgaatggccagcctcccgatgaggtcgatgcttcgttagaccctttagacgcctctgcttcatctccagaggatgctctgagggactcgagacgaatgagtgccaaaaagcgactatcccaacatcgtccaccgagcccgaacgaaatagaaaccgctatcgatattttatatgagaatcagcggggcggctttctttgtggcatcccgctcttctctggcgccgctttaggaaacctggatccgtcgccctggaccaattttgcgcacaaaactagtcctacagacatacacacagctcaggtgcccgatcctagttgggaatgggcttggccggagtggcgcgtcaaccacgacgagcagatccagaccgatagcgagggctgggaatattcgttcatgttctctaagaaattttcatggcacggcccaaggtggtacaactcatatgtacgaagaagagcatggattaggagacgaataaagaagggtatcggctatcaggcggttgatgagcatatgatgaacaaagcatacttcacggttgttgccaagagacaaagtcataatccactgacggatgcagatgagacagatggagcaagtttagacagacgatcacagaggtctcgaagtggatcacgaaaatcccgggacagatcgcgaggcacggaagacgacgtccccgtagctaccgaagtcaagactgccgaagctctaatgataaccctcaggagatcacgcattgaccgagaaaagctcgaagcggtcgagaactacattgaaaactgcacagacgacttattgcagctacaggaaagcatgcacgagataatgtctgtatttgtcttccaggcgtctaggaaattactattggctcgacttacaaaactgcacgacgaggttgcagataaggcgcgtaaaggaaaggggaaaggcaaatctatcacaacgcaaagggcccaacatctagcggaagcgatcaagcatgcagacgaagaagtccgcagattggaatattggagtgatatcaaagcaatggcggaagaaggcgaagcgccccgcgcggtggatcaagacaaaggctgggattcgaggtggcaaggactcgacaagagtggtgccaaaggcgtcaaggaagacgacctcccagcaccagtatgaattttcgagaattgttcacctgacggctatcgccatgtgttatacaggggtcggaaacgtgggcttttggaataccaattcgcgcaaggagagcggaacggagcgcgcgctaagatgatatattcggtatgcataccttgtcaaatatgcctccatcaattttatcgcaaaagaaaatacccctgtgccttatatcaccaacttcttatctatgattacctttcagtgagcaacccctcccacacagtcag

SEQ ID NO: 22929 - DNA, 396 bp, Muscodor strobelii
  misc_feature: SGI cDNA ID NO. 567795
  misc_feature: Encodes the peptide sequence at SEQ ID NO 22930
atgtcgcgatctagagttcccctcctcctcggcggtgctgctgccggaggtatcggatactacctctacactgctggaggcgaccccaaggttgctcagaagcaagctgaagccgacgcacacaaggcctccgctaagatcaagagcgagttgcctggccgaggcaaggaagctgagaaggatgccgagaagtatggcgctcaggctggtgctaagttcgacagtgctgtcagcaagactcaagccgaattagcaaaggctaaggccgacgctgaggcctatggcagagacgctaagaacgctacattgaagaagatcgacgagttcgacaagaaggtcgagaccgagactgctaaggcaaagagcggcgtctccagctggtttggtggcaagtaa

SEQ ID NO: 22930 - protein, 131 aa, Muscodor strobelii
  misc_feature: SGI Peptide ID NO. 567795
  misc_feature (1)..(131): NCBI GI: 39971793 Blast Desc: MGG_07212 [Magnaporthe grisea 70-15] gi|59803140|gb|AAX07720.1| [Magnaporthe grisea] gi|145019704|gb|EDK03932.1| MGG_07212 [Magnaporthe grisea 70-15]
  misc_feature (4)..(131): NCBI GI: 154316454 Blast Desc: [Botryotinia fuckeliana B05.10] gi|150845958|gb|EDN21151.1| [Botryotinia fuckeliana B05.10]
  misc_feature (4)..(131): NCBI GI: 156043241 Blast Desc: [Sclerotinia sclerotiorum 1980] gi|154695011|gb|EDN94749.1| [Sclerotinia sclerotiorum 1980]
  misc_feature (1)..(131): NCBI GI: 116179798 Blast Desc: CHGG_00527 [Chaetomium globosum CBS 148.51] gi|88184824|gb|EAQ92292.1| CHGG_00527 [Chaetomium globosum CBS 148.51]
  misc_feature (1)..(130): NCBI GI: 46137451 Blast Desc: FG10241.1 [Gibberella zeae PH-1]
  misc_feature (1)..(130): NCBI GI: 256732203 Blast Desc: NECHADRAFT_102668 [Nectria haematococca mpVI 77-13-4]
  misc_feature (1)..(131): NCBI GI: 171691773 Blast Desc: protein product [Podospora anserina] gi|170945835|emb|CAP72636.1| protein product [Podospora anserina]
  misc_feature (1)..(128): NCBI GI: 261351867 Blast Desc: [Verticillium albo-atrum VaMs.102]
  misc_feature (1)..(129): NCBI GI: 85091328 Blast Desc: NCU04605 [Neurospora crassa OR74A] gi|28920236|gb|EAA29612.1| [Neurospora crassa OR74A] gi|28950045|emb|CAD70800.1| [Neurospora crassa]
  misc_feature (2)..(130): NCBI GI: 119195121 Blast Desc: [Coccidioides immitis RS] gi|240105024|gb|EER23217.1| CPC735_045870 [Coccidioides posadasii C735 delta SOWgp]
MSRSRVPLLLGGAAAGGIGYYLYTAGGDPKVAQKQAEADAHKASAKIKSELPGRGKEAEKDAEKYGAQAGAKFDSAVSKTQAELAKAKADAEAYGRDAKNATLKKIDEFDKKVETETAKAKSGVSSWFGGK

SEQ ID NO: 22931 - DNA, 844 bp, Muscodor strobelii
  misc_feature: SGI EST ID NO. CUFF.53948.1
  misc_feature: Variant of the nucleotide sequence at SEQ ID NO 22929
tcaggtggcagggcaatgacaagggccgtttcgggttgatctttgttttcctttaagagctgcaggaccccctccttctgcgtatccaaccttcacgtcacacactgccatcagaccatcattcaaatcaatcattgtgctctgcaatttacttaccgttgactcgtctctctgcatcctccggacaacctacccaacaatcaacccacacattcagcatgtcgcgatctagagttcccctcctcctcggcggtgctgctgccggaggtatcggatactacctctacactgctggaggcgaccccaaggttgctcagaagcaagctgaagccgacgcacacaaggcctccgctaagatcaagagcgagttgcctggccgaggcaaggaagctgagaaggatgccgagaagtatggcgctcaggctggtgctaagttcgacagtgctgtcagcaagactcaagccgaattagcaaaggctaaggccgacgctgaggcctatggcagagacgctaagaacgctacattgaagaagatcgacgagttcgacaagaaggtcgagaccgagactgctaaggcaaagagcggcgtctccagctggtttggtggcaagtaaatcggctgtcactaaagagtcgatcttacgcggcgtacctttgtttataatggatgtattgcatgggcgaaacggtttatgctgtacgattatatctctataatgaactcaatcaacatcaataatccccaagctggcaatcggtcacgacaagaatcaggtgacaggtgtgactgtgagcgacattgagtcagtatcgaagtgcgactttgcaatgacaagcacctcca

SEQ ID NO: 22932 - DNA, 1053 bp, Muscodor strobelii
  misc_feature: SGI cDNA ID NO. 567796
  misc_feature: Encodes the peptide sequence at SEQ ID NO 22933
atggcggccattacaacagaagcactacacactttcacttcagcactgggggctggtgtcgcagtatatctatgtcatcagctaataaatgcggcatggctatattcgcgaccttccagtctgcatagatacaaatacgtcgacgaagcggggcgacaggcttgggctttggtcacagggtccagcgacggaatcggaaaatgtcttgcatctgaattggcagataacggcttcaatgttgtcttacatgggcgaaatgctgccaagctcgagcatgtgcgacacgaactacagatcgcaaacccgaatgtcgacttcaggatattagtcgccgatgcttcgcaatgccatcgtccagacgtcgtagacttcgaaggtattaagaagcagctctcagatttacacctcacagtattgataaattgcgctggagctggaccgaatccctcgtttggcgcgatcgagaaatacgacagcagatcgattattgataactttcatttgaatgctgcattccctacagctcttaccgctaccctattacccttcatgagaggagattatgacgaaagcgagaaggaatatgagatcgtcgaaagaagaacgagcacaagaggatatggtgtggcgtcaagacacaacccaatactcatcgtcaacatgtcatcggtgacaacttccggctttccattagtatcattctactcggcaggaaaggcagcatctcatgttcttcaccaagcgattgcgcgtgaagccgtgctggacggatgggataacgtcgagattatctcgcaccacgttggcgcagttacgtctgtctctcgccaacaagcgcctccgacactatttatgccgagtgcaaagactatggcgagagcgatattggcgaggacgggttgtggaaggaaaagtgtcacgccatattggccgcatgcgctacagcaagctttcttggccatcacgcctgagtgggtgatggagcgcgtcgtgtgtaacgccatgagagaggagaggaggatacaggatgagggcactagaacagatgaataa

SEQ ID NO: 22933 - protein, 350 aa, Muscodor strobelii
  misc_feature: SGI Peptide ID NO. 567796
  misc_feature (54)..(254): Pfam Id: PF00106 Pfam Desc: short chain dehydrogenase
  misc_feature (54)..(98): Pfam Id: PF00106 Pfam Desc: short chain dehydrogenase
  misc_feature (7)..(340): NCBI GI: 119494437 Blast Desc: short chain dehydrogenase/reductase, [Neosartorya fischeri NRRL 181] gi|119412276|gb|EAW22217.1| short chain dehydrogenase/reductase, [Neosartorya fischeri NRRL 181]
  misc_feature (5)..(340): NCBI GI: 70996520 Blast Desc: short chain dehydrogenase/reductase [Aspergillus fumigatus Af293] gi|66850650|gb|EAL90977.1| short chain dehydrogenase/reductase, [Aspergillus fumigatus Af293] short
  misc_feature (16)..(338): NCBI GI: 240111243 Blast Desc: oxidoreductase,short chain dehydrogenase, [Coccidioides posadasii C735 delta SOWgp]
  misc_feature (16)..(336): NCBI GI: 119189415 Blast Desc: CIMG_04755 [Coccidioides immitis RS]
  misc_feature (7)..(340): NCBI GI: 121700733 Blast Desc: short chain dehydrogenase/reductase, [Aspergillus clavatus NRRL 1] gi|119396774|gb|EAW07205.1| short chain dehydrogenase/reductase, [Aspergillus clavatus NRRL 1]
  misc_feature (14)..(339): NCBI GI: 238843130 Blast Desc: testosterone 17-beta-dehydrogenase 3 [Microsporum canis CBS 113480]
  misc_feature (21)..(347): NCBI GI: 225677848 Blast Desc: estradiol 17-beta-dehydrogenase [Paracoccidioides brasiliensis Pb03] gi|226287415|gb|EEH42928.1| estradiol 17-beta-dehydrogenase 12-A [Paracoccidioides brasiliensis Pb18]
  misc_feature (54)..(336): NCBI GI: 169615483 Blast Desc: SNOG_10899 [Phaeosphaeria nodorum SN15] gi|160702971|gb|EAT81398.2| SNOG_10899 [Phaeosphaeria nodorum SN15]
  misc_feature (8)..(331): NCBI GI: 239609447 Blast Desc: short chain dehydrogenase/reductase [Ajellomyces dermatitidis ER-3]
  misc_feature (8)..(331): NCBI GI: 261196452 Blast Desc: short chain dehydrogenase/reductase [Ajellomyces dermatitidis SLH14081] gi|239595874|gb|EEQ78455.1| short chain dehydrogenase/reductase [Ajellomyces dermatitidis SLH14081]
  misc_feature (12)..(339): SWISSPROT Homolog: EC 1.1.1.62 Estradiol 17-beta-dehydrogenase
MAAITTEALHTFTSALGAGVAVYLCHQLINAAWLYSRPSSLHRYKYVDEAGRQAWALVTGSSDGIGKCLASELADNGFNVVLHGRNAAKLEHVRHELQIANPNVDFRILVADASQCHRPDVVDFEGIKKQLSDLHLTVLINCAGAGPNPSFGAIEKYDSRSIIDNFHLNAAFPTALTATLLPFMRGDYDESEKEYEIVERRTSTRGYGVASRHNPILIVNMSSVTTSGFPLVSFYSAGKAASHVLHQAIAREAVLDGWDNVEIISHHVGAVTSVSRQQAPPTLFMPSAKTMARAILARTGCGRKSVTPYWPHALQQAFLAITPEWVMERVVCNAMREERRIQDEGTRTDE

SEQ ID NO: 22934 - DNA, 1860 bp, Muscodor strobelii
  misc_feature: SGI EST ID NO. CUFF.53879.0
  misc_feature: Variant of the nucleotide sequence at SEQ ID NO 22932
gaacgcgcaaacaaatgcgctgcttacctagtcaatatcatggcgcacattccataagccatgaacaaatcgtttatacttgacgatctggagtaaaatgacgatttccctgaactcttgtttcgtttcaattatcccaatcgggatggtcacccaagtcaagacccagaatctgtttcgactcctcctccgaaaagggccctagtttaggcgggcctccggcaagatcacctcccgaggatgagtgtagccgcttacggctacgacttacacgaagcggcaccttttggcacaccacgaagtctcggaacctaatgttcattggccttggcggcacttttcagaatgctaaatggaagcgtatttgacgtattttgattagactctgcaagtcttaccccgttaaatggtcacctgttgtcttttgtcttgtgctctttttctcgttttttcattgttgcttgttggagaaggatgagaatcaagttggtcggcagtgtttgacgagcaggaggaatccttacgaagacacggatttatatcttggactcggcgcatcctgcagacgtcactcgcgatacccttttgtcgacgatcttccgagaaaatggcggccattacaacagaagcactacacactttcacttcagcactgggggctggtgtcgcagtatatctatgtcatcagctaataaatgcggcatggctatattcgcgaccttccagtctgcatagatacaaatacgtcgacgaagcggggcgacaggcttgggctttggtcacagggtccagcgacggaatcggaaaatgtcttgcatctgaattggcagataacggcttcaatgttgtcttacatgggcgaaatgctgccaagctcgagcatgtgcgacacgaactacagatcgcaaacccgaatgtcgacttcaggatattagtcgccgatgcttcgcaatgccatcgtccagacgtcgtagacttcgaaggtattaagaagcagctctcagatttacacctcacagtattgataaattgcgctggagctggaccgaatccctcgtttggcgcgatcgagaaatacgacagcagatcgattattgataactttcatttgaatgctgcattccctacagctcttaccgctaccctattacccttcatgagaggagattatgacgaaagcgagaaggaatatgagatcgtcgaaagaagaacgagcacaagaggatatggtgtggcgtcaagacacaacccaatactcatcgtcaacatgtcatcggtgacaacttccggctttccattagtatcattctactcggcaggaaaggcagcatctcatgttcttcaccaagcgattgcgcgtgaagccgtgctggacggatgggataacgtcgagattatctcgcaccacgttggcgcagttacgtctgtctctcgccaacaagcgcctccgacactatttatgccgagtgcaaagactatggcgagagcgatattggcgaggacgggttgtggaaggaaaagtgtcacgccatattggccgcatgcgctacagcaagctttcttggccatcacgcctgagtgggtgatggagcgcgtcgtgtgtaacgccatgagagaggagaggaggatacaggatgagggcactagaacagatgaataaattagagatgagggtatgctgtgaataatccgttgaccatggtcaagaaagacggggagttggagatggatcttttttgtatatagttgtcccttaagtgttggtgattcccccaccgcgaaagccaatgcaatccttggcgaaaagatgatctcagaatttagatctgactgactttggtgatggaagaatgaaaagac

SEQ ID NO: 22935 - DNA, 858 bp, Muscodor strobelii
  misc_feature: SGI cDNA ID NO. 567797
  misc_feature: Encodes the peptide sequence at SEQ ID NO 22936
atgtcaatccttcttaccggcggcaacggcaagacggcccctcgtatcgcagcattactcgcctcaaacaagataccttatctattaggctcgcgtacaggacctagtgacaaatctggttatcggcccgttgtcaagttcgacatgagcgatgagtccacctggacaacggttcttaagcagacccctataaaggctgtctacataatggaaccgcgaatcagagagccttgggtatatatgaataagttcatcgacgttgcaaaggagcatggcgttagccgtgttgtcttgtgtgctggcacatcggctgcgattggcaaggatggaatgggaagagtatgggagcatcttctcaagtccggtattgactatgctgtacttagaccgtcttggttcatggacaatctctcagattcaggatttggtattgcgtttagcattagcaagctaaataagtttgacacggctactcaggacgggaagattggattcgtcagtgctgatgatgttgccgaggtggcatatcatgctctcacagatgagaagtcatacaactgtgacctgagggttcttgggcctgagaacttaacttatgatgaggttgccgagacattatcaaaagtcctcggccgcaaaattcgaaatgtgaagttagacgagaccgagcgtattaatggtttgctgcatgccggtatgccagattacttcgcccgattcctaactcgtattgagctctttgctgctcaaggtggcgagatggggacatcggacgttgtcgaaaggttgacaggacaccctcctaaaagcttcgagaaattcgcggagaagaataagtctgtgtggtcagccatatag

SEQ ID NO: 22936 - protein, 285 aa, Muscodor strobelii
  misc_feature: SGI Peptide ID NO. 567797
  misc_feature (3)..(218): Pfam Id: PF05368 Pfam Desc: NmrA-like family
  misc_feature (1)..(282): NCBI GI: 119483794 Blast Desc: NFIA_095230 [Neosartorya fischeri NRRL 181] gi|119409956|gb|EAW19903.1| conserved [Neosartorya fischeri NRRL 181]
  misc_feature (1)..(282): NCBI GI: 70986183 Blast Desc: nucleoside-diphosphate-sugar epimerase family protein [Aspergillus fumigatus Af293] gi|66846215|gb|EAL86548.1| nucleoside-diphosphate-sugar epimerase family protein fumigatus
  misc_feature (1)..(280): NCBI GI: 242218088 Blast Desc: [Postia placenta Mad-698-R] gi|220726026|gb|EED79990.1| [Postia placenta Mad-698-R]
  misc_feature (1)..(282): NCBI GI: 154294535 Blast Desc: BC1G_13870 [Botryotinia fuckeliana B05.10] gi|150844710|gb|EDN19903.1| BC1G_13870 [Botryotinia fuckeliana B05.10]
  misc_feature (1)..(282): NCBI GI: 242206422 Blast Desc: [Postia placenta Mad-698-R] gi|220731932|gb|EED85772.1| [Postia placenta Mad-698-R]
  misc_feature (1)..(279): NCBI GI: 156032882 Blast Desc: SS1G_13847 [Sclerotinia sclerotiorum 1980] gi|154699249|gb|EDN98987.1| SS1G_13847 [Sclerotinia sclerotiorum 1980]
  misc_feature (1)..(282): NCBI GI: 124110196 Blast Desc: conserved protein EasG [Neotyphodium lolii]
  misc_feature (7)..(282): NCBI GI: 242218048 Blast Desc: [Postia placenta Mad-698-R] gi|220726006|gb|EED79970.1| [Postia placenta Mad-698-R]
  misc_feature (1)..(282): NCBI GI: 226287406 Blast Desc: conserved [Paracoccidioides brasiliensis Pb18]
  misc_feature (1)..(282): NCBI GI: 225677857 Blast Desc: YesF [Paracoccidioides brasiliensis Pb03]
MSILLTGGNGKTAPRIAALLASNKIPYLLGSRTGPSDKSGYRPVVKFDMSDESTWTTVLKQTPIKAVYIMEPRIREPWVYMNKFIDVAKEHGVSRVVLCAGTSAAIGKDGMGRVWEHLLKSGIDYAVLRPSWFMDNLSDSGFGIAFSISKLNKFDTATQDGKIGFVSADDVAEVAYHALTDEKSYNCDLRVLGPENLTYDEVAETLSKVLGRKIRNVKLDETERINGLLHAGMPDYFARFLTRIELFAAQGGEMGTSDVVERLTGHPPKSFEKFAEKNKSVWSAI

SEQ ID NO: 22937 - DNA, 1109 bp, Muscodor strobelii
  misc_feature: SGI EST ID NO. CUFF.53886.0
  misc_feature: Variant of the nucleotide sequence at SEQ ID NO 22935
ggagtaatcaattgcttcacattcacgatgcattcaagcatcacagtatcaatgcgcataaatatgtattggaatccgaacctcgtttctcacttcattaacatccatttctttcatatagataaactaaagtcgtgaaactgcaccttctcactcaccgagcactcgatcatctaccaaaatgtcaatccttcttaccggcggcaacggcaagacggcccctcgtatcgcagcattactcgcctcaaacaagataccttatctattaggctcgcgtacaggacctagtgacaaatctggttatcggcccgttgtcaagttcgacatgagcgatgagtccacctggacaacggttcttaagcagacccctataaaggctgtctacataatggaaccgcgaatcagagagccttgggtatatatgaataagttcatcgacgttgcaaaggagcatggcgttagccgtgttgtcttgtgtgctggcacatcggctgcgattggcaaggatggaatgggaagagtatgggagcatcttctcaagtccggtattgactatgctgtacttagaccgtcttggttcatggacaatctctcagattcaggatttggtattgcgtttagcattagcaagctaaataagtttgacacggctactcaggacgggaagattggattcgtcagtgctgatgatgttgccgaggtggcatatcatgctctcacagatgagaagtcatacaactgtgacctgagggttcttgggcctgagaacttaacttatgatgaggttgccgagacattatcaaaagtcctcggccgcaaaattcgaaatgtgaagttagacgagaccgagcgtattaatggtttgctgcatgccggtatgccagattacttcgcccgattcctaactcgtattgagctctttgctgctcaaggtggcgagatggggacatcggacgttgtcgaaaggttgacaggacaccctcctaaaagcttcgagaaattcgcggagaagaataagtctgtgtggtcagccatatagtgtgtttgagagattgcctgcgtcacgtgtaaggttagatgtaaaataggcccatcatgataagtaattc

SEQ ID NO: 22938 - DNA, 1512 bp, Muscodor strobelii
  misc_feature: SGI cDNA ID NO. 567798
  misc_feature: Encodes the peptide sequence at SEQ ID NO 22939
atgaagaccgacgacatcccagtggccagcggtcacgaaaatgcaagaaagatatatgcattttttcgtaagataggtgtggagcctaatgagatcaccgaaatggtagaaaccaacaaggttacggatatgtgcctaccaattcccatcccggtgtattcgttgctactcgagcccagcaagttcaaacatacagaaaaggagatatatgagctgcaagagcaatatctagatgaggacttggtcatcaaagatgaatgtcattggccgcatgggcatgtaaatctaaccaaagcctctcacaacgaacacggagtcgcgaatattctacaagatgagggtgaattcaaaaatgcaccaccgggatcaacgtctactgttctgaaggtcaggcgtccggcttctgggaatacctacgaatacttcgcgttgaaaaaatttactcgcgaggcggagctatcgcagatgaaaggccagatgcattatatagtcggcgagatccaggcactgaagaagattcgccatgatcatttcatcagactagtgaccagctacacgactcggaggcacatcggtatactgatgagtccggtggcagaatgggatctcgcgagcttcttggaacatgttcaccaaagaagagttggaggtgcggcagtacatagggaagaaaatgcactggcgggctctttcgggtgtttagccacagcccttatgtgtctgcactacaaataccgtattcggcacaaagacatcaagccacagaatatccttgtcaatcacaacctgaccgtgctcttgacagattttggcctcgccttagattgtattgtccacccgaatttcctcgaggccaagcgagaggaatatgggctagaaaattattggatgctggatcggcagcagaaagtttcggacatgctcgaagagcttagagatatcccgacatgctggggtcatgagcccttagaatggatcaaagggatgctccaaatggaacggacagatcgctacactgctaggaggctcgtggaagtggtgagagctgccaagactgccgacaattgtggatttgttggccattgctgtaggcaatggaaagacacaaacttgatctttgaggatgatactcaactgaagcattatcaagccggcccggagcaatttgagtcagccggctacaaaaaagctcatttatggaacgaggatcatcatcgatgtgatatagaactgagcatgaaggaaggcccatggtcgcgatgtcactggatctctcaagaagttgtcgacaatttgggtattgccgtcaccgacggcgcttcagccgccaacgtcgttttgggcagcaccaacatctcatccactcagcgcacagaacagctgtcatggatctctgatgacgattcttcaacaaagtatcataagttcatggtagcgaagttgccaccgggacttgacatggttgttacaacatcacctagagaagaagaagatattcttcatccgaactaa

SEQ ID NO: 22939 - protein, 503 aa, Muscodor strobelii
  misc_feature: SGI Peptide ID NO. 567798
  misc_feature (246)..(273): Pfam Id: PF00069 Pfam Desc: Protein kinase domain
  misc_feature (80)..(281): NCBI GI: 169617217 Blast Desc: SNOG_11785 [Phaeosphaeria nodorum SN15] gi|160703363|gb|EAT80829.2| SNOG_11785 [Phaeosphaeria nodorum SN15]
  misc_feature (92)..(273): NCBI GI: 116200450 Blast Desc: CHGG_10770 [Chaetomium globosum CBS 148.51] gi|88175484|gb|EAQ82952.1| CHGG_10770 [Chaetomium globosum CBS 148.51]
  misc_feature (166)..(273): NCBI GI: 189197631 Blast Desc: dual specificity mitogen-activated protein kinase kinase 1 [Pyrenophora tritici-repentis Pt-1C-BFP] gi|187981101|gb|EDU47727.1| dual specificity mitogen-activated 1
  misc_feature (115)..(273): NCBI GI: 169620624 Blast Desc: SNOG_13515 [Phaeosphaeria nodorum SN15] gi|111057842|gb|EAT78962.1| SNOG_13515 [Phaeosphaeria nodorum SN15]
  misc_feature (154)..(282): NCBI GI: 195999258 Blast Desc: TRIADDRAFT_21151 [Trichoplax adhaerens] gi|190587621|gb|EDV27663.1| TRIADDRAFT_21151 [Trichoplax adhaerens]
  misc_feature (145)..(273): NCBI GI: 156030530 Blast Desc: SS1G_14489 [Sclerotinia sclerotiorum 1980] gi|154700880|gb|EDO00619.1| SS1G_14489 [Sclerotinia sclerotiorum 1980]
  misc_feature (166)..(273): NCBI GI: 169616884 Blast Desc: SNOG_11618 [Phaeosphaeria nodorum SN15] gi|160703282|gb|EAT81326.2| SNOG_11618 [Phaeosphaeria nodorum SN15]
  misc_feature (175)..(275): NCBI GI: 169600253 Blast Desc: SNOG_02957 [Phaeosphaeria nodorum SN15] gi|111068568|gb|EAT89688.1| SNOG_02957 [Phaeosphaeria nodorum SN15]
  misc_feature (124)..(273): NCBI GI: 171682258 Blast Desc: protein product [Podospora anserina] gi|170941088|emb|CAP66738.1| protein product [Podospora anserina]
  misc_feature (138)..(276): NCBI GI: 115665242 Blast Desc: : similar to doublecortin and CaM kinase-like 3 [Strongylocentrotus purpuratus] gi|115939124|ref|XP_001195546.1| : similar to doublecortin and CaM kinase-like 3 purpuratus]
MKTDDIPVASGHENARKIYAFFRKIGVEPNEITEMVETNKVTDMCLPIPIPVYSLLLEPSKFKHTEKEIYELQEQYLDEDLVIKDECHWPHGHVNLTKASHNEHGVANILQDEGEFKNAPPGSTSTVLKVRRPASGNTYEYFALKKFTREAELSQMKGQMHYIVGEIQALKKIRHDHFIRLVTSYTTRRHIGILMSPVAEWDLASFLEHVHQRRVGGAAVHREENALAGSFGCLATALMCLHYKYRIRHKDIKPQNILVNHNLTVLLTDFGLALDCIVHPNFLEAKREEYGLENYWMLDRQQKVSDMLEELRDIPTCWGHEPLEWIKGMLQMERTDRYTARRLVEVVRAAKTADNCGFVGHCCRQWKDTNLIFEDDTQLKHYQAGPEQFESAGYKKAHLWNEDHHRCDIELSMKEGPWSRCHWISQEVVDNLGIAVTDGASAANVVLGSTNISSTQRTEQLSWISDDDSSTKYHKFMVAKLPPGLDMVVTTSPREEEDILHPN

SEQ ID NO: 22940 - DNA, 895 bp, Muscodor strobelii
  misc_feature: SGI EST ID NO. CUFF.53891.0
  misc_feature: Variant of the nucleotide sequence at SEQ ID NO 22938
gagcaatttgagtcagccggctacaaaaaagctcatttatggaacgaggatcatcatcgatgtgatatagaactgagcatgaaggaaggcccatggtcgcgatgtcactggatctctcaagaagttgtcgacaatttgggtattgccgtcaccgacggcgcttcagccgccaacgtcgttttgggcagcaccaacatctcatccactcagcgcacagaacagctgtcatggatctctgatgacgattcttcaacaaagtatcataagttcatggtagcgaagttgccaccgggacttgacatggttgttacaacatcacctagagaagaagaagatattcttcatccgaactaacgtttttgtagcattctttatgatcttttgatttctttcatttttctttaccaaaaaaaccatgtgacgataccagggttgaggcccgatttcagcaggcccgcactccgataatccctatcaccttgtgcctcctttacagctcctcaagaactatgtttttcttcaaagtggtttgagcatacgaagcatgtaagatgcgtaccaaattttctcagcttagggatggaatgatgagtgagttagccttaatgaggcataagattgatttttgcgtgcttgactcgcctccaacgagagtgctgccaacctgtacctagaacatggtctcaacggtattttctgccgctaattaacttggttggagattcgtttgcgaagctacatggacgaatttgttccgcatcaagcctagtctactgagacgacagcatgcttgagtgaccacaaggatttacattggcttgacttcaaagcgtacgcttgtacggttttatgtattgaaggagatgcgtattgaatgggggaaattcgatatagg

SEQ ID NO: 22941 - DNA, 1275 bp, Muscodor strobelii
  misc_feature: SGI cDNA ID NO. 567799
  misc_feature: Encodes the peptide sequence at SEQ ID NO 22942
atggccgacccgctgtctgtggcgggcctgggccttggagccgtgtctctgatattacaagtcattgatgattgtcacaaattgtacaggtatttcaccgaagcgagtgagatgacacaatcttaccagtatcttcatgtccgcatgcagatggaaaagcaacgcttctctagcttcaccgcggaagcaaatactctgttcaagcccgaggagattagtggcgaattgaatatcgatcaaacgcttctctttgcggtgttgtgcgatatcaaggacactttcggaaaattcgagagatgcgccctgagatatggtaacgtcatagtaatggatggttacaaagacaacgatagatcgaaacaaggcttgccggaattactatggcgcactgactcccccaccacgtcgagtaacactttggaggtttctaatatgaaaagtacaaagatattcagagtacgtgcaaagaaggtggcgcagagacttcgagtagttgctcgagagcctaaacgcctcgcctgggccatgactggaaaagacgaaatggaggcgctagtcgccaggttgtcagagctgaactccttcctcatctcacttctcaacgactctcaagccaagcgactgcagtgcgctgtcagggccaactctatggaactcctacatgtccgcaaggatgtaaaggatctaaggattttggttcgagcattggatttagacatcaaaaacggcacaaatcgtactgatttgcgacatccggagattttcggtagagaaacaatgagcgatcagtctgtacgagctaatttgcaagaattggcgaacttgaagatccgtaaagtcaaaatccagcaactagacggacaagtcatgtcgagcagcgaatgcagtccctgtcatttgttgctggatatgtctgagctggaaattcttccaagttccgatgaaagtcgttatcgacgggtagttgctcaatggaatgctcgcaaggtttggattgaatggctgtacaacgatacgcatagcatgactcgaggagatagggccaatgaagctcgccaggcagagactcgtttagaaaacaaagcctacctaattgccagtcttcttagaaagaaagcccctgtcagttttcgaaccttgcggagtgtcggatatgtcaagggcgcactggatggccgtgacaccgcatacggcgtggtatttgaattacccccagattcggggacaaaagttcagtttgcgacctctctcggcctcgagaaagagtggaactaa

SEQ ID NO: 22942 - protein, 424 aa, Muscodor strobelii
  misc_feature: SGI Peptide ID NO. 567799
  misc_feature (3)..(408): NCBI GI: 171686338 Blast Desc: protein product [Podospora anserina] gi|170943130|emb|CAP68783.1| protein product [Podospora anserina]
  misc_feature (1)..(422): NCBI GI: 256733434 Blast Desc: NECHADRAFT_77521 [Nectria haematococca mpVI 77-13-4]
  misc_feature (3)..(385): NCBI GI: 156060491 Blast Desc: SS1G_02384 [Sclerotinia sclerotiorum 1980] gi|154699792|gb|EDN99530.1| SS1G_02384 [Sclerotinia sclerotiorum 1980]
  misc_feature (3)..(247): NCBI GI: 154311899 Blast Desc: BC1G_05983 [Botryotinia fuckeliana B05.10] gi|150850633|gb|EDN25826.1| BC1G_05983 [Botryotinia fuckeliana B05.10]
  misc_feature (3)..(404): NCBI GI: 85086807 Blast Desc: NCU10557 [Neurospora crassa OR74A] gi|28918853|gb|EAA28522.1| conserved [Neurospora crassa OR74A]
  misc_feature (3)..(404): NCBI GI: 116200448 Blast Desc: CHGG_10769 [Chaetomium globosum CBS 148.51] gi|88175483|gb|EAQ82951.1| CHGG_10769 [Chaetomium globosum CBS 148.51]
  misc_feature (1)..(402): NCBI GI: 169784568 Blast Desc: [Aspergillus oryzae RIB40] gi|83775492|dbj|BAE65612.1| protein product [Aspergillus oryzae]
  misc_feature (3)..(415): NCBI GI: 255930513 Blast Desc: Pc06g02130 [Penicillium chrysogenum Wisconsin 54-1255] gi|211581429|emb|CAP79206.1| Pc06g02130 [Penicillium chrysogenum Wisconsin 54-1255]
  misc_feature (156)..(408): NCBI GI: 116207914 Blast Desc: CHGG_03250 [Chaetomium globosum CBS 148.51] gi|88183847|gb|EAQ91315.1| CHGG_03250 [Chaetomium globosum CBS 148.51]
  misc_feature (5)..(236): NCBI GI: 46120494 Blast Desc: FG04894.1 [Gibberella zeae PH-1]
MADPLSVAGLGLGAVSLILQVIDDCHKLYRYFTEASEMTQSYQYLHVRMQMEKQRFSSFTAEANTLFKPEEISGELNIDQTLLFAVLCDIKDTFGKFERCALRYGNVIVMDGYKDNDRSKQGLPELLWRTDSPTTSSNTLEVSNMKSTKIFRVRAKKVAQRLRVVAREPKRLAWAMTGKDEMEALVARLSELNSFLISLLNDSQAKRLQCAVRANSMELLHVRKDVKDLRILVRALDLDIKNGTNRTDLRHPEIFGRETMSDQSVRANLQELANLKIRKVKIQQLDGQVMSSSECSPCHLLLDMSELEILPSSDESRYRRVVAQWNARKVWIEWLYNDTHSMTRGDRANEARQAETRLENKAYLIASLLRKKAPVSFRTLRSVGYVKGALDGRDTAYGVVFELPPDSGTKVQFATSLGLEKEWN

SEQ ID NO: 22943 - DNA, 1038 bp, Muscodor strobelii
  misc_feature: SGI EST ID NO. CUFF.53906.0
  misc_feature: Variant of the nucleotide sequence at SEQ ID NO 22941
gcaagatatagtactaagccgccccgatgagagcgcacgatggcaacaattgctgacgtggctgcatctcatgctacagtgacctgcgggctacagcctcgacaagaagaattttacttgccgcccgaacctcgattgttcagactacctgaggcaaaccatgtcagaacagctgtcgatgcacggctgacagcctggcttggacgccttaggcattcaaaccgaaaatgctcattccttaggactttgatcattcaaatgatcctacttttggcccctttgctattacaatcgagacacagagcctcgcgaatggccgacccgctgtctgtggcgggcctgggccttggagccgtgtctctgatattacaagtcattgatgattgtcacaaattgtacaggtatttcaccgaagcgagtgagatgacacaatcttaccagtatcttcatgtccgcatgcagatggaaaagcaacgcttctctagcttcaccgcggaagcaaatactctgttcaagcccgaggagattagtggcgaattgaatatcgatcaaacgcttctctttgcggtgttgtgcgatatcaaggacactttcggaaaattcgagagatgcgccctgagatatggtaacgtcatagtaatggatggttacaaagacaacgatagatcgaaacaaggcttgccggaattactatggcgcactgactcccccaccacgtcgagtaacactttggaggtttctaatatgaaaagtacaaagatattcagagtacgtgcaaagaaggtggcgcagagacttcgagtagttgctcgagagcctaaacgcctcgcctgggccatgactggaaaagacgaaatggaggcgctagtcgccaggttgtcagagctgaactccttcctcatctcacttctcaacgactctcaagccaagcgactgcagtgcgctgtcagggccaactctatggaactcctacatgtccgcaaggatgtaaaggatctaaggattttggttcgagcattggatttagacatcaaaaac

SEQ ID NO: 22944 - DNA, 1233 bp, Muscodor strobelii
  misc_feature: SGI cDNA ID NO. 567800
  misc_feature: Elevated expression when VOC is produced
  misc_feature: Encodes the peptide sequence at SEQ ID NO 22945
atggcagtgtatagcaagttctggaaacatgctgaaaaagtgtatggagctttgcttgatactttatcctgcccttgcaaggaaagacattatgcccagctcaatttacatcatcgatgtgcttctgacaaacagttcaaactgattattcatcataaggatgctcaggatgatcgtgagttaacaataaagtggaaaaactgctcgctccatattcaggtcttcgccagtcctagcaaagcagctctcacgactccacagacacgaccagctcttgcaccaccggttcttgcaccaccgactcttgcaccaccgactcttgcaccaccgactcttgcaccaccgactcttgcaccaccgactcttaagactacaaagtcggtcaaatctcgagtcaaaaaattcttgaagccattgtcgagtttgaaacgtggtaacccattacaccctccggggctcgccccgccgactgctgcaatacaactcgataacataccaaggagtgttcgatttcaagatccgagagagagcgtggctgcggaattacctcagccagcacccgatccacaaatagacaatctatgcatgtcactgggctcgaggatcggtagtgggctcattggccaagaaggttgcaagtacgcattaaatttcaggcacatcgcgttacctgaaaggcgtctgctatcacagattctactactgaacgaagtagaaagtttcaagcgctaccgaagactcaaagtagcattaacattggcgtcatctttcatacagctcaagggctccccatggctcctgggcacctggactaaggaaagcattgcattctcggttgtagatggatgcatcggttttgagtcaccatcgatgcaccgtcaattttgctcttcccgcgaggcccagagtcatagcaaagaggaattaaatactagcatagagtgtcttgggatcgtactcctggaactatgcttcgggaaagcgattgaacagcagtactcggaatacaatctgcaagtggcgaatgggcagtacagagcgggcatggacatgatggttgcctctagatgggtacaggaggctgctgaagaagttgggcgtggatataccggtgccgtgcaatggtgcttttcaggactttgcaaattatccagcgatgagaagagctggcgagaagagatgcttcaaaaagtagtggccccactacaagagtgtgtcaagccttttgagtag

SEQ ID NO: 22945 - protein, 410 aa, Muscodor strobelii
  misc_feature: SGI Peptide ID NO. 567800
  misc_feature (168)..(410): NCBI GI: 145604312 Blast Desc: MGG_08492 [Magnaporthe grisea 70-15] gi|145012330|gb|EDJ96986.1| MGG_08492 [Magnaporthe grisea 70-15]
  misc_feature (229)..(379): NCBI GI: 85109551 Blast Desc: NCU07592 [Neurospora crassa OR74A] gi|28924618|gb|EAA33736.1| [Neurospora crassa OR74A]
  misc_feature (176)..(409): NCBI GI: 255934891 Blast Desc: Pc13g00180 [Penicillium chrysogenum Wisconsin 54-1255] gi|211583092|emb|CAP91087.1| Pc13g00180 [Penicillium chrysogenum Wisconsin 54-1255]
  misc_feature (169)..(335): NCBI GI: 255956817 Blast Desc: Pc21g21900 [Penicillium chrysogenum Wisconsin 54-1255] gi|211590872|emb|CAP97087.1| Pc21g21900 [Penicillium chrysogenum Wisconsin 54-1255]
  misc_feature (241)..(380): NCBI GI: 119196583 Blast Desc: CIMG_02666 [Coccidioides immitis RS]
  misc_feature (237)..(409): NCBI GI: 240274341 Blast Desc: conserved [Ajellomyces capsulatus H143]
  misc_feature (237)..(409): NCBI GI: 225554970 Blast Desc: conserved [Ajellomyces capsulatus G186AR]
  misc_feature (243)..(410): NCBI GI: 67902630 Blast Desc: AN8302.2 [Aspergillus nidulans FGSC A4] gi|40747711|gb|EAA66867.1| AN8302.2 [Aspergillus nidulans FGSC A4] gi|259484226|tpe|CBF80266.1| TPA: conserved [Aspergillus FGSC
  misc_feature (237)..(409): NCBI GI: 154270750 Blast Desc: [Ajellomyces capsulatus NAm1] gi|150409803|gb|EDN05243.1| [Ajellomyces capsulatus NAm1]
  misc_feature (235)..(409): NCBI GI: 239614508 Blast Desc: conserved [Ajellomyces dermatitidis ER-3]
  misc_feature: Useful for introducing or modulating the production of volatile compounds
MAVYSKFWKHAEKVYGALLDTLSCPCKERHYAQLNLHHRCASDKQFKLIIHHKDAQDDRELTIKWKNCSLHIQVFASPSKAALTTPQTRPALAPPVLAPPTLAPPTLAPPTLAPPTLAPPTLKTTKSVKSRVKKFLKPLSSLKRGNPLHPPGLAPPTAAIQLDNIPRSVRFQDPRESVAAELPQPAPDPQIDNLCMSLGSRIGSGLIGQEGCKYALNFRHIALPERRLLSQILLLNEVESFKRYRRLKVALTLASSFIQLKGSPWLLGTWTKESIAFSVVDGCIGFESPSMHRQFCSSREAQSHSKEELNTSIECLGIVLLELCFGKAIEQQYSEYNLQVANGQYRAGMDMMVASRWVQEAAEEVGRGYTGAVQWCFSGLCKLSSDEKSWREEMLQKVVAPLQECVKPFE

SEQ ID NO: 22946 - DNA, 1245 bp, Muscodor strobelii
  misc_feature: SGI EST ID NO. CUFF.53933.0
  misc_feature: Variant of the nucleotide sequence at SEQ ID NO 22944
gtatggagctttgcttgatactttatcctgcccttgcaaggaaagacattatgcccagctcaatttacatcatcgatgtgcttctgacaaacagttcaaactgattattcatcataaggatgctcaggatgatcgtgagttaacaataaagtggaaaaactgctcgctccatattcaggtcttcgccagtcctagcaaagcagctctcacgactccacagacacgaccagctcttgcaccaccggttcttgcaccaccgactcttgcaccaccgactcttgcaccaccgactcttgcaccaccgactcttgcaccaccgactcttaagactacaaagtcggtcaaatctcgagtcaaaaaattcttgaagccattgtcgagtttgaaacgtggtaacccattacaccctccggggctcgccccgccgactgctgcaatacaactcgataacataccaaggagtgttcgatttcaagatccgagagagagcgtggctgcggaattacctcagccagcacccgatccacaaatagacaatctatgcatgtcactgggctcgaggatcggtagtgggctcattggccaagaaggttgcaagtacgcattaaatttcaggcacatcgcgttacctgaaaggcgtctgctatcacagattctactactgaacgaagtagaaagtttcaagcgctaccgaagactcaaagtagcattaacattggcgtcatctttcatacagctcaagggctccccatggctcctgggcacctggactaaggaaagcattgcattctcggttgtagatggatgcatcggttttgagtcaccatcgatgcaccgtcaattttgctcttcccgcgaggcccagagtcatagcaaagaggaattaaatactagcatagagtgtcttgggatcgtactcctggaactatgcttcgggaaagcgattgaacagcagtactcggaatacaatctgcaagtggcgaatgggcagtacagagcgggcatggacatgatggttgcctctagatgggtacaggaggctgctgaagaagttgggcgtggatataccggtgccgtgcaatggtgcttttcaggactttgcaaattatccagcgatgagaagagctggcgagaagagatgcttcaaaaagtagtggccccactacaagagtgtgtcaagccttttgagtagagatatcaaaatcatatttagcatgttttcaatcttcaggatcaaggtttgac

SEQ ID NO: 22947 - DNA, 1338 bp, Muscodor strobelii
  misc_feature: SGI cDNA ID NO. 567801
  misc_feature: Encodes the peptide sequence at SEQ ID NO 22948
atggccttgcattctttcaattaccagatcactgtccccatcaaaatacgagactaccataaagccccgtggactgtcgcgcagcatgacggcgaaacgagcggggctgagacttgcgtgaagattcaagaaaaaggtgcgatgagcaagctccgatggactgacgtgatcattggtgagatcaaacccaaattcgagcaagcaggacactctgtagtcgacgtgagagagggacagggtccaacaatgaggtctcctacgcataattattttaatgagcgcatcgactgctaccgagatgctcggggattagaaattggtgaatacatcgcgttggaaataacatccaagtcatacgcatggaaaggcgccgcctaccccagcgtaatgttgaacctctcatacgactgggagaaagaccttcgcggtattgggagccttctcaaaaatcatgtatctagcaatccggaccactgggtattctgcgatactcgctttcacctcgccttccacccaggttggccacccgaggtccgtactccggtcgaagtggctcgtcttgtggcgtttgccgccattttattccaacctgcactcgacgacctcatgcccaagctaccaatgaaatacgtggatcgaccttggggctcgccatcacttattactgacatgagacaaatctggaaacagcttcagttgattgacaatgtcgaaggaatacagcgtctagtttgcaataatcacggcgcgggcgagcagcacgcgaaaaactacaccttcaacttcagcggcttcgattacacaactattgagttccgtcaactctaccccatcctcaatgcgcatgtcttgccagaatttgcgagccttgacgaaatcgccgagacggctgcgcgggatagtagggacggggccaggactatgatggcgaagatctacggatgtactaaacgcccccaaggggccttggacctgtcacatctccttttcggcagaaataagcgcatttctgatctcattgaaaacatgatgctctgccgtgagctatttgaggggttcatggcccgcagactgaagctggaaggtgggaatcttctgcctgtgctccctcaggtaattttacagcaatcatcggttccagctcgacaacagccgcaggtctcagccccggggccagaggagtttcgatggagaactcaccgtcaacgggttgcgggcgcaagattccagtttccagagcagtttccaaagaatggagctcaagatgctgaagtagaagatgaacccgaacctgaaaaggacgaagctcaagacgtggaaatgggaaatgcacactag

SEQ ID NO: 22948 - protein, 445 aa, Muscodor strobelii
  misc_feature: SGI Peptide ID NO. 567801
MALHSFNYQITVPIKIRDYHKAPWTVAQHDGETSGAETCVKIQEKGAMSKLRWTDVIIGEIKPKFEQAGHSVVDVREGQGPTMRSPTHNYFNERIDCYRDARGLEIGEYIALEITSKSYAWKGAAYPSVMLNLSYDWEKDLRGIGSLLKNHVSSNPDHWVFCDTRFHLAFHPGWPPEVRTPVEVARLVAFAAILFQPALDDLMPKLPMKYVDRPWGSPSLITDMRQIWKQLQLIDNVEGIQRLVCNNHGAGEQHAKNYTFNFSGFDYTTIEFRQLYPILNAHVLPEFASLDEIAETAARDSRDGARTMMAKIYGCTKRPQGALDLSHLLFGRNKRISDLIENMMLCRELFEGFMARRLKLEGGNLLPVLPQVILQQSSVPARQQPQVSAPGPEEFRWRTHRQRVAGARFQFPEQFPKNGAQDAEVEDEPEPEKDEAQDVEMGNAH

SEQ ID NO: 22949 - DNA, 591 bp, Muscodor strobelii
  misc_feature: SGI cDNA ID NO. 567802
  misc_feature: Encodes the peptide sequence at SEQ ID NO 22950
atgtctaggaagcaggtgaagggagagtatatcgagaccgacaccggtaacaaggtggcccgcaaggccatcttggtcggcactcagcacatcatgcttggcggcaagacggttatccaggccgaagcgatgatccgaggcgacctggctcgcactcaagcatcctcaggtgcaggcgccgctcctggaagtaacacgtctgtcgctatcggccggtattgctttctcagcaaaggttgctgtttgcgaccgccgggtcgcatgtacaaagggtccttcacttatctccctctccggctcggcgaccatgtcttcatcggcgaacgaacagtagtccaagccgccacagtcggcagccacgtgcacatcggtcaagacgttgtggtcggagaatttgctatcatcaaagactacgtccgcatcctcgacggctcgattgtggccccgaatatggtgataccgagtttcagcattgttgctgggcagcccgctcgcgttgtcggtgaggtgccagagggaggccacgaggcttttgagcttagggagctctacaagaccgttggaaacaacccgcagcctgtaccatcatga

SEQ ID NO: 22950 - protein, 196 aa, Muscodor strobelii
  misc_feature: SGI Peptide ID NO. 567802
  misc_feature (1)..(193): NCBI GI: 46137599 Blast Desc: FG10315.1 [Gibberella zeae PH-1]
  misc_feature (2)..(195): NCBI GI: 116197543 Blast Desc: CHGG_06927 [Chaetomium globosum CBS 148.51] gi|88178206|gb|EAQ85674.1| CHGG_06927 [Chaetomium globosum CBS 148.51]
  misc_feature (1)..(193): NCBI GI: 85084999 Blast Desc: dynactin subunit 5 [Neurospora crassa OR74A] gi|28918512|gb|EAA28185.1| dynactin subunit 5 [Neurospora crassa OR74A] gi|28950219|emb|CAD71086.1| dynactin Arp1 p25 subunit
  misc_feature (1)..(193): NCBI GI: 256731851 Blast Desc: [Nectria haematococca mpVI 77-13-4]
  misc_feature (1)..(187): NCBI GI: 8453187 Blast Desc: AF264759_1 dynactin Arp1 p25 subunit RO12 [Neurospora crassa]
  misc_feature (1)..(193): NCBI GI: 39947454 Blast Desc: MGG_08423 [Magnaporthe grisea 70-15] gi|145012245|gb|EDJ96901.1| MGG_08423 [Magnaporthe grisea 70-15]
  misc_feature (32)..(193): NCBI GI: 171676597 Blast Desc: protein product [Podospora anserina] gi|170936365|emb|CAP61023.1| protein product [Podospora anserina]
  misc_feature (1)..(189): NCBI GI: 154294234 Blast Desc: dynactin [Botryotinia fuckeliana B05.10] gi|150844813|gb|EDN20006.1| dynactin [Botryotinia fuckeliana B05.10]
  misc_feature (1)..(188): NCBI GI: 258572949 Blast Desc: UREG_00169 [Uncinocarpus reesii 1704] gi|237900922|gb|EEP75323.1| UREG_00169 [Uncinocarpus reesii 1704]
  misc_feature (1)..(188): NCBI GI: 242782745 Blast Desc: dynactin Arp1 p25 subunit [Talaromyces stipitatus ATCC 10500] gi|218720208|gb|EED19627.1| dynactin Arp1 p25 subunit [Talaromyces stipitatus ATCC 10500]
MSRKQVKGEYIETDTGNKVARKAILVGTQHIMLGGKTVIQAEAMIRGDLARTQASSGAGAAPGSNTSVAIGRYCFLSKGCCLRPPGRMYKGSFTYLPLRLGDHVFIGERTVVQAATVGSHVHIGQDVVVGEFAIIKDYVRILDGSIVAPNMVIPSFSIVAGQPARVVGEVPEGGHEAFELRELYKTVGNNPQPVPS

SEQ ID NO: 22951 - DNA, 1285 bp, Muscodor strobelii
  misc_feature: SGI EST ID NO. CUFF.53943.0
  misc_feature: Variant of the nucleotide sequence at SEQ ID NO 22949
tagctaccccagcatatggggtagcattgcttctcgcaccctgagctccaagctatgacatcgcgtctagcgaacgcgtttgttgcagcggatttcgctatcccgaatcgaaatgtctaggaagcaggtgaagggagagtatatcgagaccgacaccggtaacaaggtggcccgcaaggccatcttggtcggcactcagcacatcatgcttggcggcaagacggttatccaggccgaagcgatgatccgaggcgacctggctcgcactcaagcatcctcaggtgcaggcgccgctcctggaagtaacacgtctgtcgctatcggccggtattgctttctcagcaaaggttgctgtttgcgaccgccgggtcgcatgtacaaagggtccttcacttatctccctctccggctcggcgaccatgtcttcatcggcgaacgaacagtagtccaagccgccacagtcggcagccacgtgcacatcggtcaagacgttgtggtcggagaatttgctatcatcaaagactacgtccgcatcctcgacggctcgattgtggccccgaatatggtgataccgagtttcagcattgttgctgggcagcccgctcgcgttgtcggtgaggtgccagagggaggccacgaggcttttgagcttagggagctctacaagaccgttggaaacaacccgcagcctgtaccatcatgaacggcacgcgagagcatttggaagaatttcagaaggatgctcaacatctaaagtacgagcgccagagtctgtgctgacatgcacttttgcgtacgcggccttgtttcagccagctacaatttatgtccagcggcatgacttgttgctactgcggaccgcgagccctcgacgaataagtatcatgatgccagccaatagagcatgggcttgatggtcttctcgaggagacagagtgccttgcgctgagtaacttgacccagatagagacatcgtttactgaaagagatacccaaagacagtgaagtcgctgaaggatagcgatgcgtagacggcaccagggatctgcttaaaggccgatgaacaagtcggaacagcaatatgggtgcgtgaggtcccagacgaagtattggtagtgtagtattccacagcccgtccacgcactaggaagcttgaacatcaaggagctctgcctagtcaggaatggcgtgggtaggtattatgcaaatggcgcatgtccatgaatcacagcttatcagcaagaacaggtagtcaatgccaattaccattgtaagcccatacctc

SEQ ID NO: 22952 - DNA, 1137 bp, Muscodor strobelii
  misc_feature: SGI cDNA ID NO. 567803
  misc_feature: Reduced expression when VOC is produced
  misc_feature: Encodes the peptide sequence at SEQ ID NO 22953
atgccgactacaacgggatcggccgaaccgaaggctgcgggcgacgaggtcaccgggtccaaacatgacatgccggagaaagcttctcctgaacccaagcgagcaaagaaagacgacgatagaaagcagcagacaatcgaggacacgatgccaagtccaactgaggcatatggcaatggtcatgcgcctaaaaaagaaaagacggagccagagacgaagacagacgattccgacgtcaacgcgcagaatgagccagagaataatggtagcgccgaggagcctagtgcgcgcgaaggtgaagtgccctcgtcaattctcgagaaaggcttgatctacttcttctttcgcggtcgcgtgggaatcgatgagccaagcgaggtcaatgaaatccagcgtagtttcatgctccttcgacctatagacaaagacgccaaacttggcgagggcacaattggcgacgctggcaatactcgacttattgctgtacctaagaaggtgttccctcgtagcggcaaggaccgttggattgctttcgttgagaagtctagtgtttctttccaggagcttaaagacgacttcctctcgtccactgattatgagaccaagactgttggtactcgtcacaatcccgccgctacgcctgctgcagaaggtgtatatgcgatcactaccactggacgtgaaagccaccttgtgtacatgatcactcttccgtcaagcttgggagaggtccaaatggagcttggcctgagagagaaggggagcttcatcctcagcactcgaaatccgaaatatgatgctcccaaaggcactgcccttccccaaggtgctgagtaccctcaggatgtccaagatgaattccgcgctttgcgatggatgccgacggaacctaagcatctagatttcgtcaacacccaattcttactgattggggagtcaagcggtatcaagaaggccaccgaaccccaggaagacgacgtcgaagcagggaaagaaaagccggaagaggaacttgagaaactggaagacgaggatactcatcgcatggaagatctcaagggcgatgattctgccgcgatctttgcagatttggatgctagagctaaggactatcccaaactgcaaacgacgttttga

SEQ ID NO: 22953 - protein, 378 aa, Muscodor strobelii
  misc_feature: SGI Peptide ID NO. 567803
  misc_feature (19)..(378): NCBI GI: 171684187 Blast Desc: protein product [Podospora anserina] gi|170942054|emb|CAP67706.1| protein product [Podospora anserina]
  misc_feature (19)..(378): NCBI GI: 85090253 Blast Desc: NCU07349 [Neurospora crassa OR74A] gi|28919680|gb|EAA29093.1| conserved [Neurospora crassa OR74A]
  misc_feature (5)..(378): NCBI GI: 256729063 Blast Desc: NECHADRAFT_68963 [Nectria haematococca mpVI 77-13-4]
  misc_feature (18)..(378): NCBI GI: 46138801 Blast Desc: FG10915.1 [Gibberella zeae PH-1]
  misc_feature (28)..(378): NCBI GI: 261359864 Blast Desc: conserved [Verticillium albo-atrum VaMs.102]
  misc_feature (2)..(378): NCBI GI: 169600515 Blast Desc: SNOG_03095 [Phaeosphaeria nodorum SN15] gi|160705454|gb|EAT89826.2| SNOG_03095 [Phaeosphaeria nodorum SN15]
  misc_feature (38)..(378): NCBI GI: 189211257 Blast Desc: conserved [Pyrenophora tritici-repentis Pt-1C-BFP] gi|187978052|gb|EDU44678.1| conserved [Pyrenophora tritici-repentis Pt-1C-BFP]
  misc_feature (91)..(378): NCBI GI: 239611464 Blast Desc: conserved [Ajellomyces dermatitidis ER-3]
  misc_feature (91)..(378): NCBI GI: 261205164 Blast Desc: conserved [Ajellomyces dermatitidis SLH14081] gi|239592378|gb|EEQ74959.1| conserved [Ajellomyces dermatitidis SLH14081]
  misc_feature (21)..(378): NCBI GI: 240281032 Blast Desc: conserved [Ajellomyces capsulatus H143]
  misc_feature: Useful for introducing or modulating the production of volatile compounds
MPTTTGSAEPKAAGDEVTGSKHDMPEKASPEPKRAKKDDDRKQQTIEDTMPSPTEAYGNGHAPKKEKTEPETKTDDSDVNAQNEPENNGSAEEPSAREGEVPSSILEKGLIYFFFRGRVGIDEPSEVNEIQRSFMLLRPIDKDAKLGEGTIGDAGNTRLIAVPKKVFPRSGKDRWIAFVEKSSVSFQELKDDFLSSTDYETKTVGTRHNPAATPAAEGVYAITTTGRESHLVYMITLPSSLGEVQMELGLREKGSFILSTRNPKYDAPKGTALPQGAEYPQDVQDEFRALRWMPTEPKHLDFVNTQFLLIGESSGIKKATEPQEDDVEAGKEKPEEELEKLEDEDTHRMEDLKGDDSAAIFADLDARAKDYPKLQTTF

SEQ ID NO: 22954 - DNA, 1596 bp, Muscodor strobelii
  misc_feature: SGI EST ID NO. CUFF.53975.1
  misc_feature: Variant of the nucleotide sequence at SEQ ID NO 22952
cgctaagagagcttgtcgcttaggccctgtccctgtctcaatcaatgacatcagcttgatgagtgcataaggtgtggtacttcaccgagtgggaaggcacgatatcttgcacatgcctttcttgtttctcatgtgatgagttcttgccatttctgatccacgaggacacaacgtcacatcaccacttcaattccgtaacgccactaagtgaggtctacgcgaacattgcatcaaatcgacagcgattgacaacatgccgactacaacgggatcggccgaaccgaaggctgcgggcgacgaggtcaccgggtccaaacatgacatgccggagaaagcttctcctgaacccaagcgagcaaagaaagacgacgatagaaagcagcagacaatcgaggacacgatgccaagtccaactgaggcatatggcaatggtcatgcgcctaaaaaagaaaagacggagccagagacgaagacagacgattccgacgtcaacgcgcagaatgagccagagaataatggtagcgccgaggagcctagtgcgcgcgaaggtgaagtgccctcgtcaattctcgagaaaggcttgatctacttcttctttcgcggtcgcgtgggaatcgatgagccaagcgaggtcaatgaaatccagcgtagtttcatgctccttcgacctatagacaaagacgccaaacttggcgagggcacaattggcgacgctggcaatactcgacttattgctgtacctaagaaggtgttccctcgtagcggcaaggaccgttggattgctttcgttgagaagtctagtgtttctttccaggagcttaaagacgacttcctctcgtccactgattatgagaccaagactgttggtactcgtcacaatcccgccgctacgcctgctgcagaaggtgtatatgcgatcactaccactggacgtgaaagccaccttgtgtacatgatcactcttccgtcaagcttgggagaggtccaaatggagcttggcctgagagagaaggggagcttcatcctcagcactcgaaatccgaaatatgatgctcccaaaggcactgcccttccccaaggtgctgagtaccctcaggatgtccaagatgaattccgcgctttgcgatggatgccgacggaacctaagcatctagatttcgtcaacacccaattcttactgattggggagtcaagcggtatcaagaaggccaccgaaccccaggaagacgacgtcgaagcagggaaagaaaagccggaagaggaacttgagaaactggaagacgaggatactcatcgcatggaagatctcaagggcgatgattctgccgcgatctttgcagatttggatgctagagctaaggactatcccaaactgcaaacgacgttttgaggagctatgtgtactaaaatcaagggttcggataacgggcaactacggataatggaacaggaatggcgttcgtaaaagtctatggagcaatttggtcgcttttgctttttgcttgtatgatgtaggagtcaatgtagatagcgtcgtcaccttgtgctcagcatctttgccctcgacatcaaatacgaatggacttttaatgcaat

SEQ ID NO: 22955 - DNA, 855 bp, Muscodor strobelii
  misc_feature: SGI cDNA ID NO. 567804
  misc_feature: Elevated expression when VOC is produced
  misc_feature: Encodes the peptide sequence at SEQ ID NO 22956
atgtcgccagccacagtcaaagagcctcagactcagaaccctgaggcaatccaagtcatgggaaagacaaagagcggaaagaagctgcaaattcgatcatatcccaagttcgttagtctcgaagatgagagactgtacaggaaacagcatctagcagctacattccgtgtcttcgctgaccgtggctttgacgagggtgtcgcaggacatatctctgttcgggatcctattctgacagaccacttttggcttaatcccttgtcgatgcacttctcgttgatcaaagtctcggatctaatcctcgtggatgagcacggcaccgtcgtagaaggagaccaacccatcaacgctgctgccttcgcgatccattcacaaatccatcgcgcacggcccgacgtgcacgccgcatgccatgcccacagcatgtacggaaaagctttcagcgcctttggccgggagctcgagatgttgaaccaggacgcgtgccgtttctacaagtgtcacggggtgtacacggatttccgcggtgtcgtcgtcgaagaggaagaagggcggcgcatcggcgcagcgcttggaaacggcaaggcggtaattctgcagaaccatgggatacttacggttggcggaagtgtcgatgaagcggcattttggttcctaagtcttgagaagagctgccaggctcaacttctttgtgatgcggcggctgcaaatggataccagaagaagattcttatcgatgatgagactgccgagctgacgcttgcgcagaatggcgcgcctgagaagggatggttggcttttcagccctattatgacgagcaagtggccaagacaaagggcgagttcttgaactag

SEQ ID NO: 22956 - protein, 284 aa, Muscodor strobelii
  misc_feature: SGI Peptide ID NO. 567804
  misc_feature (49)..(247): Pfam Id: PF00596 Pfam Desc: Class II Aldolase and Adducin N-terminal domain
  misc_feature (2)..(283): NCBI GI: 238494866 Blast Desc: class II aldolase/adducin domain protein [Aspergillus flavus NRRL3357] gi|220695319|gb|EED51662.1| class II aldolase/adducin domain protein [Aspergillus flavus NRRL3357]
  misc_feature (2)..(283): NCBI GI: 169777677 Blast Desc: [Aspergillus oryzae RIB40] gi|83772041|dbj|BAE62171.1| protein product [Aspergillus oryzae]
  misc_feature (3)..(283): NCBI GI: 259486995 Blast Desc: TPA: conserved [Aspergillus nidulans FGSC A4]
  misc_feature (4)..(283): NCBI GI: 189207917 Blast Desc: class II aldolase/adducin domain containing protein [Pyrenophora tritici-repentis Pt-1C-BFP] gi|187976385|gb|EDU43011.1| class II aldolase/adducin domain
  misc_feature (13)..(284): NCBI GI: 256722619 Blast Desc: [Nectria haematococca mpVI 77-13-4]
  misc_feature (3)..(274): NCBI GI: 67522401 Blast Desc: AN1657.2 [Aspergillus nidulans FGSC A4] gi|40745621|gb|EAA64777.1| AN1657.2 [Aspergillus nidulans FGSC A4]
  misc_feature (2)..(283): NCBI GI: 240108656 Blast Desc: Class II Aldolase and Adducin N-terminal domain containing protein [Coccidioides posadasii C735 delta SOWgp]
  misc_feature (6)..(283): NCBI GI: 169615330 Blast Desc: SNOG_10822 [Phaeosphaeria nodorum SN15] gi|160702937|gb|EAT82216.2| SNOG_10822 [Phaeosphaeria nodorum SN15]
  misc_feature (15)..(283): NCBI GI: 225681845 Blast Desc: class II aldolase/adducin domain-containing protein [Paracoccidioides brasiliensis Pb03]
  misc_feature (15)..(283): NCBI GI: 226288942 Blast Desc: Class II Aldolase family protein [Paracoccidioides brasiliensis Pb18]
  misc_feature (60)..(214): SWISSPROT Homolog: EC 4.1.2.17 L-fuculose-phosphate aldolase
  misc_feature: Useful for introducing or modulating the production of volatile compounds
MSPATVKEPQTQNPEAIQVMGKTKSGKKLQIRSYPKFVSLEDERLYRKQHLAATFRVFADRGFDEGVAGHISVRDPILTDHFWLNPLSMHFSLIKVSDLILVDEHGTVVEGDQPINAAAFAIHSQIHRARPDVHAACHAHSMYGKAFSAFGRELEMLNQDACRFYKCHGVYTDFRGVVVEEEEGRRIGAALGNGKAVILQNHGILTVGGSVDEAAFWFLSLEKSCQAQLLCDAAAANGYQKKILIDDETAELTLAQNGAPEKGWLAFQPYYDEQVAKTKGEFLN

SEQ ID NO: 22957 - DNA, 2397 bp, Muscodor strobelii
  misc_feature: SGI EST ID NO. CUFF.53951.2
  misc_feature: Variant of the nucleotide sequence at SEQ ID NO 22955
ctccgagatcatgaggcatagatcatattcacttatcaggcgatagtacccgaatcaatacgaagagtaaatcgcaatcttgagctcaccaaataaggatcacggcttttcatacctacatacttgacccaattcaagctgaagcgaacgacgattctcacgttgtgtagcctgaaggattgagaaataccagtaacatcatgtcgccagccacagtcaaagagcctcagactcagaaccctgaggcaatccaagtcatgggaaagacaaagagcggaaagaagctgcaaattcgatcatatcccaagttcgttagtctcgaagatgagagactgtacaggaaacagcatctagcagctacattccgtgtcttcgctgaccgtggctttgacgagggtgtcgcaggacatatctctgttcgggatcctattctgacagaccacttttggcttaatcccttgtcgatgcacttctcgttgatcaaagtctcggatctaatcctcgtggatgagcacggcaccgtcgtagaaggagaccaacccatcaacgctgctgccttcgcgatccattcacaaatccatcgcgcacggcccgacgtgcacgccgcatgccatgcccacagcatgtacggaaaagctttcagcgcctttggccgggagctcgagatgttgaaccaggacgcgtgccgtttctacaagtgtcacggggtgtacacggatttccgcggtgtcgtcgtcgaagaggaagaagggcggcgcatcggcgcagcgcttggaaacggcaaggcggtaattctgcagaaccatgggatacttacggttggcggaagtgtcgatgaagcggcattttggttcctaagtcttgagaagagctgccaggctcaacttctttgtgatgcggcggctgcaaatggataccagaagaagattcttatcgatgatgagactgccgagctgacgcttgcgcagaatggcgcgcctgagaagggatggttggcttttcagccctattatgacgagcaagtggccaagacaaagggcgagttcttgaactagaacattcattactacggaataggacagccacaatgggtcgcacgtttatggactgatgcacagatcgtgaacagtcgggcgctcgggcgtggcgtttttcggccctggggcaaacctaggctctgcctgggattaggatgtcaagtattgccgaacggcttgccgacaggcgacagttcgggcagttaacgtgagcattgtacaggcatattccaagcagaggagattgtcacagatagtgtatggcctgattgcctttactcaacgaggccgtcgataggctagtatggatactacgttgtaatagaatacataaagctggggtttgccctgttctctttccggacacaagcttcgagattttaagggtcgccgagatgcaaatgccgaatgtgaacaaaagcgctgatcatctcgacttttggacttacgaatgaaaagcgcgatgcaacagatgcaacatatgtagtcaatcgtggtgtttggttcgtcagtatcccgcccgagagaatacgccgtcaattcgatgctgctgcttcattttccaattaaacttcatttttgggtgtcgttttggttgtgcttgtatcagtgggcgattcaaaggaatgtctacaaaggtttcatcgatggggtctaggggtcgcggcagttctggccttgttctgatcggtctgtccggtctgatgttatcccagtatgccttgatctggtcgtctgatagcccgccgatcgttgtaaacgccacgcactgaaagcttggttttctgatatgttcttgtttgcgtttgaggctctatttagtaaacttcactgttgagttgcaagttttggatcaaggttgtaagaccgagacctctaaaccaactcgatgactacagtttaggcattttaaatatgaatattgaacagactgtgaattttacttgtgagactcatacttcgataagcaacgaaaaaaccaactcccagtgtggcactcacgatgagctgcgttgagtcaagtcagacaaggagactagttggtcaatctgtacgtatgtagttgcttatgatgtgaaacgttactcagtaatcttaagtttcaatagttgatctgggtcgatgaaataagccttgcaatcctgctagatactcaatagataagccgggaaagcttcatttcgttttcgttgcattggccgaccaaaagggtcaagatgatcttcgaatatacatagaaactggtgatcataactgcgcggttcaacagactgggcccgaaacgggttaagctatgggtctgttgcttcacctgactcctgttgtttgatttccgatagccgctgggcgaagtcgctgt

SEQ ID NO: 22958 - DNA, 1146 bp, Muscodor strobelii
  misc_feature: SGI cDNA ID NO. 567805
  misc_feature: Elevated expression when VOC is produced
  misc_feature: Encodes the peptide sequence at SEQ ID NO 22959
atggttgaagctccctacgatgtaccgaccgttctcccggccgagaacggtgtcgtggtcttcaggacggctatcatcactccattctttacagcgttcttcgtcttcgctagattctatgccagattccatttgatgaagagaaagccaactattgatgactatatcgttgccatgacattcatgatctgcataacatattcagtacttatgggtatcgccgcacgcatgggcatgggcttacacgtatggcaatatacgaaagaaatcaactcatcatactacctctggattggtatcacatcggagttctactgcttgggcttggctggtttcaagagtgctcttgtcctactgtatctccagacattcggcctcgtcagcaagaaattcaggattgcttgctacttgacgttgttctacacgctgggatatcttttcgcgaatttgatctctcagttcctcggttgtacgccggttgctaaattctgggatcaagatctacctggtcattgcatcgacaagagaggcgcaaacactttcttcggaatcggacatgtaacgagcgacttgatcatcgcaattcttcctctgcgtccaatctggaaactatcgtttccctcgactaaacaaaagatcggactgagtctgactctcacgactggctttctcgcgtgggcagttgcaacagttcgatatgtcatctcaacatatgatcaattcacatacgatagaacgtggtgggcgggaattggtttcgccctttcaatccttgaaatgaacacagggctcatctgtgcctgcgttccgacattcagccctctcctgaccgcattctcctccttccgctcgaatcatgttgtttcgagttggactgcccgcgcctcgggtgttttccacaatagtgcagagcgaaaggcatgggaggaaagtctagaggatgctcataggaaaaattgggaagacatggagatgaattatcatggtcacctctccacgcaagcgtcacaaactacaatgaataccacgagcagtcgaaaattgagcgaagcacaaacaattgtggcaacgatatctcacgaagatgagatgagcctggtcaacccttatggcaagaagcaactagctacgcatgaggaggtatag

SEQ ID NO: 22959 - protein, 381 aa, Muscodor strobelii
  misc_feature: SGI Peptide ID NO. 567805
  misc_feature (33)..(306): NCBI GI: 238503281 Blast Desc: integral membrane protein, [Aspergillus flavus NRRL3357] gi|220691684|gb|EED48032.1| integral membrane protein, [Aspergillus flavus NRRL3357]
  misc_feature (52)..(285): NCBI GI: 226287616 Blast Desc: PADG_07949 [Paracoccidioides brasiliensis Pb18]
  misc_feature (52)..(279): NCBI GI: 226279560 Blast Desc: PAAG_06173 [Paracoccidioides brasiliensis Pb01]
  misc_feature (9)..(320): NCBI GI: 261198116 Blast Desc: integral membrane protein [Ajellomyces dermatitidis SLH14081] gi|239595423|gb|EEQ78004.1| integral membrane protein [Ajellomyces dermatitidis SLH14081]
  misc_feature (38)..(322): NCBI GI: 189189134 Blast Desc: conserved [Pyrenophora tritici-repentis Pt-1C-BFP] gi|187972512|gb|EDU40011.1| conserved [Pyrenophora tritici-repentis Pt-1C-BFP]
  misc_feature (8)..(270): NCBI GI: 85119181 Blast Desc: NCU02903 [Neurospora crassa OR74A] gi|28927396|gb|EAA36349.1| [Neurospora crassa OR74A]
  misc_feature (35)..(361): NCBI GI: 255949598 Blast Desc: Pc22g16520 [Penicillium chrysogenum Wisconsin 54-1255] gi|211592583|emb|CAP98940.1| Pc22g16520 [Penicillium chrysogenum Wisconsin 54-1255]
  misc_feature (13)..(323): NCBI GI: 171679834 Blast Desc: protein product [Podospora anserina] gi|170939543|emb|CAP64770.1| protein product [Podospora anserina]
  misc_feature (32)..(325): NCBI GI: 261202796 Blast Desc: integral membrane protein [Ajellomyces dermatitidis SLH14081] gi|239590709|gb|EEQ73290.1| integral membrane protein [Ajellomyces dermatitidis SLH14081]
  misc_feature (32)..(281): NCBI GI: 239612423 Blast Desc: integral membrane protein [Ajellomyces dermatitidis ER-3]
  misc_feature: Useful for introducing or modulating the production of volatile compounds
MVEAPYDVPTVLPAENGVVVFRTAIITPFFTAFFVFARFYARFHLMKRKPTIDDYIVAMTFMICITYSVLMGIAARMGMGLHVWQYTKEINSSYYLWIGITSEFYCLGLAGFKSALVLLYLQTFGLVSKKFRIACYLTLFYTLGYLFANLISQFLGCTPVAKFWDQDLPGHCIDKRGANTFFGIGHVTSDLIIAILPLRPIWKLSFPSTKQKIGLSLTLTTGFLAWAVATVRYVISTYDQFTYDRTWWAGIGFALSILEMNTGLICACVPTFSPLLTAFSSFRSNHVVSSWTARASGVFHNSAERKAWEESLEDAHRKNWEDMEMNYHGHLSTQASQTTMNTTSSRKLSEAQTIVATISHEDEMSLVNPYGKKQLATHEEV

SEQ ID NO: 22960 - DNA, 2479 bp, Muscodor strobelii
  misc_feature: SGI EST ID NO. CUFF.53960.0
  misc_feature: Variant of the nucleotide sequence at SEQ ID NO 22958
gttgcaatcaatgacttgtcattcttgaaacgaaacaagacaatgtccggtccgatgagcatgaataatctgaagcaacaggttcgggggctctaaatctaaattgggaaactttcatctaagtcgcaaaaccatcgtattctgcccttatcctactactactatcatctctgcaataatctcgctcggtttcgcttcacgtgtaagacatgagaacaaactcaaaaaataggcgtcgaatagttcatcaaagaatgccttagtattcgtagatcgagccaatgacaccctatgaaatatcaatgtggcaaggagcagaaaaaggtccttgaggcaatccttgcttttcagactagcagcggcgtccctgcgggtaccttaaaccaaggccaccctggagaaaacccccggtatcgtcggcctctgaaccccccatgtctcgaagtgtcaaaaatggatatctcctggctcgtcccaactgtctctcaatcaataaagtatttacgtccggcagatgagattgcgtttgtgcgaccacgcgttgaggctggctcctgataatcgcactcattcaacacctagccactgatcaccagcaatgtcgtcgtaatcaccgctttcaccaacaccgcgtcattttgtttcaatcagcttgcgacttgttctcccacacactccttcaatatggttgaagctccctacgatgtaccgaccgttctcccggccgagaacggtgtcgtggtcttcaggacggctatcatcactccattctttacagcgttcttcgtcttcgctagattctatgccagattccatttgatgaagagaaagccaactattgatgactatatcgttgccatgacattcatgatctgcataacatattcagtacttatgggtatcgccgcacgcatgggcatgggcttacacgtatggcaatatacgaaagaaatcaactcatcatactacctctggattggtatcacatcggagttctactgcttgggcttggctggtttcaagagtgctcttgtcctactgtatctccagacattcggcctcgtcagcaagaaattcaggattgcttgctacttgacgttgttctacacgctgggatatcttttcgcgaatttgatctctcagttcctcggttgtacgccggttgctaaattctgggatcaagatctacctggtcattgcatcgacaagagaggcgcaaacactttcttcggaatcggacatgtaacgagcgacttgatcatcgcaattcttcctctgcgtccaatctggaaactatcgtttccctcgactaaacaaaagatcggactgagtctgactctcacgactggctttctcgcgtgggcagttgcaacagttcgatatgtcatctcaacatatgatcaattcacatacgatagaacgtggtgggcgggaattggtttcgccctttcaatccttgaaatgaacacagggctcatctgtgcctgcgttccgacattcagccctctcctgaccgcattctcctccttccgctcgaatcatgttgtttcgagttggactgcccgcgcctcgggtgttttccacaatagtgcagagcgaaaggcatgggaggaaagtctagaggatgctcataggaaaaattgggaagacatggagatgaattatcatggtcacctctccacgcaagcgtcacaaactacaatgaataccacgagcagtcgaaaattgagcgaagcacaaacaattgtggcaacgatatctcacgaagatgagatgagcctggtcaacccttatggcaagaagcaactagctacgcatgaggaggtatagcgatcacctcgccctatgtcctatcatatagaaacgaatttatgagcaatgtcaatattcccaaatttacataagcctgattgatgtttggaatgatctgaatgtgattagagccaaaatggtgaatgagcgggaacttgcctagaccacgatgtggcggtcacattgctcatgaggctatcggcccagactacgcactgcaaatatttaaaccaagtaccgtgtctcagcgaaccatcgattaccgaattatgaccgatgcacgagccttgcgcggaagggcaattgccggaaggaagccattcaacgacgcgttctacagcgtgccacataggtaactcgcagagcatatctagaaaattggtcgactagttaggatagagtattcacttattcagtcattcggattttgtatcatatctccaatctacaagtcaaacgcctgtgttgtcattgtctgtcgtgaaagctctttcgtctagtttcttacagtctgttcctcgcaaagaatacgtcaatcgggcaatatcttgcaagccgtgcagctaatatgaggctatgatagttaactctatttcttatcggcttaactttctttagggtcgctgtcttccgtctgtttgttttttacttcatagttcgaattcct

SEQ ID NO: 22961 - DNA, 804 bp, Muscodor strobelii
  misc_feature: SGI cDNA ID NO. 567806
  misc_feature: Encodes the peptide sequence at SEQ ID NO 22962
atgagtgcccaaggtcaatcagatattgatgattcagccgaacgcgtcttacgtcaattgaaaccagccgacgttgaggaaataaccgaacttctgttcaaggctttcttgagtcatgaaaggtatttggcaccgaggggacgaaatttcattagtgctgagccagagctgaagaatgagtgggataacctggaaagaaaataccaacaagaatttgtggaagcttacctccagaaggactcgaaactgtttgctctggtgtcattgtataaggatgatgccaataaaatcattggtttcatcgctgcgaagagatgctcaagagctaaggatgacgaattgaagaaagtaatccaagaaaataaacacaacagagctgagtggatagagattgataaagcagatccagaagcgcaggagcggaaagacgagattttcaatcatgacgaaaacagcatagagcgcgccgatgctctggagtattacgtgcaggaccatcgtctgatctgcgacgataaggttgttgagacagaaatgatactcgagcattataaaaatgccaactggtggcagattgaaaagctggccgtgtcggaagaaaaccgagggaaacatttcggcacatacctcgtcgactctattaaacagcgggcgcgggaagaacatctacccatctatgttcgatctgattctaaagctgttggattctataaacgtctcgatttcaaacgcttccatgacccgtatctcaatgaggagacacacggtgtttacatgtattgggaacatgaagcgacctcctaa

SEQ ID NO: 22962 - protein, 267 aa, Muscodor strobelii
  misc_feature: SGI Peptide ID NO. 567806
  misc_feature (89)..(243): Pfam Id: PF00583 Pfam Desc: Acetyltransferase (GNAT) family
  misc_feature (189)..(243): Pfam Id: PF00583 Pfam Desc: Acetyltransferase (GNAT) family
MSAQGQSDIDDSAERVLRQLKPADVEEITELLFKAFLSHERYLAPRGRNFISAEPELKNEWDNLERKYQQEFVEAYLQKDSKLFALVSLYKDDANKIIGFIAAKRCSRAKDDELKKVIQENKHNRAEWIEIDKADPEAQERKDEIFNHDENSIERADALEYYVQDHRLICDDKVVETEMILEHYKNANWWQIEKLAVSEENRGKHFGTYLVDSIKQRAREEHLPIYVRSDSKAVGFYKRLDFKRFHDPYLNEETHGVYMYWEHEATS

SEQ ID NO: 22963 - DNA, 1002 bp, Muscodor strobelii
  misc_feature: SGI cDNA ID NO. 567807
  misc_feature: Encodes the peptide sequence at SEQ ID NO 22964
atgaacaacttcaatcattccgagaattgtgaggaggtagagaattttaatcagtttttggcggacctcaaacatcatgggctgcttacaaacgacgggcaggctaccaagcagaccagattagcattgccaacgctcatcaaacctccacccatcacgccttcgccatcagtcacacaaggatttgctcccgaactcactcttgagtccttctggaaaggtaaacagcgtgtcgaaagtcgtgtggaacatcacgttgacataatggaacgggccttttgggactacgagaaaaagaacctaagcgttgccgcgcaggaattgagagaagacaagaaagatgaattaggaaaagtactcaaagccttacaaagagatcgatatcgggaatatctaactacctattttgtggacccaaagtatgaatatcgctgtatatcatctgatgatggcacagtctacggctttagtttttcgagtattgaaactaggggggtgtacgaggcaaagagacctttaataccagcctatgaggaaggacgacgaaagggtttcgaactaaatcagcgtccggtgacgagagagaaggttttagagaaaaaaggcacaaagaatgagtggaacttcaagcagctctttttctacaattgggaaaacaaaaatgaccggctaatcgacgagatgaaatccagaatggacctaacacaagacgaagaatttagagttctcaacctactagcagtagacactgtccatcaaggggctgggaacggtcaaatgcttcttgatggcaacaaaatcatggcagagagagataggctacccctatatgtctcctcagctagggaggcgattgatttctacaagaaacagcgtttcatacgccttgacgatgagaagattaaagggagacccaagaatcccgaaggctatctagtatggcacccccctaacccggatgccaaatcgtcttctaccgcgcaagaatccgaagtcgactag

SEQ ID NO: 22964 - protein, 333 aa, Muscodor strobelii
  misc_feature: SGI Peptide ID NO. 567807
MNNFNHSENCEEVENFNQFLADLKHHGLLTNDGQATKQTRLALPTLIKPPPITPSPSVTQGFAPELTLESFWKGKQRVESRVEHHVDIMERAFWDYEKKNLSVAAQELREDKKDELGKVLKALQRDRYREYLTTYFVDPKYEYRCISSDDGTVYGFSFSSIETRGVYEAKRPLIPAYEEGRRKGFELNQRPVTREKVLEKKGTKNEWNFKQLFFYNWENKNDRLIDEMKSRMDLTQDEEFRVLNLLAVDTVHQGAGNGQMLLDGNKIMAERDRLPLYVSSAREAIDFYKKQRFIRLDDEKIKGRPKNPEGYLVWHPPNPDAKSSSTAQESEVD

SEQ ID NO: 22965 - DNA, 4041 bp, Muscodor strobelii
  misc_feature: SGI cDNA ID NO. 567808
  misc_feature: Encodes the peptide sequence at SEQ ID NO 22966
atgacgaacctagacgaacaaagcagtacggccattacttctcttccaacgcctacggcaacaccatatagaacgccttcccagacatcgagaaggtcacgccgatccgccacaccaccagcgcttgcttcatcatcaccaccatctttacctacggacacagtcgagagaaaagggcgtagaacatccaacgaactcaacgttgatgcgaatattagtattctagatcctcggcgattcactcctacgctgcatgccaatctggtgtcagagatactgaccttgcgccgggatcaagaagaaaagctgaagataatcgaaaatctcgaatcatcactacacgagtcccataaagagcgagagactttgcaggcgaatttgaccgacacggcaaaagatgctcgctcgttcaaacgacagttgtctctgctggagggaggaagttcgtcagcattaaatgagctgtcccgagagcgcgatgaagctactgatatagctacggaaaccaaaaaacggctagaggcggcccagaagaagattcgaagccaagacgaagattcacagcgagtacatgatttatgggcgaaagaaaaggatgattgggaagaggaacggaggagatttgagcgtaaactccatgttgctgatacccgactgaagaccgtgctcgaggagatcgcgaatctgcagaccgctcaaacgaacggcctccaaaatggcgtgggacatgaaaccgaagaaatgggcagggaaaacgacgaggccagcgttcgcacacaaagtctcaccaatagcatccgattttctacgttcagtggaccagggattggtaagattggcggtgtcagtcttgccgatgagctcaactttgatgatgacgacgactatcaaactgatatcgatcgccgacaaagtatcatttcgaattttgggcacactcgtaatatgagccgcgacagtatcgggtcgaggacacacagacggaaccagagcattgagagccatgcacgtccaggaagtgtggctcgtggtaggttgcagatgaattcgacagtattgaataggctggaaggtgacatacaggaagacgatgatgaaatgaggataaatcccgtctacgcggatgctgctgtccagtattcgccgccagcctcgcccgaacccttgaaattcgaacatggcacaccagagccatcaccgaagctcgaaaaatcgtttgagttcgaaagtccatcgcggggcgagggtgaaatagaagccaaccagcggcgaaaacgggtccagcttcatcgtctgacgccattagaaactcctagggttacgattcaacccatggtgtcttctgcgtctcagacagctgagcctctgagccccccaagaacaccactttcgcctactcctgaacctactcctcatccagagatggtatctgctgctactcaaacgcaagagatacctgttgcaaaggagccagtgcctctcgtgataccaagtatcagtattgtgccgcctacaagtcgaccacccactcctcgcgagcatcgactaccacaatattcaaaggactttggctgccaggttactctgttacagtcaacaaccgttgcaacacagtcgatcgcggtccagacagatgagattcgtattgacaaaagactggacaaactgccaccgcatctacacccatccgctattagctcgcggccttcatcgcctgttgcaaatgtggacgaagacagcaagagtttcaccccaattccaggacacttgccacctcgaaatcctcgccgattagcaggtaaaagcaatatacctaatggtctgccctcgtctccagtatccgcaacctacgatactgagactcgcgatgcatatcccggcaataatgacgatgggcctctttcaaacgatgaggcaccagccaggcgaccccatcgtatcagtagcttgttcgccggttttgacgtagcaagctcagatgaagccgatgaattcagggaagacgacatgacggactctgaataccgaacagctctctctgctcctactagaccaacacaagggacgaaccgaaatagcaagcgcaccagcaatagtacggtgtccacgacgcctgagcaaacacgagcaacgcagagagattcgaagagcaccatgagaccgattggaggcccagaagtatacagtagcttcagcttggttgatgcacgggacgcctcatcacggatgtctacctcaaggcctccttccgtcagtcggaatttgaattcacgcggcgtgatgcgaaaggccgccatgattcaaagtggcatatctactcaccaaaaccgtccacgaagtcccagcttgcctgatattcgcgaacccccattcccaatacctaccagggctagttcacggcaaccggctttcacggctagtgcacccagtgacggttcgcgtagcccgacgatgcgatatggaggcggttggcatcgacgtggaatgaagaataatgtatacagaaataacagcctacgaaaaagccggtcggcggctgcgctaccacgtaacggtcgtagacgaagacaaggtagtcggtcgccgccccccgtgtcgccttcagaagaaggccctggaagtcctcaattaccaccactaccatacaacgatataaccacaccccggagccgagatttcagctcagtccggtacagggggcataagtcccaaccttcgactaatactgctaacaccgagaacactgctgcagtatcggtgggcagctctcagcaggcttctggtgtagtagatgccatcgctcagacgatggtaggcgaatggatgttcaaatatgttcgaaggcgcaagtcattcggggtagctgacagcggcggtcggggcgaggagaatagcaacgatcgccataaacgatgggtatggctggccccgtatgaacgagcaatcctatggagcagtaaacagccagcgtcaggcagtgctctaatgggcaagtcgggccggaaacttacaattcagtcagtccttgacgtcaaggatgacaacccattgccgaaaggggccaccgaagttttcaatcgttctattctcatcctcacgcctcaaagggctttgaagttcacagctgtttcggccgagcgtcactatctatggctcatgtcactgtcgttcctcgcacactcgcagcaggctgtcccagaagttctcaccccatctctagcaacgccaaaacccgcgccggcgcctgatccggagttggcgaaaggaaagatcaagcgaggcggaattcgcgattctattcgcctcacgaaagggaagaatccggctcttatgaagcgtcatgaccaatccttccagcctcctctgcctgaggaacctgtgccggctttccctctccaattcagtccggatgcacttgcttcaatcccgaatcaccaacgcgagatctcccaagatgccgcccagccaccagctatcgcgcgattccacgaccgtggcaacgatcgtgtgcaggatcgcgctaaccaagtcgttctgcacggtcgcaaacgaagcaatactggcggccatgtaccgccacctttgtctttccgcggattttcgggaccgggtagttcgacgcatgcttcaagcaatagcactgcaggagcatcgatcggcacagcaggctcgtccgacatctacggccaatctcaagcatcgagtaaccccacatggggtatgagcacagctggttcagtacgcacatcggaggcttcctcgcgtccacctggcaacttctttgaggccatcggaacggtacgaatggaggcatttattagcccgttgacattccccaagttcgatgaccaccctgatgagaacgaagaatggcattatcgagcccgtcgccagagcaaagagcggcggcggcgccgcagccgcagtcggcaccgagacagttacacatcacgtggcacgcgaggaacagactcgttttatgccggaagccgaggggggtatgctgattcctttcgcgaagacccctttcgaggcttttaa

SEQ ID NO: 22966 - protein, 1346 aa, Muscodor strobelii
  misc_feature: SGI Peptide ID NO. 567808
  misc_feature (6)..(1346): NCBI GI: 116179954 Blast Desc: CHGG_00605 [Chaetomium globosum CBS 148.51] gi|88184902|gb|EAQ92370.1| CHGG_00605 [Chaetomium globosum CBS 148.51]
  misc_feature (8)..(1346): NCBI GI: 46137191 Blast Desc: FG10111.1 [Gibberella zeae PH-1]
  misc_feature (2)..(1346): NCBI GI: 256731790 Blast Desc: NECHADRAFT_93686 [Nectria haematococca mpVI 77-13-4]
  misc_feature (9)..(1346): NCBI GI: 145612645 Blast Desc: MGG_07274 [Magnaporthe grisea 70-15] gi|145019778|gb|EDK04006.1| MGG_07274 [Magnaporthe grisea 70-15]
  misc_feature (5)..(1346): NCBI GI: 171691839 Blast Desc: protein product [Podospora anserina] gi|170945868|emb|CAP72669.1| protein product [Podospora anserina]
  misc_feature (53)..(1346): NCBI GI: 164426767 Blast Desc: NCU03621 [Neurospora crassa OR74A] gi|157071469|gb|EAA32112.2| [Neurospora crassa OR74A]
  misc_feature (53)..(1346): NCBI GI: 12718398 Blast Desc: related to nuclear migration protein ami1 [Neurospora crassa]
  misc_feature (5)..(1346): NCBI GI: 154315724 Blast Desc: BC1G_04434 [Botryotinia fuckeliana B05.10] gi|150846830|gb|EDN22023.1| BC1G_04434 [Botryotinia fuckeliana B05.10]
  misc_feature (72)..(1346): NCBI GI: 156059680 Blast Desc: SS1G_03852 [Sclerotinia sclerotiorum 1980] gi|154701639|gb|EDO01378.1| SS1G_03852 [Sclerotinia sclerotiorum 1980]
  misc_feature (14)..(1273): NCBI GI: 226293788 Blast Desc: conserved [Paracoccidioides brasiliensis Pb18]
MTNLDEQSSTAITSLPTPTATPYRTPSQTSRRSRRSATPPALASSSPPSLPTDTVERKGRRTSNELNVDANISILDPRRFTPTLHANLVSEILTLRRDQEEKLKIIENLESSLHESHKERETLQANLTDTAKDARSFKRQLSLLEGGSSSALNELSRERDEATDIATETKKRLEAAQKKIRSQDEDSQRVHDLWAKEKDDWEEERRRFERKLHVADTRLKTVLEEIANLQTAQTNGLQNGVGHETEEMGRENDEASVRTQSLTNSIRFSTFSGPGIGKIGGVSLADELNFDDDDDYQTDIDRRQSIISNFGHTRNMSRDSIGSRTHRRNQSIESHARPGSVARGRLQMNSTVLNRLEGDIQEDDDEMRINPVYADAAVQYSPPASPEPLKFEHGTPEPSPKLEKSFEFESPSRGEGEIEANQRRKRVQLHRLTPLETPRVTIQPMVSSASQTAEPLSPPRTPLSPTPEPTPHPEMVSAATQTQEIPVAKEPVPLVIPSISIVPPTSRPPTPREHRLPQYSKDFGCQVTLLQSTTVATQSIAVQTDEIRIDKRLDKLPPHLHPSAISSRPSSPVANVDEDSKSFTPIPGHLPPRNPRRLAGKSNIPNGLPSSPVSATYDTETRDAYPGNNDDGPLSNDEAPARRPHRISSLFAGFDVASSDEADEFREDDMTDSEYRTALSAPTRPTQGTNRNSKRTSNSTVSTTPEQTRATQRDSKSTMRPIGGPEVYSSFSLVDARDASSRMSTSRPPSVSRNLNSRGVMRKAAMIQSGISTHQNRPRSPSLPDIREPPFPIPTRASSRQPAFTASAPSDGSRSPTMRYGGGWHRRGMKNNVYRNNSLRKSRSAAALPRNGRRRRQGSRSPPPVSPSEEGPGSPQLPPLPYNDITTPRSRDFSSVRYRGHKSQPSTNTANTENTAAVSVGSSQQASGVVDAIAQTMVGEWMFKYVRRRKSFGVADSGGRGEENSNDRHKRWVWLAPYERAILWSSKQPASGSALMGKSGRKLTIQSVLDVKDDNPLPKGATEVFNRSILILTPQRALKFTAVSAERHYLWLMSLSFLAHSQQAVPEVLTPSLATPKPAPAPDPELAKGKIKRGGIRDSIRLTKGKNPALMKRHDQSFQPPLPEEPVPAFPLQFSPDALASIPNHQREISQDAAQPPAIARFHDRGNDRVQDRANQVVLHGRKRSNTGGHVPPPLSFRGFSGPGSSTHASSNSTAGASIGTAGSSDIYGQSQASSNPTWGMSTAGSVRTSEASSRPPGNFFEAIGTVRMEAFISPLTFPKFDDHPDENEEWHYRARRQSKERRRRRSRSRHRDSYTSRGTRGTDSFYAGSRGGYADSFREDPFRGF

SEQ ID NO: 22967 - DNA, 6267 bp, Muscodor strobelii
  misc_feature: SGI EST ID NO. CUFF.54084.1
  misc_feature: Variant of the nucleotide sequence at SEQ ID NO 22965
tttctgctgtgatatcgctgcaagtgctgagttttccgtctggtgattggactatttggaccccgctaggttggcaattgggactgttgtggcttttgcagtcatgatctactgtttcacgcagcaacggtcaaattactagacaatcgtactcataacacaattatggcggcaacagtagagtggaaagattttgatgatctttgacttctcggctgtgtcttaggaaagatgatgaagaatctgcggcattgagaataacgtgttaggtaagtattgtagctgtcaaattccattcgcgtttaggggtcgttgtcggacgcgtccaatccgagacctatcaatgccatccaatgttacctccctcaaggtatgaagctccctttcatggggacctggttgttgccgctctcccatggcctgggctggtgtacaataggattagatacagtccgtcgttccttgtaattgtgcacttacctaacaatccatcgcatccttgtgccgtgggctagctttccaccctgtcgcttgtccactctgtggtgggtatctcatcggctagcgtatgtaggcactcgtcatgtcatttagatatttctctgtcttgccatgtgtttttggtttcctctatcttccctgttgtttgaagccgtcgtcctcggagtttgtggtcagacgcagcgcaacgacgttgaaggcgcacgacgattcgagatcttgtcaatacttagctgctcatcccggcgaattcgtcgaaaccccggccgatatcgtataacagcttccaattggacccaattcattgcgttcgccctgcattatacaggagtaattacccataggcctgctggacagatattgagcaattgaaagcttgcaactaagcgatgctcaactcttgcaatctctatcggcagtagaacgccggtgtctcacatcgacggaccagtcgaccgagccgaattgaagcaaagggtttcgcctattcatacgcagcggtaaagaccccggctttgcaacagccattgacacggccttagtagaatattttatagcacaggctacctataattgcctatattcggaccgtgctagtctagggattgcagaccgatatgattgagctatcaaatcccattatcttcctcgaagcttcctagctgcgaaacaccacaacacgacatcgctgtcctacccaattgtcgatcagttttcgaaaccacgagatatagaagggcagccgaagcgttctataacctataatcgtagaacttactcttccacctggagcttactcgatcatttttaaaatatcaaataccatgcgagtgtcatgcttgcggcgagcttaaaaaaatcaaattcctacacttgtggcactagagcttggagtgctgtgggagctggctggaattcagtgtcgacccttggtcgattctagaatatacgtgcttcttgttgatgtcactgtctgatgacttcattataaaagctagcaaacacacgtgttgcgggcgctagttcattggtggcactcttgttttgacatctgactcgcgtgacggatcatagcctgaccgctccattagtcaagatgacgaacctagacgaacaaagcagtacggccattacttctcttccaacgcctacggcaacaccatatagaacgccttcccagacatcgagaaggtcacgccgatccgccacaccaccagcgcttgcttcatcatcaccaccatctttacctacggacacagtcgagagaaaagggcgtagaacatccaacgaactcaacgttgatgcgaatattagtattctagatcctcggcgattcactcctacgctgcatgccaatctggtgtcagagatactgaccttgcgccgggatcaagaagaaaagctgaagataatcgaaaatctcgaatcatcactacacgagtcccataaagagcgagagactttgcaggcgaatttgaccgacacggcaaaagatgctcgctcgttcaaacgacagttgtctctgctggagggaggaagttcgtcagcattaaatgagctgtcccgagagcgcgatgaagctactgatatagctacggaaaccaaaaaacggctagaggcggcccagaagaagattcgaagccaagacgaagattcacagcgagtacatgatttatgggcgaaagaaaaggatgattgggaagaggaacggaggagatttgagcgtaaactccatgttgctgatacccgactgaagaccgtgctcgaggagatcgcgaatctgcagaccgctcaaacgaacggcctccaaaatggcgtgggacatgaaaccgaagaaatgggcagggaaaacgacgaggccagcgttcgcacacaaagtctcaccaatagcatccgattttctacgttcagtggaccagggattggtaagattggcggtgtcagtcttgccgatgagctcaactttgatgatgacgacgactatcaaactgatatcgatcgccgacaaagtatcatttcgaattttgggcacactcgtaatatgagccgcgacagtatcgggtcgaggacacacagacggaaccagagcattgagagccatgcacgtccaggaagtgtggctcgtggtaggttgcagatgaattcgacagtattgaataggctggaaggtgacatacaggaagacgatgatgaaatgaggataaatcccgtctacgcggatgctgctgtccagtattcgccgccagcctcgcccgaacccttgaaattcgaacatggcacaccagagccatcaccgaagctcgaaaaatcgtttgagttcgaaagtccatcgcggggcgagggtgaaatagaagccaaccagcggcgaaaacgggtccagcttcatcgtctgacgccattagaaactcctagggttacgattcaacccatggtgtcttctgcgtctcagacagctgagcctctgagccccccaagaacaccactttcgcctactcctgaacctactcctcatccagagatggtatctgctgctactcaaacgcaagagatacctgttgcaaaggagccagtgcctctcgtgataccaagtatcagtattgtgccgcctacaagtcgaccacccactcctcgcgagcatcgactaccacaatattcaaaggactttggctgccaggttactctgttacagtcaacaaccgttgcaacacagtcgatcgcggtccagacagatgagattcgtattgacaaaagactggacaaactgccaccgcatctacacccatccgctattagctcgcggccttcatcgcctgttgcaaatgtggacgaagacagcaagagtttcaccccaattccaggacacttgccacctcgaaatcctcgccgattagcaggtaaaagcaatatacctaatggtctgccctcgtctccagtatccgcaacctacgatactgagactcgcgatgcatatcccggcaataatgacgatgggcctctttcaaacgatgaggcaccagccaggcgaccccatcgtatcagtagcttgttcgccggttttgacgtagcaagctcagatgaagccgatgaattcagggaagacgacatgacggactctgaataccgaacagctctctctgctcctactagaccaacacaagggacgaaccgaaatagcaagcgcaccagcaatagtacggtgtccacgacgcctgagcaaacacgagcaacgcagagagattcgaagagcaccatgagaccgattggaggcccagaagtatacagtagcttcagcttggttgatgcacgggacgcctcatcacggatgtctacctcaaggcctccttccgtcagtcggaatttgaattcacgcggcgtgatgcgaaaggccgccatgattcaaagtggcatatctactcaccaaaaccgtccacgaagtcccagcttgcctgatattcgcgaacccccattcccaatacctaccagggctagttcacggcaaccggctttcacggctagtgcacccagtgacggttcgcgtagcccgacgatgcgatatggaggcggttggcatcgacgtggaatgaagaataatgtatacagaaataacagcctacgaaaaagccggtcggcggctgcgctaccacgtaacggtcgtagacgaagacaaggtagtcggtcgccgccccccgtgtcgccttcagaagaaggccctggaagtcctcaattaccaccactaccatacaacgatataaccacaccccggagccgagatttcagctcagtccggtacagggggcataagtcccaaccttcgactaatactgctaacaccgagaacactgctgcagtatcggtgggcagctctcagcaggcttctggtgtagtagatgccatcgctcagacgatggtaggcgaatggatgttcaaatatgttcgaaggcgcaagtcattcggggtagctgacagcggcggtcggggcgaggagaatagcaacgatcgccataaacgatgggtatggctggccccgtatgaacgagcaatcctatggagcagtaaacagccagcgtcaggcagtgctctaatgggcaagtcgggccggaaacttacaattcagtcagtccttgacgtcaaggatgacaacccattgccgaaaggggccaccgaagttttcaatcgttctattctcatcctcacgcctcaaagggctttgaagttcacagctgtttcggccgagcgtcactatctatggctcatgtcactgtcgttcctcgcacactcgcagcaggctgtcccagaagttctcaccccatctctagcaacgccaaaacccgcgccggcgcctgatccggagttggcgaaaggaaagatcaagcgaggcggaattcgcgattctattcgcctcacgaaagggaagaatccggctcttatgaagcgtcatgaccaatccttccagcctcctctgcctgaggaacctgtgccggctttccctctccaattcagtccggatgcacttgcttcaatcccgaatcaccaacgcgagatctcccaagatgccgcccagccaccagctatcgcgcgattccacgaccgtggcaacgatcgtgtgcaggatcgcgctaaccaagtcgttctgcacggtcgcaaacgaagcaatactggcggccatgtaccgccacctttgtctttccgcggattttcgggaccgggtagttcgacgcatgcttcaagcaatagcactgcaggagcatcgatcggcacagcaggctcgtccgacatctacggccaatctcaagcatcgagtaaccccacatggggtatgagcacagctggttcagtacgcacatcggaggcttcctcgcgtccacctggcaacttctttgaggccatcggaacggtacgaatggaggcatttattagcccgttgacattccccaagttcgatgaccaccctgatgagaacgaagaatggcattatcgagcccgtcgccagagcaaagagcggcggcggcgccgcagccgcagtcggcaccgagacagttacacatcacgtggcacgcgaggaacagactcgttttatgccggaagccgaggggggtatgctgattcctttcgcgaagacccctttcgaggcttttaaggcggatcattttacctaccaactcgaacggtagccattatgtcctttcgacctcatagcagagagctatatcttcatccatcacaaggatactgcccaaccttgcccgatgttcgtaacataccaaaaagtgctcgcattacaacacctgtatcaccaccatcgctccgtttttgcattacactacaacagaggtatcactaccaaccgatatttgttccgtatacccacagagctcagttccgcatagataccatatcattacggcctatcgatacccctttgatacattcattttggttttcatctcagagatgtcggatgaggaaccgcaagtatgttttgttgctttaggcgccggaaaggtgggggatattggggaggcaactactgagactcaacaccatcgattatgtatattactaaaagctcggatctattgccaaatcaaatgaagagaatcggtcgcaggaccactgcatatctctgattttcaagacaccatatcgcaagatgcctcgcttgtaacaactatattgcttcacttgttcgacatgacccatgtattgattcaaatgctaagtgttaaatactagaacctcggcgaagggagctagctgtgataatat

SEQ ID NO: 22968 - DNA, 486 bp, Muscodor strobelii
  misc_feature: SGI cDNA ID NO. 567809
  misc_feature: Encodes the peptide sequence at SEQ ID NO 22969
atgttcgccaaaacttccgttattgtcgccatggtcgctgccgttgcgtcagcctctccagctgagatcaatgctcgagaagtgtactacacatatccgattaatgactcgatccaaatctgccacggcggctgtattgcgcaatttggtctcagcgcgcccgccggttatgtgagcggtgcgttggcaataccaaatgttcaatgcaacattttgttggagaacgggcgaatcacgcgatgtgaaggcggctctgactcaagctacgttgaaggcagctggtacagcaccggcgaggttggcaccaccacagaggcctatcacctgcacctcaaacacacatataaacagggctctactgtctcgacggccgaaggcactcacacattcgcgaagggtagtatctggaccccttgggacagcacttcgaacgcggcgttcggggtcccggtcacgaagttgacgacttctgctaatggcaaataa

SEQ ID NO: 22969 - protein, 161 aa, Muscodor strobelii
  misc_feature: SGI Peptide ID NO. 567809
MFAKTSVIVAMVAAVASASPAEINAREVYYTYPINDSIQICHGGCIAQFGLSAPAGYVSGALAIPNVQCNILLENGRITRCEGGSDSSYVEGSWYSTGEVGTTTEAYHLHLKHTYKQGSTVSTAEGTHTFAKGSIWTPWDSTSNAAFGVPVTKLTTSANGK

SEQ ID NO: 22970 - DNA, 2172 bp, Muscodor strobelii
  misc_feature: SGI cDNA ID NO. 567810
  misc_feature: Encodes the peptide sequence at SEQ ID NO 22971
atgcgtctcatcaatgccaagaacatcgaaaagttcgagtcaacggaatgggatgagaagaaataccccatatttaaagagttcagcaacgacggcgagaatcgtaatgcctacgccatcctgtctcatacctggataaggagtgaaggagaggatgaagaagtcacttaccaggacatgctatcgggttttcagaaagcaatgtctaagccagggtactttaagatccgtcaaacgtgtaggctggcgagaaaggcaggcatcccatatgtttggatcgacgcatgctgtatcgacaaaacaaataacgcagagctctccgaatctatcaattcgatgttcaattggtatcgggatgcacagatatgttatgcgtttctttcggatgtcttggcgaaagatacatttcctcgctgccgatggtttcagaggggatggacattacaagaattggttgcgccgaggttaatcgatttctatgttcccagcggcaatgacggcgatggcgagtggaccaaatatggaaccagaactagtctcgcctctgagatttctgagattactgggattgcgatcgaggcaattggaatgcatccacgacagttgcttgaggacaaagcatactgtctccttggtatttttggagttaatatgcccctactctatggtgaagggcagaaatctttctatcggctacaagaggaaatcgtcaagcagaataacgacatgaccattctggcctgggactcattaagcacacatgagtccaacgaatccatgcgaccgctaaatgattacagcttatttgctccttcgcccgatgcattcgcacgatgcggcagatacacacgggcacataacgcctcggctcatggcatcaatgtcacaaacagaggattacgtgtcactggcactcggaggctgcgttttgcccacataccggacgatttgacgcggcgactcagtagtggcctgcaagtgtctgacgaacagcttgaatttgtgccgcaagcgaaccatataccagcagacagaagtgggcaagtgagatatgttctcctagttgctaagagagccggaaacagtactggcgaagaggcaactataggtgtctgtcttcaaaaacttaccccccgattgttcatgagagacatgatgctgcccttaactacagcgttctctcatatgcaagatatttgtgtttcaaatgacgactacttcattgcgtcaagccgatcaaatttagaagacggtctcagagacggagattccaggagcacagatttctcagctgtgaagatcaaggatgcgtggcctgcgacatggtgggatctctgcaaccagcgcttatttcgccccgagtatgcgtcccagattgtcagtctttcgatcgaagtcgaaattgacagccatcgagtgccattggagttacttgtcttcaccccgaatctatacacgtcgacgccaacttatcgccttttgcaccccgcgagtagtccgttcgtggctaatgctctacgaaagatgaaactcagtcacagccaagtggtgaggtactgggaagaattggtgctcgacgcgcctcaagctacccaccttaccaattccataacgctacaattgggccagaattggtatcatatctcggttaaggagcaccgggaccaatggagaggcacgtatacctcaatcgagcagagcaaagtatcgcactccaatatcacgacgcccatgtatgccaaaacaacagagtttcaaccgccgccaacttacgagcagtcttcagcttcagctgcacctccagcaccgatgactgcgccaaacccgtttgcatcgaatccatatgcaccaatggcagctaatctgaactaccaaaatccatcaccacaaggccaaagcgtgccacagcaaagcacagcagctttcgcttatagaccagctacagcgcaaccatatgcgaatcccaatccatatcaaccgaacgtcgtgccgccgtcgcacactcaggccgacatgcgctctatcaatagcggcgcaagtggctcctctcaaatacatggtttacgagactgttcaagcgtacaaaatatggctcctcatatcacgacgaactacaattgttaccagatgcctcctccgccagcaacgatgccttcatcagggccagtttag

SEQ ID NO: 22971 - protein, 723 aa, Muscodor strobelii
  misc_feature: SGI Peptide ID NO. 567810
  misc_feature (38)..(150): Pfam Id: PF06985 Pfam Desc: Heterokaryon incompatibility protein (HET)
  misc_feature (38)..(128): Pfam Id: PF06985 Pfam Desc: Heterokaryon incompatibility protein (HET)
  misc_feature (133)..(150): Pfam Id: PF06985 Pfam Desc: Heterokaryon incompatibility protein (HET)
  misc_feature (38)..(302): NCBI GI: 46126619 Blast Desc: FG07687.1 [Gibberella zeae PH-1]
  misc_feature (1)..(303): NCBI GI: 171677580 Blast Desc: protein product [Podospora anserina] gi|170936858|emb|CAP61516.1| protein product [Podospora anserina]
  misc_feature (1)..(331): NCBI GI: 256734168 Blast Desc: NECHADRAFT_78015 [Nectria haematococca mpVI 77-13-4]
  misc_feature (38)..(359): NCBI GI: 256720984 Blast Desc: NECHADRAFT_82249 [Nectria haematococca mpVI 77-13-4]
  misc_feature (25)..(305): NCBI GI: 171677823 Blast Desc: protein product [Podospora anserina] gi|170936980|emb|CAP61638.1| protein product [Podospora anserina]
  misc_feature (1)..(302): NCBI GI: 156035539 Blast Desc: SS1G_12973 [Sclerotinia sclerotiorum 1980] gi|154698378|gb|EDN98116.1| SS1G_12973 [Sclerotinia sclerotiorum 1980]
  misc_feature (34)..(302): NCBI GI: 256722404 Blast Desc: NECHADRAFT_44368 [Nectria haematococca mpVI 77-13-4]
  misc_feature (37)..(276): NCBI GI: 238485594 Blast Desc: ankyrin repeat-containing protein, [Aspergillus flavus NRRL3357] gi|220698914|gb|EED55253.1| ankyrin repeat-containing protein, [Aspergillus flavus NRRL3357]
  misc_feature (32)..(302): NCBI GI: 121715886 Blast Desc: HET domain protein [Aspergillus clavatus NRRL 1] gi|119403709|gb|EAW14126.1| HET domain protein [Aspergillus clavatus NRRL 1]
  misc_feature (34)..(281): NCBI GI: 145605569 Blast Desc: MGG_09177 [Magnaporthe grisea 70-15] gi|145013388|gb|EDJ98029.1| MGG_09177 [Magnaporthe grisea 70-15]
MRLINAKNIEKFESTEWDEKKYPIFKEFSNDGENRNAYAILSHTWIRSEGEDEEVTYQDMLSGFQKAMSKPGYFKIRQTCRLARKAGIPYVWIDACCIDKTNNAELSESINSMFNWYRDAQICYAFLSDVLAKDTFPRCRWFQRGWTLQELVAPRLIDFYVPSGNDGDGEWTKYGTRTSLASEISEITGIAIEAIGMHPRQLLEDKAYCLLGIFGVNMPLLYGEGQKSFYRLQEEIVKQNNDMTILAWDSLSTHESNESMRPLNDYSLFAPSPDAFARCGRYTRAHNASAHGINVTNRGLRVTGTRRLRFAHIPDDLTRRLSSGLQVSDEQLEFVPQANHIPADRSGQVRYVLLVAKRAGNSTGEEATIGVCLQKLTPRLFMRDMMLPLTTAFSHMQDICVSNDDYFIASSRSNLEDGLRDGDSRSTDFSAVKIKDAWPATWWDLCNQRLFRPEYASQIVSLSIEVEIDSHRVPLELLVFTPNLYTSTPTYRLLHPASSPFVANALRKMKLSHSQVVRYWEELVLDAPQATHLTNSITLQLGQNWYHISVKEHRDQWRGTYTSIEQSKVSHSNITTPMYAKTTEFQPPPTYEQSSASAAPPAPMTAPNPFASNPYAPMAANLNYQNPSPQGQSVPQQSTAAFAYRPATAQPYANPNPYQPNVVPPSHTQADMRSINSGASGSSQIHGLRDCSSVQNMAPHITTNYNCYQMPPPPATMPSSGPV

SEQ ID NO: 22972 - DNA, 705 bp, Muscodor strobelii
  misc_feature: SGI cDNA ID NO. 567811
  misc_feature: Encodes the peptide sequence at SEQ ID NO 22973
atgacgcctcggatggtgctgtataggctggtggtgctgggtgatggtggagtgggcaaaacagctttaacaattcagttatgtctacaacacttcgttgaaacatatgatcctacaattgaagattcctaccgcaaacaggtcgtcatagacgggtcggcatgtatgcttgaagtattagacacagctggacaagaagaatatacagcattgagagaccagtggatccgcgacggtgaagggtttgttttggtctacagcatatcctcgcggtcctcattcactagaatcaagcgctttcaccaccaaattcaaagagtcaaggagtcttgccaggcgtcgccaacgtatgccggctcgccgatcgctgctgcggtccctgcaagctcagtacctatcatgctcgtcggtaacaaaagcgaccgcgtcacagagagagaggtctcaacgcaagagggtcatgctcttgccagagaactcggctgcgaattcgttgaggcttcggcaaagaactgcatcaacgtcgagaaagctttctacgacgttgttagaattttgcgccggcaacgcgaggctgcatcccggccgcaggcgccccgcgcccgtccacccaatggagataactttgggcaccgcggcgacggagatcgatacaggagacctcggcccggtggcggaaacaaaccacggtgtgtcattttataa

SEQ ID NO: 22973 - protein, 234 aa, Muscodor strobelii
  misc_feature: SGI Peptide ID NO. 567811
  misc_feature (9)..(141): Pfam Id: PF08477 Pfam Desc: Miro-like protein
  misc_feature (9)..(188): Pfam Id: PF00071 Pfam Desc: Ras family
  misc_feature (9)..(106): Pfam Id: PF08477 Pfam Desc: Miro-like protein
  misc_feature (1)..(234): NCBI GI: 46137197 Blast Desc: FG10114.1 [Gibberella zeae PH-1]
  misc_feature (1)..(234): NCBI GI: 256732182 Blast Desc: [Nectria haematococca mpVI 77-13-4]
  misc_feature (1)..(199): NCBI GI: 116179946 Blast Desc: ras-2 protein [Chaetomium globosum CBS 148.51] gi|88184898|gb|EAQ92366.1| ras-2 protein [Chaetomium globosum CBS 148.51]
  misc_feature (1)..(199): NCBI GI: 171691841 Blast Desc: protein product [Podospora anserina] gi|170945869|emb|CAP72670.1| protein product [Podospora anserina]
  misc_feature (1)..(234): NCBI GI: 39961078 Blast Desc: MGG_09499 [Magnaporthe grisea 70-15] gi|145010997|gb|EDJ95653.1| MGG_09499 [Magnaporthe grisea 70-15]
  misc_feature (4)..(234): NCBI GI: 85102512 Blast Desc: GTPase KRas [Neurospora crassa OR74A] gi|30316372|sp|Q01387.2|RAS2_NEUCR RecName: Full=Protein ras-2; Flags: Precursor gi|12718404|emb|CAC28712.1| RAS-2 PROTEIN GTPase
  misc_feature (1)..(234): NCBI GI: 189211105 Blast Desc: GTPase NRas precursor [Pyrenophora tritici-repentis Pt-1C-BFP] gi|187977976|gb|EDU44602.1| GTPase NRas precursor [Pyrenophora tritici-repentis Pt-1C-BFP]
  misc_feature (4)..(234): NCBI GI: 1113079 Blast Desc: NC-ras-2 protein [Neurospora crassa]
  misc_feature (2)..(234): NCBI GI: 154315730 Blast Desc: BC1G_04437 [Botryotinia fuckeliana B05.10] gi|150846833|gb|EDN22026.1| BC1G_04437 [Botryotinia fuckeliana B05.10]
  misc_feature (1)..(202): NCBI GI: 169600943 Blast Desc: SNOG_03326 [Phaeosphaeria nodorum SN15] gi|160705550|gb|EAT90057.2| SNOG_03326 [Phaeosphaeria nodorum SN15]
MTPRMVLYRLVVLGDGGVGKTALTIQLCLQHFVETYDPTIEDSYRKQVVIDGSACMLEVLDTAGQEEYTALRDQWIRDGEGFVLVYSISSRSSFTRIKRFHHQIQRVKESCQASPTYAGSPIAAAVPASSVPIMLVGNKSDRVTEREVSTQEGHALARELGCEFVEASAKNCINVEKAFYDVVRILRRQREAASRPQAPRARPPNGDNFGHRGDGDRYRRPRPGGGNKPRCVIL

SEQ ID NO: 22974 - DNA, 2649 bp, Muscodor strobelii
  misc_feature: SGI EST ID NO. CUFF.54045.0
  misc_feature: Variant of the nucleotide sequence at SEQ ID NO 22972
ggtaccggtcttcaaaggaagacgtcgtgtcattcgacctatctgaagcttcgtgttggccgtctgcctgcagaacacggtcgtcaataaagctacacagcctacatgcatccaagtcgttcccagttcttttgaggcacggcagaggcaatttaagtaactgcgcgaggggcacgaacgcgaaaggagaagggcaaggaaagggacgagacccccatcatccgtcagtcataaatcggccatctcgccgtaccataaccgtaccgcatcaaggtggcaccgtggaccttgtcgtgtctcgccttgccttgcctttgggatacgggggaatgaaaagtatctgtgcgatactatacagcacaagcacaggacaggcacaggcatctgccacatccatctggctgtctgggtcgcccgcttctgcccagttcgcgcaggaccacgacgaccaggcttgccaggttcttctgagttcttctgccacaggctcatagcaggacccgacccgccccagcgccagagaaaaatcattctccacaatccacaagccaataccaaaccaaagcaggccgtgaagccttgaccctcctcttctcctcattttatcatttccctctccaacaccacgccccgtctcccgagacatttcgctatacatttcgctatagcagctttgcccgaccgcatcgcccgcaatcaaaccccccttctaccccgatactctctcttcaacctcgcaacggctgtgctcttgaccgcttgcattaattatattaattccgtcgtccgctggagtctggtcgcgagctcgtggaacgcccgcctcgcatatcccgccccattaaaatacctccccgtcagaaatccaggacttcccagaaaacacatctgccgcttcgcacaatcctatttgtactccgcattgccggtgacatctttttcttcaattcaccatgacgcctcggatggtgctgtataggctggtggtgctgggtgatggtggagtgggcaaaacagctttaacaattcagttatgtctacaacacttcgttgaaacatatgatcctacaattgaagattcctaccgcaaacaggtcgtcatagacgggtcggcatgtatgcttgaagtattagacacagctggacaagaagaatatacagcattgagagaccagtggatccgcgacggtgaagggtttgttttggtctacagcatatcctcgcggtcctcattcactagaatcaagcgctttcaccaccaaattcaaagagtcaaggagtcttgccaggcgtcgccaacgtatgccggctcgccgatcgctgctgcggtccctgcaagctcagtacctatcatgctcgtcggtaacaaaagcgaccgcgtcacagagagagaggtctcaacgcaagagggtcatgctcttgccagagaactcggctgcgaattcgttgaggcttcggcaaagaactgcatcaacgtcgagaaagctttctacgacgttgttagaattttgcgccggcaacgcgaggctgcatcccggccgcaggcgccccgcgcccgtccacccaatggagataactttgggcaccgcggcgacggagatcgatacaggagacctcggcccggtggcggaaacaaaccacggtgtgtcattttataaagttgaaaatccactatagtttggcggttgcattacgagcttgcgcactaccggaacgataccacgagagcaatttatttacgtttgattcaccatgcgccgcataccaacacagccaatcgatcatcgcgacgatttgtatggccctcaattcgcattatcggtctgaggttggcaattgagagtgcgactgttttcatctcatctctgcattgcttgcttttggcatcaccagtttctccacctggcgaatggcgtacgaattgaaaacaaaaaagcggcatcctcgggcgcaagatgactgggtttcctttgatccaacaagacgcgttttctatcaagaagagacgatcgggcagccggtggtgttctggagtctggagtggctgactgccttttatgccatatcaagaacttttctcatatctcatctgaatacttcgaagcccatactctgcacaatcttccgcattgcgatgtccatattttgatttacctgtccatgattggatggctcttcaggttcaggatagggtctctagtgcttgaccacctattatcaggactatcagatcagtccagtggtctagagctctagtctatctatcagtattcgagtagcatttagagagagctagctcataattcaacacaaccgtctcgaccgtctgtcctttttttgcttgtaattttccatgccgataaagctaattgtagtcctatcccaaataggatgtgatcttcactgaccagacattttaaatcatttaaacactatccacatctttgcctgcccgtgcatgagacctccatcgtaggctctgcttcgtataagtgcctccttaaggatattggcctctcagtactgacagatcttctctgtcgaagttgtcggtttggccacaaccattgtgatacagtaacgtcaaactcgagacttttagtatgatgtagtcaatgctcttgtttgcttgacaccccgccgaaaatc

SEQ ID NO: 22975 - DNA, 1413 bp, Muscodor strobelii
  misc_feature: SGI cDNA ID NO. 567812
  misc_feature: Encodes the peptide sequence at SEQ ID NO 22976
atggatattctccggcaaggcaaagagaaaatgaaacagcaccttccaatgcggtcgacaagccctcgaaatgaagcagataatcacgaagatgcagagcgcggccaaaccatcctccaagtcctggacgactcatttggtgacctcctaaaaagagacccgtcggccttcagcaccaagtaccgcaaaatggcagcctcagcattcgccttctaccgcggcagcgcatgtcttttttatcacgatgtagcacgcgcacaagacgatggcccctttgtcaacgatcgcacgggacgcatctggatgcacggggacctgcacgcggagaacttcggcacctacatgaactctcaaggttgtctgatcttcaatgtcaatgactttgacgaagcttacgtgggaccatttatctgggacttgaagcgcttcgttgcctccatcgcactaatagcgtatagcaaagccctaagtgataatcagatcactatgttagccgaggcgtacacaaaggcgtatgcagatcgtatcaaagagatcgtgagcgctcgagagaatatgcagcagattgaccatttcacgttatccacggccaaaggaccgttgctcaagaccctgaaggacgcaagcacgaagacgcgggctgcgttactggattcgatgacggaggttagggatgcggagcggactttcaccatcggccatggggcggagagactcgatgatgacatgaggaagaaagtcgttgatgcttttgagaagtacctgcagaccctcccgaaatcacaacatcgccgtccaggttcgacacgcgtcaaagatgtcgttggccggcgtggcgtaggtatcggctcagcaggtttaccatcgtataacgtgctcttggaaggaaacacgcaggctctagaaaacgatctcgtggtgtatatgaagcagtcgcagcctgcggctgtttcgcggtatgcaagacagcaggcggcgcatgatacattcaaacatgaaggacatcgaactgtggtttcggaacgagcgctacagtcgcatgcggatacttgggctggttggacagagttggaaggcaagggaatgctagtctcggagatctcgccatacgctgtcgatctcgactggtccgacatcaacgagctagaagaaatggaatccgttgtggcggacttgggtcgggccaccgcagtgatgcatgctgcgggggatgatgatagagaacactcaaacgtcgtccctttctccccggaagaggcgatctccacggcagtttgggagaataaagatgggtttgtgaaggtattggctgatttctgtctagaatatagtcggcaggtccgtcgtgatcaccagatctttgttgatttgttccgtaatgggaagatacctggactttcggagaatagctaa

SEQ ID NO: 22976 - protein, 470 aa, Muscodor strobelii
  misc_feature: SGI Peptide ID NO. 567812
  misc_feature (33)..(470): NCBI GI: 255955363 Blast Desc: Pc21g14180 [Penicillium chrysogenum Wisconsin 54-1255] gi|211590145|emb|CAP96315.1| Pc21g14180 [Penicillium chrysogenum Wisconsin 54-1255]
  misc_feature (33)..(466): NCBI GI: 67524261 Blast Desc: AN2588.2 [Aspergillus nidulans FGSC A4] gi|40745537|gb|EAA64693.1| AN2588.2 [Aspergillus nidulans FGSC A4] gi|259488025|tpe|CBF87155.1| TPA: conserved [Aspergillus FGSC
  misc_feature (33)..(466): NCBI GI: 256675996 Blast Desc: SSPB78_06623 [Streptomyces sp. SPB78]
  misc_feature (33)..(466): NCBI GI: 256780122 Blast Desc: ShygA5_35117 [Streptomyces hygroscopicus ATCC 53653]
  misc_feature (32)..(466): NCBI GI: 182439232 Blast Desc: SGR_5439 [Streptomyces griseus subsp. griseus NBRC 13350] gi|282871279|ref|ZP_06280275.1| conserved [Streptomyces sp. ACT-1] gi|178467748|dbj|BAG22268.1| conserved [Streptomyces
  misc_feature (30)..(466): NCBI GI: 260650704 Blast Desc: conserved [Streptomyces scabiei 87.22]
  misc_feature (30)..(466): NCBI GI: 261188137 Blast Desc: conserved [Ajellomyces dermatitidis SLH14081] gi|239593360|gb|EEQ75941.1| conserved [Ajellomyces dermatitidis SLH14081] gi|239609102|gb|EEQ86089.1| conserved [Ajellomyces
  misc_feature (32)..(466): NCBI GI: 239940548 Blast Desc: SrosN15_06093 [Streptomyces roseosporus NRRL 15998] gi|239987033|ref|ZP_04707697.1| SrosN1_06977 [Streptomyces roseosporus NRRL 11379]
  misc_feature (33)..(466): NCBI GI: 260458208 Blast Desc: conserved [Streptomyces flavogriseus ATCC 33331] gi|260085791|gb|EEW69825.1| conserved [Streptomyces flavogriseus ATCC 33331]
  misc_feature (33)..(466): NCBI GI: 254378958 Blast Desc: conserved [Streptomyces sp. SPB74] gi|197698736|gb|EDY45669.1| conserved [Streptomyces sp. SPB74]
MDILRQGKEKMKQHLPMRSTSPRNEADNHEDAERGQTILQVLDDSFGDLLKRDPSAFSTKYRKMAASAFAFYRGSACLFYHDVARAQDDGPFVNDRTGRIWMHGDLHAENFGTYMNSQGCLIFNVNDFDEAYVGPFIWDLKRFVASIALIAYSKALSDNQITMLAEAYTKAYADRIKEIVSARENMQQIDHFTLSTAKGPLLKTLKDASTKTRAALLDSMTEVRDAERTFTIGHGAERLDDDMRKKVVDAFEKYLQTLPKSQHRRPGSTRVKDVVGRRGVGIGSAGLPSYNVLLEGNTQALENDLVVYMKQSQPAAVSRYARQQAAHDTFKHEGHRTVVSERALQSHADTWAGWTELEGKGMLVSEISPYAVDLDWSDINELEEMESVVADLGRATAVMHAAGDDDREHSNVVPFSPEEAISTAVWENKDGFVKVLADFCLEYSRQVRRDHQIFVDLFRNGKIPGLSENS

SEQ ID NO: 22977 - DNA, 813 bp, Muscodor strobelii
  misc_feature: SGI cDNA ID NO. 567813
  misc_feature: Elevated expression when VOC is produced
  misc_feature: Encodes the peptide sequence at SEQ ID NO 22978
atgtcagaagctgccgaggctctcaagcacgtgaaggcgctcacgtttgatgtgttcggaactgtcgtggactggagatcaacggtacacaacgagctcatcaagttcgggaaagacaaaatcaattcacctgtgttcggtacactgtccgagacactccaggctcgtcttcgggagatcacggataaggactggggtgaattcgctcaggcatggcgaaattcttacatcgattttgttcgaacttttgttcccggacagacgaaatggaaagatatcgacacgcatcattacgacagccttgtcgtattgatgaacgagtggggtatctcgggtgtttacaccgaacaagagttgcgctcgttgagtctcatttggcacttcctcacaccttggcccgactctgcactcgggatccagagactcggaactagatacgtcacttgtactctcagtaatggcaatcgttccctgctggacgacctcaatacccatggaaatcttggctttcgacgtatcatctcgactgcagattacggcgcttacaagccacatccaagcacatatcttggagctgctgattctctcggctgccagcccaatgaagtcgcaatggtagctgcgcatctatccgatctcaatgcagctagacagaatggcctacgtacgatctatgtggagcggcaaggtgagggagggttttcgcctaacagccaaagttacaaagacgcacgggactgggttgatttgtggatttctgaaaacgaagagggattcgtcgaggtagcgcggaaactgggtatatctacatga

SEQ ID NO: 22978 - protein, 270 aa, Muscodor strobelii
  misc_feature: SGI Peptide ID NO. 567813
  misc_feature (11)..(229): Pfam Id: PF00702 Pfam Desc: haloacid dehalogenase-like hydrolase
  misc_feature (2)..(268): NCBI GI: 261351772 Blast Desc: haloacid dehalogenase [Verticillium albo-atrum VaMs.102]
  misc_feature (4)..(266): NCBI GI: 256732183 Blast Desc: NECHADRAFT_41372 [Nectria haematococca mpVI 77-13-4]
  misc_feature (3)..(266): NCBI GI: 46137195 Blast Desc: FG10113.1 [Gibberella zeae PH-1]
  misc_feature (1)..(239): NCBI GI: 116179950 Blast Desc: CHGG_00603 [Chaetomium globosum CBS 148.51] gi|88184900|gb|EAQ92368.1| CHGG_00603 [Chaetomium globosum CBS 148.51]
  misc_feature (7)..(266): NCBI GI: 39952333 Blast Desc: MGG_01809 [Magnaporthe grisea 70-15] gi|145020332|gb|EDK04461.1| MGG_01809 [Magnaporthe grisea 70-15]
  misc_feature (10)..(269): NCBI GI: 85102516 Blast Desc: NCU03617 [Neurospora crassa OR74A] gi|12718403|emb|CAC28711.1| conserved [Neurospora crassa] gi|28922888|gb|EAA32108.1| [Neurospora crassa OR74A]
  misc_feature (12)..(268): NCBI GI: 242780039 Blast Desc: haloacid dehalogenase, type II [Talaromyces stipitatus ATCC 10500] gi|218719658|gb|EED19077.1| haloacid dehalogenase, type II [Talaromyces stipitatus ATCC 10500]
  misc_feature (12)..(268): NCBI GI: 255935853 Blast Desc: Pc13g05190 [Penicillium chrysogenum Wisconsin 54-1255] gi|211583573|emb|CAP91588.1| Pc13g05190 [Penicillium chrysogenum Wisconsin 54-1255]
  misc_feature (12)..(268): NCBI GI: 189211111 Blast Desc: haloacid dehalogenase [Pyrenophora tritici-repentis Pt-1C-BFP] gi|187977979|gb|EDU44605.1| haloacid dehalogenase [Pyrenophora tritici-repentis Pt-1C-BFP]
  misc_feature (12)..(270): NCBI GI: 169784040 Blast Desc: [Aspergillus oryzae RIB40] gi|238493879|ref|XP_002378176.1| haloacid dehalogenase, type II [Aspergillus flavus NRRL3357] gi|83775226|dbj|BAE65349.1| protein
  misc_feature (11)..(236): SWISSPROT Homolog: EC 3.8.1.2 (S)-2-haloacid dehalogenase
  misc_feature: Useful for introducing or modulating the production of volatile compounds
MSEAAEALKHVKALTFDVFGTVVDWRSTVHNELIKFGKDKINSPVFGTLSETLQARLREITDKDWGEFAQAWRNSYIDFVRTFVPGQTKWKDIDTHHYDSLVVLMNEWGISGVYTEQELRSLSLIWHFLTPWPDSALGIQRLGTRYVTCTLSNGNRSLLDDLNTHGNLGFRRIISTADYGAYKPHPSTYLGAADSLGCQPNEVAMVAAHLSDLNAARQNGLRTIYVERQGEGGFSPNSQSYKDARDWVDLWISENEEGFVEVARKLGIST

SEQ ID NO: 22979 - DNA, 1329 bp, Muscodor strobelii
  misc_feature: SGI EST ID NO. CUFF.54060.1
  misc_feature: Variant of the nucleotide sequence at SEQ ID NO 22977
acgggatcgatgtagagataattgtcgacgagccgccccggtatctcgtctgagagatcatccttacaaagatggtgcgcatcttgcatctagcgatggcccgaacaggatgcacgatttccggagcttgccccgcaccgcgctccggtactcgttcggtgacgccatttgcgtctatagaaccctgcgagttattgcacttgtatcatatgagattaagtgacacattgatgccaacacatcacactgagtaacatcgtcatgtcagaagctgccgaggctctcaagcacgtgaaggcgctcacgtttgatgtgttcggaactgtcgtggactggagatcaacggtacacaacgagctcatcaagttcgggaaagacaaaatcaattcacctgtgttcggtacactgtccgagacactccaggctcgtcttcgggagatcacggataaggactggggtgaattcgctcaggcatggcgaaattcttacatcgattttgttcgaacttttgttcccggacagacgaaatggaaagatatcgacacgcatcattacgacagccttgtcgtattgatgaacgagtggggtatctcgggtgtttacaccgaacaagagttgcgctcgttgagtctcatttggcacttcctcacaccttggcccgactctgcactcgggatccagagactcggaactagatacgtcacttgtactctcagtaatggcaatcgttccctgctggacgacctcaatacccatggaaatcttggctttcgacgtatcatctcgactgcagattacggcgcttacaagccacatccaagcacatatcttggagctgctgattctctcggctgccagcccaatgaagtcgcaatggtagctgcgcatctatccgatctcaatgcagctagacagaatggcctacgtacgatctatgtggagcggcaaggtgagggagggttttcgcctaacagccaaagttacaaagacgcacgggactgggttgatttgtggatttctgaaaacgaagagggattcgtcgaggtagcgcggaaactgggtatatctacatgagtggcatcgcgcaactattgagcttggttacactgcttgctcaagccctgttacgtcccaccattccttataatgatcccttacttgttgagattggtcggaggacgcaaaagcgctgcgttgtcggtaggtttcaagtgcggtatgtccaatctcacttagatgtgagggttcgtgcgaagacaccagtacattttatagagtgcaccagagttcatgcatcaatacatatttgcaccaacagatgcaacggcc

SEQ ID NO: 22980 - DNA, 1209 bp, Muscodor strobelii
  misc_feature: SGI cDNA ID NO. 567814
  misc_feature: Encodes the peptide sequence at SEQ ID NO 22981
atgaagccgctgcaacatctccacctgaacccagctagacgccagccactgctccgcgaccaacagagttcaagcgaggctcccagaaactttcccacccaaacggcacatacacatcccaatcgcttagatgcagctttatcaccagaagatgccagtgtgtcgttcatcggcacagccacgacgatcattgaatggcagggtctaagaattttgacagaccctaatttcttgcacaagggcgaccatgtgcatttgggtcctggcgtaacagcagaacgaattaccaatccggctgtggacttgcacgagctccctcctattgaccttgtgttgctaagtcattatcacgaagaccactttgatcgcttagcggaggatagtcttaacagagcaatacccattgtgactacgccacatgctaaaggatgcttgacatccgaggataaatatgagaaagctggcaggaatgatcagggtcctttccgaaatgttcacgatctcgatgctttcgatagtctaatattacacattgacggcgatacgcacggaaaaccggcgtccagtatgagaattactggaatgccaggaaaacatgtccctcctggtccgctggccgctgtcaatgatctcctcggcgcagtgccgccaacaaacggttggctgattgagatgggatggaattatggcacttccgtggcctcttcatctcgtcagacatcaatcggcgtaacgtcggaggcgatgaatgagaatgcgtcgctagacgtgggacatacgctctatatttctggcgatacgttattcgtcgatgaactcaagtcgatcccgccgtacctgtgctccctccagcagcaacgacaacaacaacaatcgcccgcgccatcaagtacagagccaagaattgacctgatgctcatacatcttgggggaactacaatcccaggccctcaagcgccattgctaatggtgacgatggacgcaaagcaaggtgtcgaactcatgagactgctgaaccccgatttgacaatccctatccactttgacgattataacgtctttctcagccctcttagtgatttcaaggaagaagtcaaaaggatgagtgaagaatgggagggcagggttgtatatctggaccgaggcgacacctacaggtttagggttagtaggggcgacgaggacaagccgatccggaaaatcatttag

SEQ ID NO: 22981 - protein, 402 aa, Muscodor strobelii
  misc_feature: SGI Peptide ID NO. 567814
  misc_feature (4)..(387): NCBI GI: 164425786 Blast Desc: NCU04908 [Neurospora crassa OR74A] gi|157071064|gb|EAA30120.2| conserved [Neurospora crassa OR74A]
  misc_feature (7)..(391): NCBI GI: 46125873 Blast Desc: FG07314.1 [Gibberella zeae PH-1]
  misc_feature (4)..(394): NCBI GI: 169601566 Blast Desc: SNOG_03651 [Phaeosphaeria nodorum SN15] gi|111067736|gb|EAT88856.1| SNOG_03651 [Phaeosphaeria nodorum SN15]
  misc_feature (7)..(392): NCBI GI: 171688066 Blast Desc: protein product [Podospora anserina] gi|170943995|emb|CAP70105.1| protein product [Podospora anserina]
  misc_feature (1)..(389): NCBI GI: 39974125 Blast Desc: MGG_00791 [Magnaporthe grisea 70-15] gi|145018273|gb|EDK02552.1| MGG_00791 [Magnaporthe grisea 70-15]
  misc_feature (18)..(396): NCBI GI: 189193675 Blast Desc: conserved [Pyrenophora tritici-repentis Pt-1C-BFP] gi|187978740|gb|EDU45366.1| conserved [Pyrenophora tritici-repentis Pt-1C-BFP]
  misc_feature (7)..(391): NCBI GI: 256732744 Blast Desc: NECHADRAFT_38362 [Nectria haematococca mpVI 77-13-4]
  misc_feature (4)..(390): NCBI GI: 242782909 Blast Desc: conserved [Talaromyces stipitatus ATCC 10500] gi|218720240|gb|EED19659.1| conserved [Talaromyces stipitatus ATCC 10500]
  misc_feature (4)..(391): NCBI GI: 169868688 Blast Desc: CC1G_03144 [Coprinopsis cinerea okayama7#130] gi|116498073|gb|EAU80968.1| CC1G_03144 [Coprinopsis cinerea okayama7#130]
  misc_feature (4)..(389): NCBI GI: 259481976 Blast Desc: TPA: conserved [Aspergillus nidulans FGSC A4]
MKPLQHLHLNPARRQPLLRDQQSSSEAPRNFPTQTAHTHPNRLDAALSPEDASVSFIGTATTIIEWQGLRILTDPNFLHKGDHVHLGPGVTAERITNPAVDLHELPPIDLVLLSHYHEDHFDRLAEDSLNRAIPIVTTPHAKGCLTSEDKYEKAGRNDQGPFRNVHDLDAFDSLILHIDGDTHGKPASSMRITGMPGKHVPPGPLAAVNDLLGAVPPTNGWLIEMGWNYGTSVASSSRQTSIGVTSEAMNENASLDVGHTLYISGDTLFVDELKSIPPYLCSLQQQRQQQQSPAPSSTEPRIDLMLIHLGGTTIPGPQAPLLMVTMDAKQGVELMRLLNPDLTIPIHFDDYNVFLSPLSDFKEEVKRMSEEWEGRVVYLDRGDTYRFRVSRGDEDKPIRKII

SEQ ID NO: 22982 - DNA, 6514 bp, Muscodor strobelii
  misc_feature: SGI EST ID NO. CUFF.54106.0
  misc_feature: Variant of the nucleotide sequence at SEQ ID NO 22980
caacatctccacctgaacccagctagacgccagccactgctccgcgaccaacagagttcaagcgaggctcccagaaactttcccacccaaacggcacatacacatcccaatcgcttagatgcagctttatcaccagaagatgccagtgtgtcgttcatcggcacagccacgacgatcattgaatggcagggtctaagaattttgacagaccctaatttcttgcacaagggcgaccatgtgcatttgggtcctggcgtaacagcagaacgaattaccaatccggctgtggacttgcacgagctccctcctattgaccttgtgttgctaagtcattatcacgaagaccactttgatcgcttagcggaggatagtcttaacagagcaatacccattgtgactacgccacatgctaaaggatgcttgacatccgaggataaatatgagaaagctggcaggaatgatcagggtcctttccgaaatgttcacgatctcgatgctttcgatagtctaatattacacattgacggcgatacgcacggaaaaccggcgtccagtatgagaattactggaatgccaggaaaacatgtccctcctggtccgctggccgctgtcaatgatctcctcggcgcagtgccgccaacaaacggttggctgattgagatgggatggaattatggcacttccgtggcctcttcatctcgtcagacatcaatcggcgtaacgtcggaggcgatgaatgagaatgcgtcgctagacgtgggacatacgctctatatttctggcgatacgttattcgtcgatgaactcaagtcgatcccgccgtacctgtgctccctccagcagcaacgacaacaacaacaatcgcccgcgccatcaagtacagagccaagaattgacctgatgctcatacatcttgggggaactacaatcccaggccctcaagcgccattgctaatggtgacgatggacgcaaagcaaggtgtcgaactcatgagactgctgaaccccgatttgacaatccctatccactttgacgattataacgtctttctcagccctcttagtgatttcaaggaagaagtcaaaaggatgagtgaagaatgggagggcagggttgtatatctggaccgaggcgacacctacaggtttagggttagtaggggcgacgaggacaagccgatccggaaaatcatttagggtgaccattgacaatgtgcaagagagttcatagaagtcactgtacacaaagatcaacaagacgatatctatacctgggttttatgcattccgacaagtacaatttgcacatatctgagatctaaattgtccaacttcgcagcgatgcaaagccactctaagagtcacatgtcctggttgaaggttgggaacttgatccatcaggtctttttgtttactctttctctagacaataatacaacgtaaggtatgtatgcgatgctttagtgtggcagtgttggcgctagctggtatgcttgctctgtgcttttctccgaaatctccgcgtccgcatacggatttcatcatcaacatgtcagtcggcataaggacaaccgcttcgcgcgttcggctctatctgtttgaccttggctaaggccatgcgaaccgcctttcacctgcctcgtcctggtggtagtacaattatgtccgcggcagcattcagtccgcacggcgaggaccacgccgctagcgattctcgctcacggcccagcggtcgcgaaaaaccacagctgtcgtgcaatcactgccgacgtcgcaagtctcgttgtgatcgtcaggttccttgttctaattgcgtttcacgaggtgaagtttgtacctacgcttcacagacacttcctgcgaagcactcggcatcccgtactagtctggcgttacgtgaccggctgaatcaattagagaatcaattgatatctctgagatctgacctagctgccaaagacggacgagttcagagcgccgagtatccgcctcgtcaatcatcacttgcccctggccttgcaggcatctccacgagcgttggccccgcaagcgatgcaaatacgactgagaatgatgacctcgccgacgacaaatctgaatgtggcagtttggttgccagtacaacaaaaagccgctacgtcggtcgggagcattgggctgctattctcgacaacattgctgacctgaaaagttcagtatcaagcgaggatctctctcctgaggaagcagctagcgagaatgccaagacgaaatctaatcgtgctcttctcttgtatggtcaacgagagccagtatcacgtgcagagattcttcaagcactgcccccaagggcaatagttgacagatacgtctctcgctacttcaaccatgtggaccttgtatcatccactatacatggccctagtttcctccgtgagtatgaggcattctggaaagacgcatataaagtctcattcgcttggattggattgctattcggcgtgatctgcctcgccgcaattgtcactgatgcaacttatccggagtatggcgccgagagtactcaacaacttcaaatacaactctaccgagaaaaggttgttgaatgtctcatcgcagcagagtacaccaaacctggcgaacacgtattagaggccatgatccaatacctatacctggagtttctgctggggccggatgctaaagaggatctttggtttctcttgggtattgaggtgaacatggcattacgaatgggctaccaccgtgatcctagtcatttccctaacattacgccttatgagagcgagatgcgacggcgcatttggtctgccgttatgtttggcgacgtgctgatatcgagccagatgggaatgccccgcatgatctctgaaagctgctgcgataccgccgagccacagaatttgaacgattctgatttacactatgacatgactgatttgcctccggcacggccagaaaccgagatgacgaccgttctgggcgtcattgcgcgaagaagaatgatcagtgttttgggtgtcatcgcagatctcacagccagtgcaaagccgtacagccatagcgaagtgatgcgagccgacaagatgttgtatgcagccgaagctaacattcctccgccattgaagcccaagagcttagcaaccagtataacagatcctccaattaccatcatgagtcgtttgttcataagacacatgtttcataaaggtcaaataatgctccatcgaaaatttctttatgcgaggaccactgtagcggtcgctgatggccaggcttattcacgaagagcttgtctagaggcatctctcaatttactccagatccaacacatcctcgatgaagagactcttcctggtggtcaacttgacacactgcgctggcgcatgacgtcgattatgaaccaccagtttctcacagcgaccatgatcctctgctctatggtatactatggaaagacacaggctcgttctgatgacataatttctgcattacgcaccgctcgaaacgtttggatgaggcgctcagggtctcaagaggcgatgaaggcaaccgagacgattaatgctattctggcgagggcaagtaaggaaggcagaagtgatacggtacctggccaagatggccgtatcgtgttcgacatgaataatttggcagccgacgctgcatcaggggctccatacgacagcgatatcgacccgacttatttcatgctacaagactttgacgatgaagtttttgatttcaatagcaactcggcacagcagcttacctttaatatggacgactacacaacaccggagcaaagacaaaatatcgcttgtcgtcacatttcgtggagaaatgactacactataccccactaccgagattccctagacagcatactcgaagaaggccagcgatagggattccgctgctagacttacataaagacacaaagagcacaagaataacagcacacttctcagaaatctgcagagtctagaagtgggagagtcaaaattgaaagaagaaaaaaaccaaatgggtgcaaaaaagattccccttgaagacagtattaccaccgtatgtaatactgcctacccactagcccccggagcccacggtatttgaccacctgaacacgttcacatgatcccacacgaggtgagaagtgtactaaagtagaactaaagcggcttgttgagtcggccagacatggtcgtcagctctggaaaagatcagagtagcgcacacggagcgggattcgaacccgcggtctttgtcacatggaatgcgactaataccattccaccaccgaagtggtttggttattgagtgcctgcctgctaattggattgataaagcaaatgcgccgttgcccagcagtgtgattagtgagggcgcggggctgcgacgcgttgacgcgtgcttgtatatttaatgtgtagctccctaagatgagcgatagtcgcctatggcgatgccttgccgatttcgaactcgtgagcagctgagaagcagaagatgggcatctttagaccaatcgacactgctgccttccgtccttcacttatccacccacacattcacttacgacgtttctctcaaatccacaatcttcatactatacaaccaccatagaacaggatgtccatatacaggatgaaatcatgaatatcatttcaagtactacctatgctgggcctatactgattcgtatacgctcctcaaccatgtgcaaggataacacgagaatacatagcaggggcgaggtgagcggtatcatgcagaacacaattgcttttgtcctttccagtaaaggtcattatccggtccatcataaatcccaaactaaataaatagccgaatgcaggagcaaacaaacaggcgtgaaacacattttgtttagtaccgcattatcatgcaatcttctcattctctttccccacaagcaaatccaccttctcaatcttatgtctaatcgtcatcatgcagctgtccatcagtcccatctctggcgccattccgcccctcaccgacctaacgtttccaagtcagcacactacaacgcaaagatcaaactactaatcgtcttgacctacgcgcaatgtgccctcagaagataggccgtgggaccagaatccgccgagcgatggtgtcgtgcgggtcatggcgtcgtgcgtcacaagcaaccagaagccgaacacgggcttggcgaggatgtcgaggatcgcgtaggcgatgatctcgccgtcgacgttcacgatgcgggagccgtctgctacgccccagacactaaattgggtcgtgttagcaatctcctcgctgtagtacgataataggaagcgggtgggtggtacgaatggtgaagactcacataggatacacagtccaaaggaacaaggtgaacagagaaatagcgccgaagaaagccttagtctttgtgtccttgttcgctacgacgagtcgtcccttatacccaagctgatacacgatgttgagatatgcgatacatgcccatgcataccatccccagccttgcgcagcgtcgtgggagaaggccgcgaagagaccggtcaagatcatgatgacgtctgagacgaggagcacaaggatgctggcgccgttgagtcctgctaggaagcagagatccaggagcaggagaggagtcgtcagagtccactggggtgagcattgttagtcgaggccgagttgagtggtaggggtaagcaataagaaagacatacatcgacgtatcgtgcccagtaaacttggcgttgcaccacctcggttacgacatgctgcttcgtctcatggatgaccgtctcgtggataccgataccagctccggtcgccatagcatagtaggagaggaatgcaaaagtagtgatgaatgctgtaataatgtggaagagtcgtttttgctagaccaatgtcagatcgattacaataccttcaattgcggattttttgcttaccacaggcaccctcatggccatgacgtagaacgccaatgaagacaaacccatgacgacgcagacaacccataaagtcttgtgtccgacatctgtggaatgttgatgatacacctttggcagttcgggtatcacagtaggcatgggtagagtgtcatggcccttatgcccatgcttagaggactcgtccatcacagccgtagcagcaggtgcgatgacctggtcgtatatttcctgagggatcatcatcttggcggtttcttcctcttctttgccgtctcaatcaagtcagttcgatcctgtgtggtacaattgaaatccgtcagttcatatatcaccacggaaaaccatggacattaaagaatacgaagattcctcagaattaggcagaagcaagcaaggtagatgatataagacatgcccgagaagtggtgtcgtcaccctcaacgcactgcattagccctgagccaatcagaggcgcgcaacaagcttaaataggcacatttgaactaaggctcctgcgctcaatctgacttcaccgaccaaccttgaag

SEQ ID NO: 22983 - DNA, 2292 bp, Muscodor strobelii
  misc_feature: SGI cDNA ID NO. 567815
  misc_feature: Encodes the peptide sequence at SEQ ID NO 22984
atgcgaaccgcctttcacctgcctcgtcctggtggtagtacaattatgtccgcggcagcattcagtccgcacggcgaggaccacgccgctagcgattctcgctcacggcccagcggtcgcgaaaaaccacagctgtcgtgcaatcactgccgacgtcgcaagtctcgttgtgatcgtcaggttccttgttctaattgcgtttcacgaggtgaagtttgtacctacgcttcacagacacttcctgcgaagcactcggcatcccgtactagtctggcgttacgtgaccggctgaatcaattagagaatcaattgatatctctgagatctgacctagctgccaaagacggacgagttcagagcgccgagtatccgcctcgtcaatcatcacttgcccctggccttgcaggcatctccacgagcgttggccccgcaagcgatgcaaatacgactgagaatgatgacctcgccgacgacaaatctgaatgtggcagtttggttgccagtacaacaaaaagccgctacgtcggtcgggagcattgggctgctattctcgacaacattgctgacctgaaaagttcagtatcaagcgaggatctctctcctgaggaagcagctagcgagaatgccaagacgaaatctaatcgtgctcttctcttgtatggtcaacgagagccagtatcacgtgcagagattcttcaagcactgcccccaagggcaatagttgacagatacgtctctcgctacttcaaccatgtggaccttgtatcatccactatacatggccctagtttcctccgtgagtatgaggcattctggaaagacgcatataaagtctcattcgcttggattggattgctattcggcgtgatctgcctcgccgcaattgtcactgatgcaacttatccggagtatggcgccgagagtactcaacaacttcaaatacaactctaccgagaaaaggttgttgaatgtctcatcgcagcagagtacaccaaacctggcgaacacgtattagaggccatgatccaatacctatacctggagtttctgctggggccggatgctaaagaggatctttggtttctcttgggtattgaggtgaacatggcattacgaatgggctaccaccgtgatcctagtcatttccctaacattacgccttatgagagcgagatgcgacggcgcatttggtctgccgttatgtttggcgacgtgctgatatcgagccagatgggaatgccccgcatgatctctgaaagctgctgcgataccgccgagccacagaatttgaacgattctgatttacactatgacatgactgatttgcctccggcacggccagaaaccgagatgacgaccgttctgggcgtcattgcgcgaagaagaatgatcagtgttttgggtgtcatcgcagatctcacagccagtgcaaagccgtacagccatagcgaagtgatgcgagccgacaagatgttgtatgcagccgaagctaacattcctccgccattgaagcccaagagcttagcaaccagtataacagatcctccaattaccatcatgagtcgtttgttcataagacacatgtttcataaaggtcaaataatgctccatcgaaaatttctttatgcgaggaccactgtagcggtcgctgatggccaggcttattcacgaagagcttgtctagaggcatctctcaatttactccagatccaacacatcctcgatgaagagactcttcctggtggtcaacttgacacactgcgctggcgcatgacgtcgattatgaaccaccagtttctcacagcgaccatgatcctctgctctatggtatactatggaaagacacaggctcgttctgatgacataatttctgcattacgcaccgctcgaaacgtttggatgaggcgctcagggtctcaagaggcgatgaaggcaaccgagacgattaatgctattctggcgagggcaagtaaggaaggcagaagtgatacggtacctggccaagatggccgtatcgtgttcgacatgaataatttggcagccgacgctgcatcaggggctccatacgacagcgatatcgacccgacttatttcatgctacaagactttgacgatgaagtttttgatttcaatagcaactcggcacagcagcttacctttaatatggacgactacacaacaccggagcaaagacaaaatatcgcttgtcgtcacatttcgtggagaaatgactacactataccccactaccgagattccctagacagcatactcgaagaaggccagcgatag

SEQ ID NO: 22984 - protein, 763 aa, Muscodor strobelii
  misc_feature: SGI Peptide ID NO. 567815
  misc_feature (45)..(83): Pfam Id: PF00172 Pfam Desc: Fungal Zn(2)-Cys(6) binuclear cluster domain
  misc_feature (331)..(433): Pfam Id: PF04082 Pfam Desc: Fungal specific transcription factor domain
  misc_feature (341)..(433): Pfam Id: PF04082 Pfam Desc: Fungal specific transcription factor domain
  misc_feature (16)..(727): NCBI GI: 146323062 Blast Desc: fungal specific transcription factor [Aspergillus fumigatus Af293] gi|129558597|gb|EAL93929.2| fungal specific transcription factor, [Aspergillus fumigatus Af293]
  misc_feature (25)..(662): NCBI GI: 116205828 Blast Desc: CHGG_02207 [Chaetomium globosum CBS 148.51] gi|88182804|gb|EAQ90272.1| CHGG_02207 [Chaetomium globosum CBS 148.51]
  misc_feature (120)..(670): NCBI GI: 159130022 Blast Desc: fungal specific transcription factor, [Aspergillus fumigatus A1163]
  misc_feature (120)..(670): NCBI GI: 119482131 Blast Desc: fungal specific transcription factor, [Neosartorya fischeri NRRL 181] gi|119409248|gb|EAW19197.1| fungal specific transcription factor, [Neosartorya fischeri NRRL 181]
  misc_feature (41)..(671): NCBI GI: 238846084 Blast Desc: fungal specific transcription factor domain-containing protein [Microsporum canis CBS 113480]
  misc_feature (16)..(726): NCBI GI: 145249886 Blast Desc: An14g06590 [Aspergillus niger] gi|134081966|emb|CAK97232.1| protein product [Aspergillus niger]
  misc_feature (93)..(664): NCBI GI: 242784611 Blast Desc: fungal specific transcription factor, [Talaromyces stipitatus ATCC 10500] gi|218720569|gb|EED19988.1| fungal specific transcription factor, [Talaromyces stipitatus ATCC
  misc_feature (266)..(658): NCBI GI: 258574437 Blast Desc: conserved [Uncinocarpus reesii 1704] gi|237901666|gb|EEP76067.1| conserved [Uncinocarpus reesii 1704]
  misc_feature (268)..(663): NCBI GI: 115391467 Blast Desc: conserved [Aspergillus terreus NIH2624] gi|114194162|gb|EAU35862.1| conserved [Aspergillus terreus NIH2624]
  misc_feature (40)..(721): NCBI GI: 212538667 Blast Desc: fungal specific transcription factor, [Penicillium marneffei ATCC 18224] gi|210069231|gb|EEA23322.1| fungal specific transcription factor, [Penicillium marneffei ATCC 18224]
MRTAFHLPRPGGSTIMSAAAFSPHGEDHAASDSRSRPSGREKPQLSCNHCRRRKSRCDRQVPCSNCVSRGEVCTYASQTLPAKHSASRTSLALRDRLNQLENQLISLRSDLAAKDGRVQSAEYPPRQSSLAPGLAGISTSVGPASDANTTENDDLADDKSECGSLVASTTKSRYVGREHWAAILDNIADLKSSVSSEDLSPEEAASENAKTKSNRALLLYGQREPVSRAEILQALPPRAIVDRYVSRYFNHVDLVSSTIHGPSFLREYEAFWKDAYKVSFAWIGLLFGVICLAAIVTDATYPEYGAESTQQLQIQLYREKVVECLIAAEYTKPGEHVLEAMIQYLYLEFLLGPDAKEDLWFLLGIEVNMALRMGYHRDPSHFPNITPYESEMRRRIWSAVMFGDVLISSQMGMPRMISESCCDTAEPQNLNDSDLHYDMTDLPPARPETEMTTVLGVIARRRMISVLGVIADLTASAKPYSHSEVMRADKMLYAAEANIPPPLKPKSLATSITDPPITIMSRLFIRHMFHKGQIMLHRKFLYARTTVAVADGQAYSRRACLEASLNLLQIQHILDEETLPGGQLDTLRWRMTSIMNHQFLTATMILCSMVYYGKTQARSDDIISALRTARNVWMRRSGSQEAMKATETINAILARASKEGRSDTVPGQDGRIVFDMNNLAADAASGAPYDSDIDPTYFMLQDFDDEVFDFNSNSAQQLTFNMDDYTTPEQRQNIACRHISWRNDYTIPHYRDSLDSILEEGQR

SEQ ID NO: 22985 - DNA, 6514 bp, Muscodor strobelii; identical to SEQ ID NO: 22982
  misc_feature: SGI EST ID NO. CUFF.54106.0
  misc_feature: Variant of the nucleotide sequence at SEQ ID NO 22983

SEQ ID NO: 22986 - DNA, 984 bp, Muscodor strobelii
  misc_feature: SGI cDNA ID NO. 567816
  misc_feature: Encodes the peptide sequence at SEQ ID NO 22987
atgatgatccctcaggaaatatacgaccaggtcatcgcacctgctgctacggctgtgatggacgagtcctctaagcatgggcataagggccatgacactctacccatgcctactgtgatacccgaactgccaaaggtgtatcatcaacattccacagatgtcggacacaagactttatgggttgtctgcgtcgtcatgggtttgtcttcattggcgttctacgtcatggccatgagggtgcctgtgcaaaaacgactcttccacattattacagcattcatcactacttttgcattcctctcctactatgctatggcgaccggagctggtatcggtatccacgagacggtcatccatgagacgaagcagcatgtcgtaaccgaggtggtgcaacgccaagtttactgggcacgatacgtcgattggactctgacgactcctctcctgctcctggatctctgcttcctagcaggactcaacggcgccagcatccttgtgctcctcgtctcagacgtcatcatgatcttgaccggtctcttcgcggccttctcccacgacgctgcgcaaggctggggatggtatgcatgggcatgtatcgcatatctcaacatcgtgtatcagcttgggtataagggacgactcgtcgtagcgaacaaggacacaaagactaaggctttcttcggcgctatttctctgttcaccttgttcctttggactgtgtatcctattgtctggggcgtagcagacggctcccgcatcgtgaacgtcgacggcgagatcatcgcctacgcgatcctcgacatcctcgccaagcccgtgttcggcttctggttgcttgtgacgcacgacgccatgacccgcacgacaccatcgctcggcggattctggtcccacggcctatcttctgagggcacattgcgcgtcggtgaggggcggaatggcgccagagatgggactgatggacagctgcatgatgacgattag

SEQ ID NO: 22987 - protein, 327 aa, Muscodor strobelii
  misc_feature: SGI Peptide ID NO. 567816
  misc_feature (58)..(294): Pfam Id: PF01036 Pfam Desc: Bacteriorhodopsin
  misc_feature (1)..(314): NCBI GI: 154319009 Blast Desc: BC1G_02456 [Botryotinia fuckeliana B05.10] gi|150856887|gb|EDN32079.1| BC1G_02456 [Botryotinia fuckeliana B05.10]
  misc_feature (35)..(314): NCBI GI: 156062996 Blast Desc: opsin-1 [Sclerotinia sclerotiorum 1980] gi|154696950|gb|EDN96688.1| opsin-1 [Sclerotinia sclerotiorum 1980]
  misc_feature (35)..(310): NCBI GI: 169596110 Blast Desc: SNOG_00807 [Phaeosphaeria nodorum SN15] gi|111071182|gb|EAT92302.1| SNOG_00807 [Phaeosphaeria nodorum SN15]
  misc_feature (35)..(316): NCBI GI: 282892267 Blast Desc: Mac-GFP [synthetic construct]
  misc_feature (35)..(310): NCBI GI: 261188854 Blast Desc: opsin 1 [Ajellomyces dermatitidis SLH14081] gi|239591982|gb|EEQ74563.1| opsin 1 [Ajellomyces dermatitidis SLH14081] gi|239615329|gb|EEQ92316.1| opsin 1 [Ajellomyces ER-3]
  misc_feature (14)..(310): NCBI GI: 9858875 Blast Desc: AF290180_1 opsin [Leptosphaeria maculans] gi|282892265|gb|ADB03112.1| Mac [synthetic construct]
  misc_feature (49)..(311): NCBI GI: 238840038 Blast Desc: opsin 1 [Microsporum canis CBS 113480]
  misc_feature (35)..(312): NCBI GI: 225556377 Blast Desc: opsin [Ajellomyces capsulatus G186AR]
  misc_feature (35)..(312): NCBI GI: 240276587 Blast Desc: opsin [Ajellomyces capsulatus H143]
  misc_feature (35)..(310): NCBI GI: 34559256 Blast Desc: opsin [Oryza sativa Indica Group]
MMIPQEIYDQVIAPAATAVMDESSKHGHKGHDTLPMPTVIPELPKVYHQHSTDVGHKTLWVVCVVMGLSSLAFYVMAMRVPVQKRLFHIITAFITTFAFLSYYAMATGAGIGIHETVIHETKQHVVTEVVQRQVYWARYVDWTLTTPLLLLDLCFLAGLNGASILVLLVSDVIMILTGLFAAFSHDAAQGWGWYAWACIAYLNIVYQLGYKGRLVVANKDTKTKAFFGAISLFTLFLWTVYPIVWGVADGSRIVNVDGEIIAYAILDILAKPVFGFWLLVTHDAMTRTTPSLGGFWSHGLSSEGTLRVGEGRNGARDGTDGQLHDDD

SEQ ID NO: 22988 - DNA, 2554 bp, Muscodor strobelii
  misc_feature: SGI EST ID NO. CUFF.54107.3
  misc_feature: Variant of the nucleotide sequence at SEQ ID NO 22986
cttcaaggttggtcggtgaagtcagattgagcgcaggagccttagttcaaatgtgcctatttaagcttgttgcgcgcctctgattggctcagggctaatgcagtgcgttgagggtgacgacaccacttctcgggcatgtcttatatcatctaccttgcttgcttctgcctaattctgaggaatcttcgtattctttaatgtccatggttttccgtggtgatatatgaactgacggatttcaattgtaccacacaggatcgaactgacttgattgagacggcaaagaagaggaagaaaccgccaagatgatgatccctcaggaaatatacgaccaggtcatcgcacctgctgctacggctgtgatggacgagtcctctaagcatgggcataagggccatgacactctacccatgcctactgtgatacccgaactgccaaaggtgtatcatcaacattccacagatgtcggacacaagactttatgggttgtctgcgtcgtcatgggtttgtcttcattggcgttctacgtcatggccatgagggtgcctgtgcaaaaacgactcttccacattattacagcattcatcactacttttgcattcctctcctactatgctatggcgaccggagctggtatcggtatccacgagacggtcatccatgagacgaagcagcatgtcgtaaccgaggtggtgcaacgccaagtttactgggcacgatacgtcgattggactctgacgactcctctcctgctcctggatctctgcttcctagcaggactcaacggcgccagcatccttgtgctcctcgtctcagacgtcatcatgatcttgaccggtctcttcgcggccttctcccacgacgctgcgcaaggctggggatggtatgcatgggcatgtatcgcatatctcaacatcgtgtatcagcttgggtataagggacgactcgtcgtagcgaacaaggacacaaagactaaggctttcttcggcgctatttctctgttcaccttgttcctttggactgtgtatcctattgtctggggcgtagcagacggctcccgcatcgtgaacgtcgacggcgagatcatcgcctacgcgatcctcgacatcctcgccaagcccgtgttcggcttctggttgcttgtgacgcacgacgccatgacccgcacgacaccatcgctcggcggattctggtcccacggcctatcttctgagggcacattgcgcgtaggtcaagacgattagtagtttgatctttgcgttgtagtgtgctgacttggaaacgttaggtcggtgaggggcggaatggcgccagagatgggactgatggacagctgcatgatgacgattagacataagattgagaaggtggatttgcttgtggggaaagagaatgagaagattgcatgataatgcggtactaaacaaaatgtgtttcacgcctgtttgtttgctcctgcattcggctatttatttagtttgggatttatgatggaccggataatgacctttactggaaaggacaaaagcaattgtgttctgcatgataccgctcacctcgcccctgctatgtattctcgtgttatccttgcacatggttgaggagcgtatacgaatcagtataggcccagcataggtagtacttgaaatgatattcatgatttcatcctgtatatggacatcctgttctatggtggttgtatagtatgaagattgtggatttgagagaaacgtcgtaagtgaatgtgtgggtggataagtgaaggacggaaggcagcagtgtcgattggtctaaagatgcccatcttctgcttctcagctgctcacgagttcgaaatcggcaaggcatcgccataggcgactatcgctcatcttagggagctacacattaaatatacaagcacgcgtcaacgcgtcgcagccccgcgccctcactaatcacactgctgggcaacggcgcatttgctttatcaatccaattagcaggcaggcactcaataaccaaaccacttcggtggtggaatggtattagtcgcattccatgtgacaaagaccgcgggttcgaatcccgctccgtgtgcgctactctgatcttttccagagctgacgaccatgtctggccgactcaacaagccgctttagttctactttagtacacttctcacctcgtgtgggatcatgtgaacgtgttcaggtggtcaaataccgtgggctccgggggctagtgggtaggcagtattacatacggtggtaatactgtcttcaaggggaatcttttttgcacccatttggtttttttcttctttcaattttgactctcccacttctagactctgcagatttctgagaagtgtgctgttattcttgtgctctttgtgtctttatgtaagtctagcagcggaatccctatcgctggccttcttcgagtatgctgtctagggaatctcggtagtggggtatagtgtagtcatttctccacgaaatgtgacgacaagcgatattttgtctttgctccggtgttgtgtagtcgtccatattaaaggtaagctgctgtg

SEQ ID NO: 22989 - DNA, 939 bp, Muscodor strobelii
  misc_feature: SGI cDNA ID NO. 567817
  misc_feature: Encodes the peptide sequence at SEQ ID NO 22990
atgatgatccctcaggaaatatacgaccaggtcatcgcacctgctgctacggctgtgatggacgagtcctctaagcatgggcataagggccatgacactctacccatgcctactgtgatacccgaactgccaaaggtgtatcatcaacattccacagatgtcggacacaagactttatgggttgtctgcgtcgtcatgggtttgtcttcattggcgttctacgtcatggccatgagggtgcctgtgcaaaaacgactcttccacattattacagcattcatcactacttttgcattcctctcctactatgctatggcgaccggagctggtatcggtatccacgagacggtcatccatgagacgaagcagcatgtcgtaaccgaggtggtgcaacgccaagtttactgggcacgatacgtcgattggactctgacgactcctctcctgctcctggatctctgcttcctagcaggactcaacggcgccagcatccttgtgctcctcgtctcagacgtcatcatgatcttgaccggtctcttcgcggccttctcccacgacgctgcgcaaggctggggatggtatgcatgggcatgtatcgcatatctcaacatcgtgtatcagcttgggtataagggacgactcgtcgtagcgaacaaggacacaaagactaaggctttcttcggcgctatttctctgttcaccttgttcctttggactgtgtatcctattgtctggggcgtagcagacggctcccgcatcgtgaacgtcgacggcgagatcatcgcctacgcgatcctcgacatcctcgccaagcccgtgttcggcttctggttgcttgtgacgcacgacgccatgacccgcacgacaccatcgctcggcggattctggtcccacggcctatcttctgagggcacattgcgcgtaggtcaagacgattag

SEQ ID NO: 22990 - protein, 312 aa, Muscodor strobelii
  misc_feature: SGI Peptide ID NO. 567817
  misc_feature (58)..(294): Pfam Id: PF01036 Pfam Desc: Bacteriorhodopsin
  misc_feature (1)..(312): NCBI GI: 154319009 Blast Desc: BC1G_02456 [Botryotinia fuckeliana B05.10] gi|150856887|gb|EDN32079.1| BC1G_02456 [Botryotinia fuckeliana B05.10]
  misc_feature (35)..(312): NCBI GI: 169596110 Blast Desc: SNOG_00807 [Phaeosphaeria nodorum SN15] gi|111071182|gb|EAT92302.1| SNOG_00807 [Phaeosphaeria nodorum SN15]
  misc_feature (35)..(312): NCBI GI: 156062996 Blast Desc: opsin-1 [Sclerotinia sclerotiorum 1980] gi|154696950|gb|EDN96688.1| opsin-1 [Sclerotinia sclerotiorum 1980]
  misc_feature (35)..(312): NCBI GI: 282892267 Blast Desc: Mac-GFP [synthetic construct]
  misc_feature (35)..(312): NCBI GI: 9858875 Blast Desc: AF290180_1 opsin [Leptosphaeria maculans] gi|282892265|gb|ADB03112.1| Mac [synthetic construct]
  misc_feature (35)..(312): NCBI GI: 261188854 Blast Desc: opsin 1 [Ajellomyces dermatitidis SLH14081] gi|239591982|gb|EEQ74563.1| opsin 1 [Ajellomyces dermatitidis SLH14081] gi|239615329|gb|EEQ92316.1| opsin 1 [Ajellomyces ER-3]
  misc_feature (49)..(311): NCBI GI: 238840038 Blast Desc: opsin 1 [Microsporum canis CBS 113480]
  misc_feature (35)..(311): NCBI GI: 34559256 Blast Desc: opsin [Oryza sativa Indica Group]
  misc_feature (35)..(312): NCBI GI: 225556377 Blast Desc: opsin [Ajellomyces capsulatus G186AR]
  misc_feature (35)..(312): NCBI GI: 240276587 Blast Desc: opsin [Ajellomyces capsulatus H143]
MMIPQEIYDQVIAPAATAVMDESSKHGHKGHDTLPMPTVIPELPKVYHQHSTDVGHKTLWVVCVVMGLSSLAFYVMAMRVPVQKRLFHIITAFITTFAFLSYYAMATGAGIGIHETVIHETKQHVVTEVVQRQVYWARYVDWTLTTPLLLLDLCFLAGLNGASILVLLVSDVIMILTGLFAAFSHDAAQGWGWYAWACIAYLNIVYQLGYKGRLVVANKDTKTKAFFGAISLFTLFLWTVYPIVWGVADGSRIVNVDGEIIAYAILDILAKPVFGFWLLVTHDAMTRTTPSLGGFWSHGLSSEGTLRVGQDD

SEQ ID NO: 22991 - DNA, 2554 bp, Muscodor strobelii; identical to SEQ ID NO: 22988
  misc_feature: SGI EST ID NO. CUFF.54107.3
  misc_feature: Variant of the nucleotide sequence at SEQ ID NO 22989

SEQ ID NO: 22992 - DNA, 1464 bp, Muscodor strobelii
  misc_feature: SGI cDNA ID NO. 567818
  misc_feature: Encodes the peptide sequence at SEQ ID NO 22993
atggatcagatagccaacatcctgctggcctttccgcctgctaacggcgaggtggacctgagcagcaaggagatctacgacaactccctcaccctccacaagtctcgcgtcttcaagttgggtagagaacggaataaagatttagtaacacattgcgtccaactcttcgacctgctcgaccccgccgtccactcgttatcctacgccgcgatcctccatgccttgctcgtccccagcctgccttcgagcataccgcacgactacatcctcgagaagctcgtcatcttcctcatgaccttcgacggccgccagtgccgcgtcatcgggcctttgctgacagagatcatcaccgagatctggtcccgtaccctgctgcccccttcggtcgcgtgcgaggtcctcgcctcctacatcctcagaatcgaccccacgggcaccgtgctcacggacaaacacatcctattagccaagctcgcataccaaaccaacaacatcccgcccgtcctccctataatcgacaggaacatcgtcttctaccccggcatgaccaagtccgacacaccccatcccatgctctctgacccctctcttagccctccgctctacatcgacaaagccagcggcctcacaacgaatctcaagaccccgcaagttctcgagtacgacctgctctgcggtctcatatactgcacacaacgagactggaccaaggcccggatcgcattcgagcgcgtcgtctctttcccttccaaggacggaggcacgagcaagatcatggtagaagcctacaagaaatgggttctcacctccctcctctccctcggctcacaatctgacaccccaccctacgtgagcaacgcgacctcgaaatcctacaacgtcctatcgcggccctacaacaccctcgcatccgccttctcatccgacgacgtatcaggtctgaagcaggtagcggccaaatacggcccaacatgggtggaagatgcaaacgtgggcttagtccaggaactgctatccgcctaccagaagtggcggatcttatccctccaaggagtctacaccaagatctccctgtccgagatccggcaacagaccacatccgccgagacaggccgcgccctctctaccgacgaagacgtcgagaccctccttcagtctatgatcatcacaggcatgctcaagggcgtgatacagaagaacgacgacgggacgaaatatctctccttcttcccccagtccctatccctctcagaacatgaattcgcacaagaactcgcaactacagcgcagaacctgaaagagttgggagaggttttcagagcgaccaatacgaggcttgcgacgtccaaggagtatgtcaagtggtgcgtcaaagaggagaagaagaatgaacagaatgctggggcgggcattgcgtatgatgaggaggatttgatgggtggtggtattgatccggatctttag

SEQ ID NO: 22993 - protein, 487 aa, Muscodor strobelii
  misc_feature: SGI Peptide ID NO. 567818
  misc_feature (1)..(481): NCBI GI: 39974333 Blast Desc: MGG_00687 [Magnaporthe grisea 70-15] gi|145018384|gb|EDK02663.1| MGG_00687 [Magnaporthe grisea 70-15]
  misc_feature (1)..(479): NCBI GI: 116179974 Blast Desc: CHGG_00615 [Chaetomium globosum CBS 148.51] gi|88184912|gb|EAQ92380.1| CHGG_00615 [Chaetomium globosum CBS 148.51]
  misc_feature (1)..(481): NCBI GI: 256731763 Blast Desc: NECHADRAFT_41236 [Nectria haematococca mpVI 77-13-4]
  misc_feature (1)..(481): NCBI GI: 46137313 Blast Desc: FG10172.1 [Gibberella zeae PH-1]
  misc_feature (1)..(481): NCBI GI: 164426262 Blast Desc: NCU01408 [Neurospora crassa OR74A] gi|166215189|sp|Q7S7G7.2|CSN3_NEUCR RecName: Full=COP9 signalosome complex subunit 3; Short=Signalosome subunit 3 to 3
  misc_feature (134)..(481): NCBI GI: 171691863 Blast Desc: protein product [Podospora anserina] gi|170945880|emb|CAP72681.1| protein product [Podospora anserina]
  misc_feature (1)..(470): NCBI GI: 154295411 Blast Desc: BC1G_13184 [Botryotinia fuckeliana B05.10] gi|150844052|gb|EDN19245.1| BC1G_13184 [Botryotinia fuckeliana B05.10]
  misc_feature (243)..(479): NCBI GI: 261351820 Blast Desc: conserved [Verticillium albo-atrum VaMs.102]
  misc_feature (56)..(487): NCBI GI: 254763265 Blast Desc: CSN3_EMENI RecName: Full=COP9 signalosome complex subunit 3; Short=Signalosome subunit 3 gi|259480049|tpe|CBF70827.1| TPA: COP9 signalosome complex 3 3)
  misc_feature (1)..(480): NCBI GI: 225559528 Blast Desc: conserved [Ajellomyces capsulatus G186AR]
MDQIANILLAFPPANGEVDLSSKEIYDNSLTLHKSRVFKLGRERNKDLVTHCVQLFDLLDPAVHSLSYAAILHALLVPSLPSSIPHDYILEKLVIFLMTFDGRQCRVIGPLLTEIITEIWSRTLLPPSVACEVLASYILRIDPTGTVLTDKHILLAKLAYQTNNIPPVLPIIDRNIVFYPGMTKSDTPHPMLSDPSLSPPLYIDKASGLTTNLKTPQVLEYDLLCGLIYCTQRDWTKARIAFERVVSFPSKDGGTSKIMVEAYKKWVLTSLLSLGSQSDTPPYVSNATSKSYNVLSRPYNTLASAFSSDDVSGLKQVAAKYGPTWVEDANVGLVQELLSAYQKWRILSLQGVYTKISLSEIRQQTTSAETGRALSTDEDVETLLQSMIITGMLKGVIQKNDDGTKYLSFFPQSLSLSEHEFAQELATTAQNLKELGEVFRATNTRLATSKEYVKWCVKEEKKNEQNAGAGIAYDEEDLMGGGIDPDL

SEQ ID NO: 22994 - DNA, 2257 bp, Muscodor strobelii
  misc_feature: SGI EST ID NO. CUFF.54062.0
  misc_feature: Variant of the nucleotide sequence at SEQ ID NO 22992
gtcgaggcagtcactccaacagctctccaaccacgcctacctcgcgtgcctctcagcctgatggataccgcactttctttcaacatgcgattttgactttctcacttccttccctctgcggcaacgtacagcgctgttctcacctttgggctaacaggggaccttggctttccttgtctcctcttgagcaccgactgaatcacaatatcggggccagctccgccgcgccgcccgcctcatcaccagttcctgttgcggtggatgctgctcaatcttggccgagagatcttcttttctagcatcgtggatatatcgtgactgcatatatcgtgaccgctcccgacggatcgggtagctagccaccatggatcagatagccaacatcctgctggcctttccgcctgctaacggcgaggtggacctgagcagcaaggagatctacgacaactccctcaccctccacaagtctcgcgtcttcaagttgggtagagaacggaataaagatttagtaacacattgcgtccaactcttcgacctgctcgaccccgccgtccactcgttatcctacgccgcgatcctccatgccttgctcgtccccagcctgccttcgagcataccgcacgactacatcctcgagaagctcgtcatcttcctcatgaccttcgacggccgccagtgccgcgtcatcgggcctttgctgacagagatcatcaccgagatctggtcccgtaccctgctgcccccttcggtcgcgtgcgaggtcctcgcctcctacatcctcagaatcgaccccacgggcaccgtgctcacggacaaacacatcctattagccaagctcgcataccaaaccaacaacatcccgcccgtcctccctataatcgacaggaacatcgtcttctaccccggcatgaccaagtccgacacaccccatcccatgctctctgacccctctcttagccctccgctctacatcgacaaagccagcggcctcacaacgaatctcaagaccccgcaagttctcgagtacgacctgctctgcggtctcatatactgcacacaacgagactggaccaaggcccggatcgcattcgagcgcgtcgtctctttcccttccaaggacggaggcacgagcaagatcatggtagaagcctacaagaaatgggttctcacctccctcctctccctcggctcacaatctgacaccccaccctacgtgagcaacgcgacctcgaaatcctacaacgtcctatcgcggccctacaacaccctcgcatccgccttctcatccgacgacgtatcaggtctgaagcaggtagcggccaaatacggcccaacatgggtggaagatgcaaacgtgggcttagtccaggaactgctatccgcctaccagaagtggcggatcttatccctccaaggagtctacaccaagatctccctgtccgagatccggcaacagaccacatccgccgagacaggccgcgccctctctaccgacgaagacgtcgagaccctccttcagtctatgatcatcacaggcatgctcaagggcgtgatacagaagaacgacgacgggacgaaatatctctccttcttcccccagtccctatccctctcagaacatgaattcgcacaagaactcgcaactacagcgcagaacctgaaagagttgggagaggttttcagagcgaccaatacgaggcttgcgacgtccaaggagtatgtcaagtggtgcgtcaaagaggagaagaagaatgaacagaatgctggggcgggcattgcgtatgatgaggaggatttgatgggtggtggtattgatccggatctttagaagggagccttggtcacaaccacctaagccagctggatccgagtggacgtgtggagaggcggtgaggacagagaaaaagatgctgagacgagacttctcacaagacgtctggagagagggaccgaggatgatggcgagtaaatcgtgcattatcatgaagcacagcacattgctggggcgcgacttggtgtcttaggcttactagccacgagcgtctggagaatagagttcctctaatgttctagagaggaacagaaaggagttgtacctagactggttatcatacctatggtatagatagagcgcagcagaacagacggaagacggctgtgtaaatacacggtcgaacatgataggaatgacaataaatacgagaacatgaaccactaggcattcttagtcttatagtgtgtttttccttaaattgaa

SEQ ID NO: 22995 - DNA, 1833 bp, Muscodor strobelii
  misc_feature: SGI cDNA ID NO. 567819
  misc_feature: Encodes the peptide sequence at SEQ ID NO 22996
atgtctctcgccagcgcccagacggccataagccagggctccttggatgccatcttcaacagccctaccaccgtccagctccagtggcctgttcccgtactgcagtgtctccagatcaaggccctagcttcaggcggaagcggccagcccgagcgataccgagtcgtcctgagcgatgtcaggaactacgtccagtgcatgttggccacacaggccaaccatgtcatccacgaggacaagctcgtccgaggttgcatcgtccgtgtcaagtcctaccaagccaatgaggtcaagggcaagaacatcttgatcatccttgaactcgacgtagccaccgagctcggcgttcacgaacgcatcggtgaacccgccgccttcgaggccaaggcagcacccgcacagcccgcaaacaacgccatagggggatctggcttctacggtgccaagcccgagccatctgctcagataaagtctgagcctatgccctcaagaatggccgccgcgccttccacccacggcggtgttgccatatccgcaatcgagtctctctccccttacgcacacaagtggaccatcaaggcccgcgtcacctccaaatcagaaatcaagcactggcacaaagcatcaggggagggcaaactattctcagtcaatttactcgacgagagtggtgagattaaggctacgggtttcaatgaccagtgtgatcaatactacgacctcttacaagaaggctctgtgtactatatcagcacttgccgagtcaacttggccaagaagcaattctcacaactgcccaacgactacgagctcacatttgagcgcgacacgacgattgagaaggcggaagatcaatccagtgtaccccaggtacgctacaactttgtcagtgtcgcggagcttcagaccgtcgagaaggatgcaactgtggatgttgttggtgtcctccagaacgttggcgacgtagagcagatcacggcaaagagcacaggcaagccctatgacaagcgcgagctcacaattgcagacgaatccatgttctcggttcgtcttacgatatgggggaagacagccacaaatttcagcggcgaaccagagtccgttgttgcattcaagggtgtcaaggtgtctgactttggtggacgctcactttccctcctttcctccggcaccatggcagtaaacccagatattgaagaggctcatcgactgaagggctggtacgactcccaaggtcgcaccgaaaatttcaacacacataactccatggcttctatgggagccgccaccggacgcaagaaccagacaaagtgcattcaagaagtcaaggaccagaacctaggcatgggcgagaacccagagtacttcgatctgaaagccactatagtctacatcaagcaagacaacttcgcctatcccgcctgcagcagcgagaactgcaacaagaaggtcatagaccagggtgacggtacctggcggtgcgagaagtgcgacattgcgcacccgaggccgcaatggcgatacatcatgagcgtgaacgttaacgatcacacgggccagatgtggctgagctgttttgacgacgtcggccaaatcgtcatggggatgacggctgatgagctgacggagattaaggagagcaacgaggataggctaagcgcggtgtttgaggcggcgaactgcagcaagttgagctttaggtgtagggcgaagatggatacttatggtgagaatcagagagttcgatatcaggttcttagtgcgaaccaattgaacttcaaggacgaggctacgaagttggcggatatgattaagtcattcggcatcaactga

SEQ ID NO: 22996 - protein, 610 aa, Muscodor strobelii
  misc_feature: SGI Peptide ID NO. 567819
  misc_feature (190)..(272): Pfam Id: PF01336 Pfam Desc: OB-fold nucleic acid binding domain
  misc_feature (9)..(113): Pfam Id: PF04057 Pfam Desc: Replication factor-A protein 1, N-terminal domain
  misc_feature (455)..(600): Pfam Id: PF08646 Pfam Desc: Replication factor-A C terminal domain
  misc_feature (10)..(607): NCBI GI: 85102469 Blast Desc: replication factor-A protein 1 [Neurospora crassa OR74A] gi|18376393|emb|CAD21282.1| single-stranded DNA-binding protein 68k chain [Neurospora crassa] gi|28922877|gb|EAA32097.1|
  misc_feature (5)..(609): NCBI GI: 39974337 Blast Desc: MGG_00685 [Magnaporthe grisea 70-15] gi|145018386|gb|EDK02665.1| MGG_00685 [Magnaporthe grisea 70-15]
  misc_feature (5)..(607): NCBI GI: 46137213 Blast Desc: FG10122.1 [Gibberella zeae PH-1]
  misc_feature (6)..(609): NCBI GI: 171691865 Blast Desc: protein product [Podospora anserina] gi|170945881|emb|CAP72682.1| protein product [Podospora anserina]
  misc_feature (5)..(607): NCBI GI: 256731786 Blast Desc: [Nectria haematococca mpVI 77-13-4]
  misc_feature (4)..(545): NCBI GI: 261351821 Blast Desc: replication factor-A protein [Verticillium albo-atrum VaMs.102]
  misc_feature (10)..(609): NCBI GI: 212528756 Blast Desc: replication protein A 70 kDa DNA-binding subunit [Penicillium marneffei ATCC 18224] gi|210073933|gb|EEA28020.1| replication protein A 70 kDa DNA-binding subunit [Penicillium
  misc_feature (1)..(610): NCBI GI: 156048933 Blast Desc: SS1G_08173 [Sclerotinia sclerotiorum 1980] gi|154692572|gb|EDN92310.1| SS1G_08173 [Sclerotinia sclerotiorum 1980]
  misc_feature (37)..(609): NCBI GI: 242765554 Blast Desc: replication protein A 70 kDa DNA-binding subunit [Talaromyces stipitatus ATCC 10500] gi|218724194|gb|EED23611.1| replication protein A 70 kDa DNA-binding subunit [Talaromyces
  misc_feature (6)..(580): NCBI GI: 116179976 Blast Desc: CHGG_00616 [Chaetomium globosum CBS 148.51] gi|88184913|gb|EAQ92381.1| CHGG_00616 [Chaetomium globosum CBS 148.51]
MSLASAQTAISQGSLDAIFNSPTTVQLQWPVPVLQCLQIKALASGGSGQPERYRVVLSDVRNYVQCMLATQANHVIHEDKLVRGCIVRVKSYQANEVKGKNILIILELDVATELGVHERIGEPAAFEAKAAPAQPANNAIGGSGFYGAKPEPSAQIKSEPMPSRMAAAPSTHGGVAISAIESLSPYAHKWTIKARVTSKSEIKHWHKASGEGKLFSVNLLDESGEIKATGFNDQCDQYYDLLQEGSVYYISTCRVNLAKKQFSQLPNDYELTFERDTTIEKAEDQSSVPQVRYNFVSVAELQTVEKDATVDVVGVLQNVGDVEQITAKSTGKPYDKRELTIADESMFSVRLTIWGKTATNFSGEPESVVAFKGVKVSDFGGRSLSLLSSGTMAVNPDIEEAHRLKGWYDSQGRTENFNTHNSMASMGAATGRKNQTKCIQEVKDQNLGMGENPEYFDLKATIVYIKQDNFAYPACSSENCNKKVIDQGDGTWRCEKCDIAHPRPQWRYIMSVNVNDHTGQMWLSCFDDVGQIVMGMTADELTEIKESNEDRLSAVFEAANCSKLSFRCRAKMDTYGENQRVRYQVLSANQLNFKDEATKLADMIKSFGIN

SEQ ID NO: 22997 - DNA, 2581 bp, Muscodor strobelii
  misc_feature: SGI EST ID NO. CUFF.54066.0
  misc_feature: Variant of the nucleotide sequence at SEQ ID NO 22995
caggaggttgctgttgcctccgacacagtggttcatggtggcggggcaggaaccatgggcatctccacctcgcccccaaaacgggaagtttaatgaggagtcgcctatcgacgccagtgacgcgacttttcgcagcccgacgcgtccgacaccaacatcccaccaacaatctcgccaacaaccaactggtacgcctcctctacgccgcagcccgtggatttggagagaggtccatcccagaccttacaacaccgtacacccacctactaattgtcactttgtcggtgttcgaaacctctgcttgttcctgctgaatcacgaccaacacatcaccatgtctctcgccagcgcccagacggccataagccagggctccttggatgccatcttcaacagccctaccaccgtccagctccagtggcctgttcccgtactgcagtgtctccagatcaaggccctagcttcaggcggaagcggccagcccgagcgataccgagtcgtcctgagcgatgtcaggaactacgtccagtgcatgttggccacacaggccaaccatgtcatccacgaggacaagctcgtccgaggttgcatcgtccgtgtcaagtcctaccaagccaatgaggtcaagggcaagaacatcttgatcatccttgaactcgacgtagccaccgagctcggcgttcacgaacgcatcggtgaacccgccgccttcgaggccaaggcagcacccgcacagcccgcaaacaacgccatagggggatctggcttctacggtgccaagcccgagccatctgctcagataaagtctgagcctatgccctcaagaatggccgccgcgccttccacccacggcggtgttgccatatccgcaatcgagtctctctccccttacgcacacaagtggaccatcaaggcccgcgtcacctccaaatcagaaatcaagcactggcacaaagcatcaggggagggcaaactattctcagtcaatttactcgacgagagtggtgagattaaggctacgggtttcaatgaccagtgtgatcaatactacgacctcttacaagaaggctctgtgtactatatcagcacttgccgagtcaacttggccaagaagcaattctcacaactgcccaacgactacgagctcacatttgagcgcgacacgacgattgagaaggcggaagatcaatccagtgtaccccaggtacgctacaactttgtcagtgtcgcggagcttcagaccgtcgagaaggatgcaactgtggatgttgttggtgtcctccagaacgttggcgacgtagagcagatcacggcaaagagcacaggcaagccctatgacaagcgcgagctcacaattgcagacgaatccatgttctcggttcgtcttacgatatgggggaagacagccacaaatttcagcggcgaaccagagtccgttgttgcattcaagggtgtcaaggtgtctgactttggtggacgctcactttccctcctttcctccggcaccatggcagtaaacccagatattgaagaggctcatcgactgaagggctggtacgactcccaaggtcgcaccgaaaatttcaacacacataactccatggcttctatgggagccgccaccggacgcaagaaccagacaaagtgcattcaagaagtcaaggaccagaacctaggcatgggcgagaacccagagtacttcgatctgaaagccactatagtctacatcaagcaagacaacttcgcctatcccgcctgcagcagcgagaactgcaacaagaaggtcatagaccagggtgacggtacctggcggtgcgagaagtgcgacattgcgcacccgaggccgcaatggcgatacatcatgagcgtgaacgttaacgatcacacgggccagatgtggctgagctgttttgacgacgtcggccaaatcgtcatggggatgacggctgatgagctgacggagattaaggagagcaacgaggataggctaagcgcggtgtttgaggcggcgaactgcagcaagttgagctttaggtgtagggcgaagatggatacttatggtgagaatcagagagttcgatatcaggttcttagtgcgaaccaattgaacttcaaggacgaggctacgaagttggcggatatgattaagtcattcggcatcaactgagcattatgggatctcgggactatgagtctatagatcacttggccttgctgcgcaccgtgctatggccatgagctgtttgtgagcgtgatgtacagaagttatcctcctagagcctcatacattgatgatgtaggagagacttagggagatattgagttgctatgcaaaaatgaggatgtggttatacttaatccttctgtacacaacggagaaaaaaggattgcgctggtatatggatcagcatcggcgataggctgtacattgcatctgagaaaggggcaaattctgcgaactgttgccccaaggtattcgaaatactctgcaggcaaacagataataataagttaaaaacattgaggacatatgtcaaagaaattcactcgtggaccgtgaggtatctaagtatttctcatg

SEQ ID NO: 22998 - DNA, 972 bp, Muscodor strobelii
  misc_feature: SGI cDNA ID NO. 567820
  misc_feature: Elevated expression when VOC is produced
  misc_feature: Encodes the peptide sequence at SEQ ID NO 22999
atggctgacgcagatgttgcgaccaaggctcccgagagcgatgctcaggaggacacttctgccaatgatggccccgtcttgagcgagcactgcaccactgatcgcccaactccggatggcgaagctccgaaaggagaagtcagaaagctcggcggcatcgatgtttacctcagcaaacccgactcttacccttccaacccgtccaaactgctcctcctcttgaccggcggtactggcctcaagtcaaccaacaatcagctccaagccgacaagttcgcaagcgaaggtttcgtcaccgtcatgcccgacctcttcgaaggcgaccctgcacccaattctaagacgatggtcgacgagtcccaagactcttctttgatcggcacattcaagctcaaagctgccgaaaccgcaaagagcttcttactcgatatgtggcttgcccgtcacacggaagagaagatcatgcccatacttgacaaagtcatacatggctgcgagggcgaattcgccgacgctgtcggcaacgggggcggtatctacgcggttggatactgtaccggtggacgatacatcctcctactcgctagtgaacgcccagtcaaccaaacgagttggaccggcgcacagaagcaggccgacgaggaagctggcgaggctcagggtcctacgaagaaaggtccgtctatcaaggctggtgcggttgcacatgccacacttgtctcgccggatgacttccagtatctgaaggcgcctgtcagtctggtctgtgttgagaacgatcccatgtttcccgatgatgtgcggactaagggcgaggacgccatgtcgaaaggcaatttggagcatgaggttcaagtttatcctggagtccctcatgggttcgctgtgattggtgattatgaggatgcgaatatcaaggaggcgcagatcacggcttatgagcagatgctgaagtggttgaaggagcattag

SEQ ID NO: 22999 - protein, 323 aa, Muscodor strobelii
  misc_feature: SGI Peptide ID NO. 567820
  misc_feature (53)..(323): Pfam Id: PF01738 Pfam Desc: Dienelactone hydrolase family
  misc_feature (258)..(295): Pfam Id: PF01738 Pfam Desc: Dienelactone hydrolase family
  misc_feature (5)..(323): NCBI GI: 145611042 Blast Desc: MGG_00686 [Magnaporthe grisea 70-15] gi|145018385|gb|EDK02664.1| MGG_00686 [Magnaporthe grisea 70-15]
  misc_feature (1)..(323): NCBI GI: 46137215 Blast Desc: FG10123.1 [Gibberella zeae PH-1]
  misc_feature (1)..(323): NCBI GI: 28949990 Blast Desc: conserved [Neurospora crassa]
  misc_feature (1)..(323): NCBI GI: 169600093 Blast Desc: SNOG_02876 [Phaeosphaeria nodorum SN15] gi|111068487|gb|EAT89607.1| SNOG_02876 [Phaeosphaeria nodorum SN15]
  misc_feature (5)..(323): NCBI GI: 156048935 Blast Desc: SS1G_08174 [Sclerotinia sclerotiorum 1980] gi|154692573|gb|EDN92311.1| SS1G_08174 [Sclerotinia sclerotiorum 1980]
  misc_feature (5)..(323): NCBI GI: 154295415 Blast Desc: BC1G_13186 [Botryotinia fuckeliana B05.10] gi|150844054|gb|EDN19247.1| BC1G_13186 [Botryotinia fuckeliana B05.10]
  misc_feature (1)..(292): NCBI GI: 261351822 Blast Desc: dienelactone hydrolase family protein [Verticillium albo-atrum VaMs.102]
  misc_feature (1)..(296): NCBI GI: 116179910 Blast Desc: CHGG_00583 [Chaetomium globosum CBS 148.51] gi|88184880|gb|EAQ92348.1| CHGG_00583 [Chaetomium globosum CBS 148.51]
  misc_feature (1)..(323): NCBI GI: 189211425 Blast Desc: conserved [Pyrenophora tritici-repentis Pt-1C-BFP] gi|187978136|gb|EDU44762.1| conserved [Pyrenophora tritici-repentis Pt-1C-BFP]
  misc_feature (101)..(323): NCBI GI: 171691807 Blast Desc: protein product [Podospora anserina] gi|170945852|emb|CAP72653.1| protein product [Podospora anserina]
  misc_feature: Useful for introducing or modulating the production of volatile compounds
MADADVATKAPESDAQEDTSANDGPVLSEHCTTDRPTPDGEAPKGEVRKLGGIDVYLSKPDSYPSNPSKLLLLLTGGTGLKSTNNQLQADKFASEGFVTVMPDLFEGDPAPNSKTMVDESQDSSLIGTFKLKAAETAKSFLLDMWLARHTEEKIMPILDKVIHGCEGEFADAVGNGGGIYAVGYCTGGRYILLLASERPVNQTSWTGAQKQADEEAGEAQGPTKKGPSIKAGAVAHATLVSPDDFQYLKAPVSLVCVENDPMFPDDVRTKGEDAMSKGNLEHEVQVYPGVPHGFAVIGDYEDANIKEAQITAYEQMLKWLKEH

SEQ ID NO: 23000 - DNA, 3252 bp, Muscodor strobelii
  misc_feature: SGI EST ID NO. CUFF.54346.0
  misc_feature: Variant of the nucleotide sequence at SEQ ID NO 22998
ctccatctatctacaatttcataacagcaggcacacaataatgtgctgcttgtaaggtgcttcctagtctgaactttgaaggcgcatgcttgtgagacaagtattagatgtcgcatgtccttttagctcccagaccccacgaaggatctggccaagctggggtacgtcatgccccgcagctcactgtaagctgcgttacagctctcatcaatgctgcagctcgcaacattcgacctgtcttgcctgtgaaacgacacaaggcagcacctttccttagaaggcattgtcacagcttcctcttggattcaatatcgttcattacctgcacatttgtgaaactgagacccgaactcagctattatcatccgcgtctcatccatctaccccgcatcgcgagattcatcaaacatcaacatggctgacgcagatgttgcgaccaaggctcccgagagcgatgctcaggaggacacttctgccaatgatggccccgtcttgagcgagcactgcaccactgatcgcccaactccggatggcgaagctccgaaaggagaagtcagaaagctcggcggcatcgatgtttacctcagcaaacccgactcttacccttccaacccgtccaaactgctcctcctcttgaccggcggtactggcctcaagtcaaccaacaatcagctccaagccgacaagttcgcaagcgaaggtttcgtcaccgtcatgcccgacctcttcgaaggcgaccctgcacccaattctaagacgatggtcgacgagtcccaagactcttctttgatcggcacattcaagctcaaagctgccgaaaccgcaaagagcttcttactcgatatgtggcttgcccgtcacacggaagagaagatcatgcccatacttgacaaagtcatacatggctgcgagggcgaattcgccgacgctgtcggcaacgggggcggtatctacgcggttggatactgtaccggtggacgatacatcctcctactcgctagtgaacgcccagtcaaccaaacgagttggaccggcgcacagaagcaggccgacgaggaagctggcgaggctcagggtcctacgaagaaaggtccgtctatcaaggctggtgcggttgcacatgccacacttgtctcgccggatgacttccagtatctgaaggcgcctgtcagtctggtctgtgttgagaacgatcccatgtttcccgatgatgtgcggactaagggcgaggacgccatgtcgaaaggcaatttggagcatgaggttcaagtttatcctggagtccctcatgggttcgctgtgattggtgattatgaggatgcgaatatcaaggaggcgcagatcacggcttatgagcagatgctgaagtggttgaaggagcattagcgagtcacgtctagggatatggtagggatggcgttgctatggcgttttgtgtctttgtgtagtgttttcactgtcagtgttaggaatgtgcgatccgcacctacacgtacctaggtcctctcagacgaaaggatgtggtatatgcaaagtctcaataaacttcttattcactcatcctacgtatatataactccctattccaaaggaatcgtacaaacaatcttccccatcgtagtattccccgcgagcaaagcctgcgccttctggatctccgtccaatcaaacacagtgtcaacactgacctttagcttaccactctcgaaatccggcatgtactctcctaatttatctctcagttttccctgatactccaaatccctacttcgtaacgtagatccttcgattcgaattcttttgtagagtaaagcaccgatatccacgtcgttgagcttcgatccacccatgagaccttgtattacccatcggccatctcgcgcgattactgagaggttggatgggaagtaggttgcgccgacgtagtccattattatatcgactcctttgttgttcgtcatctttagaatctcggcggcccaatcggtcgtcttgtagttgaaacacttcttcgcgccgagggactctacatatcgacatttttcgtccgtccctgcagtggcgtacacctctgacgcgccggagtcaagactcaactgcaatcctgcgagggaaacactagatgcgccggcgtgccagagcacggaatcgccggacttgaaggatccgattaggtggagggcttgagtggctgtcatgaatacctctgggatacccgcgcagacttcccaggatagggatgagggcttggggagaagcattaggggcgagacggcgatgtattcggcgtaggcgccgccgtaggctaggccgaagacttcttggttttcggtgaagttggtggatgttgagggcccgatggagactatgatgccgctgaattctacgcccagggttttggaggcttggggtgggagggggtattttcctgttttgcgtgttagtatgagattgtttgttgaaattgaggtagatgagtgtatgtttcctagtgttttgttcgttaactcgaaatgtgtaggaaatgcttgcgcatcaaactctcttctcgtatataattgatgtttatacagttaggtatacacagtcgtagatgagtgaatgttggcatgaaaatgatagtgcaatattcgtgagaggcaggaagatctgagataccttcgcgttgatataagtccatgcgattgagaccgaaggctttcactcggacgagcacttcgccctctttgggcactggcttgggcgtggcatcgttgataaacagagcctcaatggggccagtgccattttttatgtctgtttgaggatgttattcatgagttctcatctaattgtgctcacaggcggcgatgagattgacgacgacgatgagatcatgtaactcacgttaccgaagtggggttgatgagtatggtgaacttaccgacagctttcataacctcgcccatattgaaacagctgtataactctctctcaggccgttgggggagtgagtatcacgataacaagtgaattgattgatgtgatgacgtcgaggtagcgttggctttatactgctaatagccttccatatacgtcgacgatatgattatcaagcaatgcacgagtatgccctagcttgtgaaactagcaaattcgtagctatcggtaggtctcgccaatggatcccgcgggtaacattgacgtcgtttgaactccgtcattccccgctccgagtcggattatgttgtcccgggattcggacagtttttc

SEQ ID NO: 23001 - DNA, 1011 bp, Muscodor strobelii
  misc_feature: SGI cDNA ID NO. 567821
  misc_feature: Reduced expression when VOC is produced
  misc_feature: Encodes the peptide sequence at SEQ ID NO 23002
atgggcgaggttatgaaagctgtcgacataaaaaatggcactggccccattgaggctctgtttatcaacgatgccacgcccaagccagtgcccaaagagggcgaagtgctcgtccgagtgaaagccttcggtctcaatcgcatggacttatatcaacgcgaaggaaaataccccctcccaccccaagcctccaaaaccctgggcgtagaattcagcggcatcatagtctccatcgggccctcaacatccaccaacttcaccgaaaaccaagaagtcttcggcctagcctacggcggcgcctacgccgaatacatcgccgtctcgcccctaatgcttctccccaagccctcatccctatcctgggaagtctgcgcgggtatcccagaggtattcatgacagccactcaagccctccacctaatcggatccttcaagtccggcgattccgtgctctggcacgccggcgcatctagtgtttccctcgcaggattgcagttgagtcttgactccggcgcgtcagaggtgtacgccactgcagggacggacgaaaaatgtcgatatgtagagtccctcggcgcgaagaagtgtttcaactacaagacgaccgattgggccgccgagattctaaagatgacgaacaacaaaggagtcgatataataatggactacgtcggcgcaacctacttcccatccaacctctcagtaatcgcgcgagatggccgatgggtaatacaaggtctcatgggtggatcgaagctcaacgacgtggatatcggtgctttactctacaaaagaattcgaatcgaaggatctacgttacgaagtagggatttggagtatcagggaaaactgagagataaattaggagagtacatgccggatttcgagagtggtaagctaaaggtcagtgttgacactgtgtttgattggacggagatccagaaggcgcaggctttgctcgcggggaatactacgatggggaagattgtttgtacgattcctttggaatag

SEQ ID NO: 23002 - protein, 336 aa, Muscodor strobelii
  misc_feature: SGI Peptide ID NO. 567821
  misc_feature (33)..(115): Pfam Id: PF08240 Pfam Desc: Alcohol dehydrogenase GroES-like domain
  misc_feature (146)..(297): Pfam Id: PF00107 Pfam Desc: Zinc-binding dehydrogenase
  misc_feature (33)..(81): Pfam Id: PF08240 Pfam Desc: Alcohol dehydrogenase GroES-like domain
  misc_feature (1)..(333): NCBI GI: 46137217 Blast Desc: FG10124.1 [Gibberella zeae PH-1]
  misc_feature (1)..(333): NCBI GI: 154291314 Blast Desc: BC1G_15304 [Botryotinia fuckeliana B05.10] gi|150846996|gb|EDN22189.1| BC1G_15304 [Botryotinia fuckeliana B05.10]
  misc_feature (1)..(333): NCBI GI: 156059638 Blast Desc: SS1G_03831 [Sclerotinia sclerotiorum 1980] gi|154701618|gb|EDO01357.1| SS1G_03831 [Sclerotinia sclerotiorum 1980]
  misc_feature (1)..(334): NCBI GI: 39974231 Blast Desc: MGG_00738 [Magnaporthe grisea 70-15] gi|145018329|gb|EDK02608.1| MGG_00738 [Magnaporthe grisea 70-15]
  misc_feature (3)..(333): NCBI GI: 85098921 Blast Desc: NCU01419 [Neurospora crassa OR74A] gi|28922203|gb|EAA31451.1| NCU01419 [Neurospora crassa OR74A] gi|28949991|emb|CAD70876.1| NADPH quinone oxidoreductase homolog
  misc_feature (13)..(333): NCBI GI: 261351823 Blast Desc: quinone oxidoreductase [Verticillium albo-atrum VaMs.102]
  misc_feature (1)..(333): NCBI GI: 145234510 Blast Desc: An02g14970 [Aspergillus niger] gi|134057573|emb|CAK37983.1| protein product [Aspergillus niger]
  misc_feature (5)..(333): NCBI GI: 145245173 Blast Desc: An11g08950 [Aspergillus niger] gi|134079551|emb|CAK97027.1| protein product [Aspergillus niger]
  misc_feature (3)..(333): NCBI GI: 115433552 Blast Desc: conserved [Aspergillus terreus NIH2624] gi|114189765|gb|EAU31465.1| conserved [Aspergillus terreus NIH2624]
  misc_feature (3)..(333): NCBI GI: 156064545 Blast Desc: SS1G_00280 [Sclerotinia sclerotiorum 1980] gi|154691142|gb|EDN90880.1| SS1G_00280 [Sclerotinia sclerotiorum 1980]
  misc_feature (3)..(279): SWISSPROT Homolog: EC 1.6.5.5 NADPH:quinone reductase
  misc_feature: Useful for introducing or modulating the production of volatile compounds
MGEVMKAVDIKNGTGPIEALFINDATPKPVPKEGEVLVRVKAFGLNRMDLYQREGKYPLPPQASKTLGVEFSGIIVSIGPSTSTNFTENQEVFGLAYGGAYAEYIAVSPLMLLPKPSSLSWEVCAGIPEVFMTATQALHLIGSFKSGDSVLWHAGASSVSLAGLQLSLDSGASEVYATAGTDEKCRYVESLGAKKCFNYKTTDWAAEILKMTNNKGVDIIMDYVGATYFPSNLSVIARDGRWVIQGLMGGSKLNDVDIGALLYKRIRIEGSTLRSRDLEYQGKLRDKLGEYMPDFESGKLKVSVDTVFDWTEIQKAQALLAGNTTMGKIVCTIPLE

SEQ ID NO: 23003 - DNA, 2954 bp, Muscodor strobelii
  misc_feature: SGI EST ID NO. CUFF.54347.1
  misc_feature: Variant of the nucleotide sequence at SEQ ID NO 23001
gaaaaactgtccgaatcccgggacaacataatccgactcggagcggggaatgacggagttcaaacgacgtcaatgttacccgcgggatccattggcgagacctaccgatagctacgaatttgctagtttcacaagctagggcatactcgtgcattgcttgataatcatatcgtcgacgtatatggaaggctattagcagtataaagccaacgctacctcgacgtcatcacatcaatcaattcacttgttatcgtgatactcactcccccaacggcctgagagagagttatacagctgtttcaatatgggcgaggttatgaaagctgtcgacataaaaaatggcactggccccattgaggctctgtttatcaacgatgccacgcccaagccagtgcccaaagagggcgaagtgctcgtccgagtgaaagccttcggtctcaatcgcatggacttatatcaacgcgaaggaaaataccccctcccaccccaagcctccaaaaccctgggcgtagaattcagcggcatcatagtctccatcgggccctcaacatccaccaacttcaccgaaaaccaagaagtcttcggcctagcctacggcggcgcctacgccgaatacatcgccgtctcgcccctaatgcttctccccaagccctcatccctatcctgggaagtctgcgcgggtatcccagaggtattcatgacagccactcaagccctccacctaatcggatccttcaagtccggcgattccgtgctctggcacgccggcgcatctagtgtttccctcgcaggattgcagttgagtcttgactccggcgcgtcagaggtgtacgccactgcagggacggacgaaaaatgtcgatatgtagagtccctcggcgcgaagaagtgtttcaactacaagacgaccgattgggccgccgagattctaaagatgacgaacaacaaaggagtcgatataataatggactacgtcggcgcaacctacttcccatccaacctctcagtaatcgcgcgagatggccgatgggtaatacaaggtctcatgggtggatcgaagctcaacgacgtggatatcggtgctttactctacaaaagaattcgaatcgaaggatctacgttacgaagtagggatttggagtatcagggaaaactgagagataaattaggagagtacatgccggatttcgagagtggtaagctaaaggtcagtgttgacactgtgtttgattggacggagatccagaaggcgcaggctttgctcgcggggaatactacgatggggaagattgtttgtacgattcctttggaatagggagttatatatacgtaggatgagtgaataagaagtttattgagactttgcatataccacatcctttcgtctgagaggacctaggtacgtgtaggtgcggatcgcacattcctaacactgacagtgaaaacactacacaaagacacaaaacgccatagcaacgccatccctaccatatccctagacgtgactcgctaatgctccttcaaccacttcagcatctgctcataagccgtgatctgcgcctccttgatattcgcatcctcataatcaccaatcacagcgaacccatgagggactccaggataaacttgaacctcatgctccaaattgcctttcgacatggcgtcctcgcccttagtccgcacatcatcgggaaacatgggatcgttctcaacacagaccagactgacaggcgccttcagatactggaagtcatccggcgagacaagtgtggcatgtgcaaccgcaccagccttgatagacggacctttcttcgtaggaccctgagcctcgccagcttcctcgtcggcctgcttctgtgcgccggtccaactcgtttggttgactgggcgttcactagcgagtaggaggatgtatcgtccaccggtacagtatccaaccgcgtagataccgcccccgttgccgacagcgtcggcgaattcgccctcgcagccatgtatgactttgtcaagtatgggcatgatcttctcttccgtgtgacgggcaagccacatatcgagtaagaagctctttgcggtttcggcagctttgagcttgaatgtgccgatcaaagaagagtcttgggactcgtcgaccatcgtcttagaattgggtgcagggtcgccttcgaagaggtcgggcatgacggtgacgaaaccttcgcttgcgaacttgtcggcttggagctgattgttggttgacttgaggccagtaccgccggtcaagaggaggagcagtttggacgggttggaagggtaagagtcgggtttgctgaggtaaacatcgatgccgccgagctttctgacttctcctttcggagcttcgccatccgcttaatggtcttattagttaggtcaaaaagagagatgattagcgagactcatgacatacgagttgggcgatcagtggtgcagtgctcgctcaagacggggccatcattggcagaagtgtcctcctgagcatcgctctcgggagccttggtcgcaacatctgcgtcagccatgttgatgtttgatgaatctcgcgatgcggggtagatggatgagacgcggatgataatagctgagttcgggtctcagtttcacaaatgtgcaggtaatgaacgatattgaatccaagaggaagctgtgacaatgccttctaaggaaaggtgctgccttgtgtcgtttcacaggcaagacaggtcgaatgttgcgagctgcagcattgatgagagctgtaacgcagcttacagtgagctgcggggcatgacgtaccccagcttggccagatccttcgtggggtctgggagctaaaaggacatgcgacatctaatacttgtctcacaagcatgcgccttcaaagttcagactaggaagcaccttacaagcagcacattattgtgtgcctgctgttatgaaattgtagatagatggag

SEQ ID NO: 23004 - DNA, 4431 bp, Muscodor strobelii
  misc_feature: SGI cDNA ID NO. 567822
  misc_feature: Encodes the peptide sequence at SEQ ID NO 23005
atggcgccaagaccgggctgcacagaatatacgaccggctggatatgtgctttaccgttggagctagcagccgggaaagcgatgctagacgagatctatgaagcaccgaccatcgatctcgaagacagtaacgcttatgtcttcggtaagatgggtgagcacaaggtcgtaatggcatgtctggcaagctatggactcgcagatgcagctacagtagcgagccatatgaatcggagttttccttctctacagctgcgattcatgatcggtatcggaggcggggtttcaggtgtacttacaggaggatctgatattcggcttggtgacgtcgtaatcggtaagagagtcgaacagtatgatctcggaaagaccaccgcgggaggggaatttagacgaatgaccaagtctaatactctcccacataaccttgaaacggcggttcaagtactccgggctcatcacgagacaaacgcgagccgaattccattcttcatcgagcaagcacgtttcccgcccggttttgcccacccaggtgacggcgaagatctcctctttcccgctacctatgatcatgaggatggtcaactctcgtgcgagaattgcgaccgtgctcaactagttgcaaggcagtctaggccgagccgggaccccattctgcattacggcgggatagcgtctgcgaatcaagttatgaaaaacgccagtacaagagaccggctagcttcagagctggatgtagtgtgcttcgagatggaagctgcaggcttcataagtcattttccatgtctcgtagttcgcggcatatgtgactactcggactcgcataaaatgaaaggatggcaacgatatgcggctgcgactgcttcggcttacgctaaagagctgattcattacacacctcggcggtcgatgaagcgaaagcgagactcaacagtcgagatccagagtaaagaacacgagcagtgcttagccgatttgcgagtttcagagcctcgcgatgacaaagctcgaattgaacaaaccaagggaggcttgttaaaggacgcgtataagtggattctaaacaatcctcaatttcaaaaatggcaagaaggcaccaacataccatcatcatcacccacgcagcttgaacaactaagcgatactcaaaatcgcttgctctggatcggaggtaacgcagggaaaggcaagactatgcttgcttgcggactcatcgacgagttgagcaaaaacggcgagttcggcgttcatttcttcttctgccaagccaccgacgtgcgattcaactatgcaaccagtgtgatccgtggtcttatgtaccagctcgtcagtcgacagcctctcctcatgaaacacctcatggaaagataccgcaatgatggcaaggaactattcgaaggtgtaaattcttggatggcgttgacagacatactttctcagatgcttcatgagcctgagggacctccaatcatcatgatagttgatgcacttgatgaatgtatcgaccctccacaacttgcccaattcataattggttcacaaaggtcatctcgagttaaatggattgtcacgagccgcaactcaccaagtgttaccgaattcttcgccttatccagtgatcatacccatttaagcctcgaactcaatgaaagctctattggcaaagcagtaagcttttatatccagcaacgagtgaatgagctggccatgatgaaaaagtacgatctcgagctgaagctagccgtggaaaactacctttccagtcatgcacaagatacatttctctgggtcgctttagtctgcgcaaatctgagaagatacggtggcgtaacttataagagcgtaacgcgcagactgaacgacttcccgcccggcctggactctctctatcatagcatgttcatgcaaataggtgaagatatggatgatggggctctttgccggcaaatccttgcgaaggcagtagcagcggagcgacccctggctgtagaggagctttgtagccttctagaatacccaacccctggcgattacaatagccccagcgatatcgagaatctcatcccatactgtggttgttgtttgatacaacgccaaggagtcgtttattttgtacatcaatctgccaaagaatactttttaaagacggcgacaacagctgtttttccgggaggtatctcgcaagcacacagagctcttttcttgcgctctgttgagctgctaaaatctacacttcgtcgcgatatttataatctcaacgggacggatattgagaacagaactcttgcgccaccacaaccagatcccctcgctaccgtacgatattcaactgtgtactggatccaccatctcaatgtctaccttgagattagatcagatggtgagctcgatagcgctataatcgagatgattgaaacgaaatatctgtattggatcgaagccctgggccttttgaagagcattccggttgcaatacatcaattgttagagctatccagccacttgacttctacctctcgcgccggtctattgacccgcgctgccctccagttcttgagatattttggagttggcatcgaggccgatcctctgcaatcatacttgtcagccttgaccttcagtcccaaagacagcgagatacggcgcttgttcgagaaagaagtaccgaaatgggtagaggtcagaccagacacggagttacggtggcccgagcacacacagacgctggccggccacgatagcagattaagagctatgtcctccgatgtcagcggtaaagtgcttatgacagtgtcggagcttgggagagtgactatatatgactcgacaacaggggcgtacctatcatcatttgagaatagaggcgattccaaagtggtgatggccacatttactcctgatggatgcgttgtggcattgggcttgacagacaacagcatagaaatctgggagatgacgggtggaagacacgtgaaatcgttcagcggctgtgaccaagactgggagatggacagccggtgcttcgccattgcgccagacggtcatcgaatagcggcgagagtgcgagggactcgagtgtctcataacttgaaccgtctcgtctacgtcggagaagttgcgactggtgcgcgtttgggtgtcttggagggacatactgcagacatcaattgcatcgtatatatatctgacagcagaattgtatcaggatctgcggaccactcgtgcaaactatggaatgcacatgatggtacgtgtctgcgaacgttcttaggccattcgtgggccatcaaatccattgcctcggtcctgaatggacggatattcgcgtcttgggacatcggcaacacagtgaacgtctgggaaatagaccaaggcggtttgtggagcacattcaagtgtacctggtccatacataacgctttggcattgtcaacagaccagcgtcgattggctatcaccactcacgatgaaagtagaaaaagaggtttcgtcgagttacgggacgtggcgactggtataactacccgaaaattttcgttgacgcctatggttgatacaatcgcctttactgcggatgaccggtgccttgctatagggctacaatctcgcaacattcaggtttgggatatctcaacctcgaaggagcttgaggcacaaaaggagaagggggaagaggagagacgatttggagggtttgtgtcaggtggccaagggtgggtatcttacacaggaagcagcttgaagctcattgacacagcaacgagagtatgccgaaaagagctgaaccttttggaacttaaaggacccaccctagcaccgaatggaaagtggttagctacttttactgggagtcttgaggtcgaagtctggtgtctagccacattagaaaaacagcgcacgcttgtattcgacgggaaatacattagctcgattgcgtggtcgccagacggccaacaactagccatcgtgatgagccgcagtcatagttttgacattgtgcttgctctagtgtgggagacgccatcaaagacacgagagttaaacggccacgaggaatttataggtccagcagtattctcccaggacggacggaggctagcatcaacatcacatgattctactatcaagatttgggacattaacaggggtgtgtgcatccacacactcgatggctatagaaatggcgggggccttgcgtcccttgctttttctcaagatggacaatctctcgtatcggctcatccatggggcggacaaaaagtctggactgcggttggcgacgagatgcagatcgttctcgatgatgttatagaaaagtgcgtcggtctggaaagaatggtcgatcaagacgacctgtgcagtactaatcgacgtgtcgctcagacgtcgttgacttctgaagatgagcatgcttgcgagcaaattttctga

SEQ ID NO: 23005 - protein, 1476 aa, Muscodor strobelii
  misc_feature: SGI Peptide ID NO. 567822
  misc_feature (1042)..(1079): Pfam Id: PF00400 Pfam Desc: WD domain, G-beta repeat
  misc_feature (1341)..(1379): Pfam Id: PF00400 Pfam Desc: WD domain, G-beta repeat
  misc_feature (1083)..(1121): Pfam Id: PF00400 Pfam Desc: WD domain, G-beta repeat
  misc_feature (385)..(564): Pfam Id: PF05729 Pfam Desc: NACHT domain
  misc_feature (385)..(506): Pfam Id: PF05729 Pfam Desc: NACHT domain
  misc_feature (9)..(1437): NCBI GI: 119473577 Blast Desc: wd-repeat protein [Neosartorya fischeri NRRL 181] gi|119406817|gb|EAW16767.1| wd-repeat protein [Neosartorya fischeri NRRL 181]
  misc_feature (318)..(1390): NCBI GI: 17225204 Blast Desc: AF323582_1 beta transducin-like protein HET-E2C [Podospora anserina]
  misc_feature (322)..(1390): NCBI GI: 3023956 Blast Desc: HETE1_PODAN RecName: Full=Vegetative incompatibility protein HET-E-1 gi|607003|gb|AAA85775.1| beta transducin-like protein [Podospora anserina]
  misc_feature (318)..(1390): NCBI GI: 17225206 Blast Desc: AF323583_1 beta transducin-like protein HET-E2C*4 [Podospora anserina]
  misc_feature (318)..(1390): NCBI GI: 17225208 Blast Desc: AF323584_1 beta transducin-like protein HET-E2C*40 [Podospora anserina]
  misc_feature (10)..(1387): NCBI GI: 70986621 Blast Desc: Pfs, NACHT and WD domain protein [Aspergillus fumigatus Af293] gi|66846431|gb|EAL86763.1| Pfs, NACHT and WD domain protein [Aspergillus fumigatus Af293]
  misc_feature (302)..(1425): NCBI GI: 154936836 Blast Desc: HNWD1 [Podospora anserina]
  misc_feature (302)..(1425): NCBI GI: 171677548 Blast Desc: protein product [Podospora anserina] gi|170936842|emb|CAP61500.1| protein product [Podospora anserina]
  misc_feature (302)..(1390): NCBI GI: 171685532 Blast Desc: protein product [Podospora anserina] gi|170942727|emb|CAP68380.1| protein product [Podospora anserina]
  misc_feature (302)..(1390): NCBI GI: 154936832 Blast Desc: HNWD3 [Podospora anserina]
MAPRPGCTEYTTGWICALPLELAAGKAMLDEIYEAPTIDLEDSNAYVFGKMGEHKVVMACLASYGLADAATVASHMNRSFPSLQLRFMIGIGGGVSGVLTGGSDIRLGDVVIGKRVEQYDLGKTTAGGEFRRMTKSNTLPHNLETAVQVLRAHHETNASRIPFFIEQARFPPGFAHPGDGEDLLFPATYDHEDGQLSCENCDRAQLVARQSRPSRDPILHYGGIASANQVMKNASTRDRLASELDVVCFEMEAAGFISHFPCLVVRGICDYSDSHKMKGWQRYAAATASAYAKELIHYTPRRSMKRKRDSTVEIQSKEHEQCLADLRVSEPRDDKARIEQTKGGLLKDAYKWILNNPQFQKWQEGTNIPSSSPTQLEQLSDTQNRLLWIGGNAGKGKTMLACGLIDELSKNGEFGVHFFFCQATDVRFNYATSVIRGLMYQLVSRQPLLMKHLMERYRNDGKELFEGVNSWMALTDILSQMLHEPEGPPIIMIVDALDECIDPPQLAQFIIGSQRSSRVKWIVTSRNSPSVTEFFALSSDHTHLSLELNESSIGKAVSFYIQQRVNELAMMKKYDLELKLAVENYLSSHAQDTFLWVALVCANLRRYGGVTYKSVTRRLNDFPPGLDSLYHSMFMQIGEDMDDGALCRQILAKAVAAERPLAVEELCSLLEYPTPGDYNSPSDIENLIPYCGCCLIQRQGVVYFVHQSAKEYFLKTATTAVFPGGISQAHRALFLRSVELLKSTLRRDIYNLNGTDIENRTLAPPQPDPLATVRYSTVYWIHHLNVYLEIRSDGELDSAIIEMIETKYLYWIEALGLLKSIPVAIHQLLELSSHLTSTSRAGLLTRAALQFLRYFGVGIEADPLQSYLSALTFSPKDSEIRRLFEKEVPKWVEVRPDTELRWPEHTQTLAGHDSRLRAMSSDVSGKVLMTVSELGRVTIYDSTTGAYLSSFENRGDSKVVMATFTPDGCVVALGLTDNSIEIWEMTGGRHVKSFSGCDQDWEMDSRCFAIAPDGHRIAARVRGTRVSHNLNRLVYVGEVATGARLGVLEGHTADINCIVYISDSRIVSGSADHSCKLWNAHDGTCLRTFLGHSWAIKSIASVLNGRIFASWDIGNTVNVWEIDQGGLWSTFKCTWSIHNALALSTDQRRLAITTHDESRKRGFVELRDVATGITTRKFSLTPMVDTIAFTADDRCLAIGLQSRNIQVWDISTSKELEAQKEKGEEERRFGGFVSGGQGWVSYTGSSLKLIDTATRVCRKELNLLELKGPTLAPNGKWLATFTGSLEVEVWCLATLEKQRTLVFDGKYISSIAWSPDGQQLAIVMSRSHSFDIVLALVWETPSKTRELNGHEEFIGPAVFSQDGRRLASTSHDSTIKIWDINRGVCIHTLDGYRNGGGLASLAFSQDGQSLVSAHPWGGQKVWTAVGDEMQIVLDDVIEKCVGLERMVDQDDLCSTNRRVAQTSLTSEDEHACEQIF

SEQ ID NO: 23006 - DNA, 5107 bp, Muscodor strobelii
  misc_feature: SGI EST ID NO. CUFF.54072.0
  misc_feature: Variant of the nucleotide sequence at SEQ ID NO 23004
aagtattcaagtacagtatcatacgtagccgccatctcgcttaagccactcatgcatgcaatatgctaccccaatcgttactgtgacattcagctcgtcacgtgacaccgcagcctgcctgcttcacaggaagtgcaactttatccgtttctttcgtcattgtactacccacttcctgcttttcatcattattgttatgaggtcaaagccagatcgtaagtcatttgtttatcgagtcttcgtgcgatcgagagcgcttccaagatggcgccaagaccgggctgcacagaatatacgaccggctggatatgtgctttaccgttggagctagcagccgggaaagcgatgctagacgagatctatgaagcaccgaccatcgatctcgaagacagtaacgcttatgtcttcggtaagatgggtgagcacaaggtcgtaatggcatgtctggcaagctatggactcgcagatgcagctacagtagcgagccatatgaatcggagttttccttctctacagctgcgattcatgatcggtatcggaggcggggtttcaggtgtacttacaggaggatctgatattcggcttggtgacgtcgtaatcggtaagagagtcgaacagtatgatctcggaaagaccaccgcgggaggggaatttagacgaatgaccaagtctaatactctcccacataaccttgaaacggcggttcaagtactccgggctcatcacgagacaaacgcgagccgaattccattcttcatcgagcaagcacgtttcccgcccggttttgcccacccaggtgacggcgaagatctcctctttcccgctacctatgatcatgaggatggtcaactctcgtgcgagaattgcgaccgtgctcaactagttgcaaggcagtctaggccgagccgggaccccattctgcattacggcgggatagcgtctgcgaatcaagttatgaaaaacgccagtacaagagaccggctagcttcagagctggatgtagtgtgcttcgagatggaagctgcaggcttcataagtcattttccatgtctcgtagttcgcggcatatgtgactactcggactcgcataaaatgaaaggatggcaacgatatgcggctgcgactgcttcggcttacgctaaagagctgattcattacacacctcggcggtcgatgaagcgaaagcgagactcaacagtcgagatccagagtaaagaacacgagcagtgcttagccgatttgcgagtttcagagcctcgcgatgacaaagctcgaattgaacaaaccaagggaggcttgttaaaggacgcgtataagtggattctaaacaatcctcaatttcaaaaatggcaagaaggcaccaacataccatcatcatcacccacgcagcttgaacaactaagcgatactcaaaatcgcttgctctggatcggaggtaacgcagggaaaggcaagactatgcttgcttgcggactcatcgacgagttgagcaaaaacggcgagttcggcgttcatttcttcttctgccaagccaccgacgtgcgattcaactatgcaaccagtgtgatccgtggtcttatgtaccagctcgtcagtcgacagcctctcctcatgaaacacctcatggaaagataccgcaatgatggcaaggaactattcgaaggtgtaaattcttggatggcgttgacagacatactttctcagatgcttcatgagcctgagggacctccaatcatcatgatagttgatgcacttgatgaatgtatcgaccctccacaacttgcccaattcataattggttcacaaaggtcatctcgagttaaatggattgtcacgagccgcaactcaccaagtgttaccgaattcttcgccttatccagtgatcatacccatttaagcctcgaactcaatgaaagctctattggcaaagcagtaagcttttatatccagcaacgagtgaatgagctggccatgatgaaaaagtacgatctcgagctgaagctagccgtggaaaactacctttccagtcatgcacaagatacatttctctgggtcgctttagtctgcgcaaatctgagaagatacggtggcgtaacttataagagcgtaacgcgcagactgaacgacttcccgcccggcctggactctctctatcatagcatgttcatgcaaataggtgaagatatggatgatggggctctttgccggcaaatccttgcgaaggcagtagcagcggagcgacccctggctgtagaggagctttgtagccttctagaatacccaacccctggcgattacaatagccccagcgatatcgagaatctcatcccatactgtggttgttgtttgatacaacgccaaggagtcgtttattttgtacatcaatctgccaaagaatactttttaaagacggcgacaacagctgtttttccgggaggtatctcgcaagcacacagagctcttttcttgcgctctgttgagctgctaaaatctacacttcgtcgcgatatttataatctcaacgggacggatattgagaacagaactcttgcgccaccacaaccagatcccctcgctaccgtacgatattcaactgtgtactggatccaccatctcaatgtctaccttgagattagatcagatggtgagctcgatagcgctataatcgagatgattgaaacgaaatatctgtattggatcgaagccctgggccttttgaagagcattccggttgcaatacatcaattgttagagctatccagccacttgacttctacctctcgcgccggtctattgacccgcgctgccctccagttcttgagatattttggagttggcatcgaggccgatcctctgcaatcatacttgtcagccttgaccttcagtcccaaagacagcgagatacggcgcttgttcgagaaagaagtaccgaaatgggtagaggtcagaccagacacggagttacggtggcccgagcacacacagacgctggccggccacgatagcagattaagagctatgtcctccgatgtcagcggtaaagtgcttatgacagtgtcggagcttgggagagtgactatatatgactcgacaacaggggcgtacctatcatcatttgagaatagaggcgattccaaagtggtgatggccacatttactcctgatggatgcgttgtggcattgggcttgacagacaacagcatagaaatctgggagatgacgggtggaagacacgtgaaatcgttcagcggctgtgaccaagactgggagatggacagccggtgcttcgccattgcgccagacggtcatcgaatagcggcgagagtgcgagggactcgagtgtctcataacttgaaccgtctcgtctacgtcggagaagttgcgactggtgcgcgtttgggtgtcttggagggacatactgcagacatcaattgcatcgtatatatatctgacagcagaattgtatcaggatctgcggaccactcgtgcaaactatggaatgcacatgatggtacgtgtctgcgaacgttcttaggccattcgtgggccatcaaatccattgcctcggtcctgaatggacggatattcgcgtcttgggacatcggcaacacagtgaacgtctgggaaatagaccaaggcggtttgtggagcacattcaagtgtacctggtccatacataacgctttggcattgtcaacagaccagcgtcgattggctatcaccactcacgatgaaagtagaaaaagaggtttcgtcgagttacgggacgtggcgactggtataactacccgaaaattttcgttgacgcctatggttgatacaatcgcctttactgcggatgaccggtgccttgctatagggctacaatctcgcaacattcaggtttgggatatctcaacctcgaaggagcttgaggcacaaaaggagaagggggaagaggagagacgatttggagggtttgtgtcaggtggccaagggtgggtatcttacacaggaagcagcttgaagctcattgacacagcaacgagagtatgccgaaaagagctgaaccttttggaacttaaaggacccaccctagcaccgaatggaaagtggttagctacttttactgggagtcttgaggtcgaagtctggtgtctagccacattagaaaaacagcgcacgcttgtattcgacgggaaatacattagctcgattgcgtggtcgccagacggccaacaactagccatcgtgatgagccgcagtcatagttttgacattgtgcttgctctagtgtgggagacgccatcaaagacacgagagttaaacggccacgaggaatttataggtccagcagtattctcccaggacggacggaggctagcatcaacatcacatgattctactatcaagatttgggacattaacaggggtgtgtgcatccacacactcgatggctatagaaatggcgggggccttgcgtcccttgctttttctcaagatggacaatctctcgtatcggctcatccatggggcggacaaaaagtctggactgcggttggcgacgagatgcagatcgttctcgatgatgttatagaaaagtggtatgggatatatctgaactcgaagtatgggctggatgctataagaaaggcgtcctgggtcactgcgaatgggcaaaaattgatctggctaccacctgagtttcgaccacataagtttcgaatacatgaaatgttttcggattacatagctggagaaaaaaatagcatctccatacactcagcgacgggtcgaacatatcagattagattcatagaatagtttagattacttcgactagcgtcggtctggaaagaatggtcgatcaagacgacctgtgcagtactaatcgacgtgtcgctcagacgtcgttgacttctgaagatgagcatgcttgcgagcaaattttctgaaccagctgaagaggagtgaagacttcaaggaccgatagcgatcgactcattattggtcaaatgtgtcacggcgacttcgtattgcctagcgagacccgaaaactttacaggcatggaatctacatagaatggagttctgatcggccaagcagtagaattagtattatcaaaac

SEQ ID NO: 23007 - DNA, 1146 bp, Muscodor strobelii
  misc_feature: SGI cDNA ID NO. 567823
  misc_feature: Elevated expression when VOC is produced
  misc_feature: Encodes the peptide sequence at SEQ ID NO 23008
atggccaacgcaatggacctctccaattgggtgaaaatgtacgacccaggagcaaatggtcagagtgacggttttacgatcgcctttgactcgtttgcatgtcaagaaactggttacatctcgaacgctttcgaatgcgcttctgcgatgaactctataagcggtccaggagtagcgaagagaacctacgctagtgcagtcggtcaggaagagcccgataatggtcacgcaaagaaacgacagaaacgacatgaggacaatgacagcaaacaaaaatcagacaagcccatgtccacgacctctcgctccgtcaactccgagaatacctccccattctacaaggaaacacatgatgaagatactacgaagaaacgtttcgcgtgcccatttttgaagcataatcaagctaaatacggcaaagtgacaacgtgcttgggatcatggccaacaatcgctcgattaaaagaacatatctaccgcaagcacgcagctgatcaatatcgatgcagtcgatgtctcatcaaatgcgagaatcactctcaactacgcgagcatctacgagctgaccctccgtgtccggtaataataagaaattctttgcatgacgacatgctcgacgatttacaactagcggagatcaagaaaaagtcgcggcgccgcaccgaggctgacaaatggaacgatatctatcgcatcatttttcgaattgattcggaagttgaaataccatcgcctttctgggaaaatatcatgctcggtccaactgtatcagatcaccagctggacactttatcgcagtttgaagaatacctccgacgtcaagtcacgactcagaatacaggagaaatccaaacatgtctaagttacattcatggctttctgcaagcaacacagagttattgttcctctcaatccgattctggacatgtgtctcaatctacatctgaactcccaatcctagattctgatagtagtgacgggtccagcgaacaagcatcaaattttgacacgaagatagactatgccagctcactccgcggcatcactgcgcatgtgccaattgaattcggtttggcagctgaggcgtttacacaagattttgacatgctctttggactcccattgaacatcagcgatagagattag

SEQ ID NO: 23008 - protein, 381 aa, Muscodor strobelii
  misc_feature: SGI Peptide ID NO. 567823
  misc_feature (114)..(275): NCBI GI: 116205235 Blast Desc: CHGG_10501 [Chaetomium globosum CBS 148.51] gi|88176629|gb|EAQ84097.1| CHGG_10501 [Chaetomium globosum CBS 148.51]
  misc_feature (125)..(287): NCBI GI: 116194256 Blast Desc: CHGG_03726 [Chaetomium globosum CBS 148.51] gi|88179639|gb|EAQ87107.1| CHGG_03726 [Chaetomium globosum CBS 148.51]
  misc_feature (118)..(273): NCBI GI: 256734669 Blast Desc: NECHADRAFT_98902 [Nectria haematococca mpVI 77-13-4]
  misc_feature (119)..(270): NCBI GI: 46108162 Blast Desc: FG00963.1 [Gibberella zeae PH-1]
  misc_feature (124)..(249): NCBI GI: 171689708 Blast Desc: protein product [Podospora anserina] gi|170944816|emb|CAP70928.1| protein product [Podospora anserina]
  misc_feature (124)..(248): NCBI GI: 164424800 Blast Desc: NCU05381 [Neurospora crassa OR74A] gi|157070667|gb|EAA33958.2| [Neurospora crassa OR74A]
  misc_feature (124)..(248): NCBI GI: 16416005 Blast Desc: conserved [Neurospora crassa]
  misc_feature (125)..(287): NCBI GI: 171683689 Blast Desc: protein product [Podospora anserina] gi|170941804|emb|CAP67458.1| protein product [Podospora anserina]
  misc_feature (122)..(248): NCBI GI: 85089659 Blast Desc: NCU06944 [Neurospora crassa OR74A] gi|28919364|gb|EAA28814.1| [Neurospora crassa OR74A]
  misc_feature (125)..(248): NCBI GI: 169605515 Blast Desc: SNOG_05782 [Phaeosphaeria nodorum SN15] gi|111065726|gb|EAT86846.1| SNOG_05782 [Phaeosphaeria nodorum SN15]
  misc_feature: Useful for introducing or modulating the production of volatile compounds
MANAMDLSNWVKMYDPGANGQSDGFTIAFDSFACQETGYISNAFECASAMNSISGPGVAKRTYASAVGQEEPDNGHAKKRQKRHEDNDSKQKSDKPMSTTSRSVNSENTSPFYKETHDEDTTKKRFACPFLKHNQAKYGKVTTCLGSWPTIARLKEHIYRKHAADQYRCSRCLIKCENHSQLREHLRADPPCPVIIRNSLHDDMLDDLQLAEIKKKSRRRTEADKWNDIYRIIFRIDSEVEIPSPFWENIMLGPTVSDHQLDTLSQFEEYLRRQVTTQNTGEIQTCLSYIHGFLQATQSYCSSQSDSGHVSQSTSELPILDSDSSDGSSEQASNFDTKIDYASSLRGITAHVPIEFGLAAEAFTQDFDMLFGLPLNISDRD

SEQ ID NO: 23009 - DNA, 2410 bp, Muscodor strobelii
  misc_feature: SGI EST ID NO. CUFF.54075.0
  misc_feature: Variant of the nucleotide sequence at SEQ ID NO 23007
cttgcctttgccttcacgttgtagttccgcacctgttcccgccgttagcagccgcttttgacatttttcatggctgctgaaggtgaagacgacgacgatgaagatgactggatttcgcccaccagccgaacatgacaattctgatttcggccctgtggccgttatcggcatgtcatgtcgtcttcccggaagaatcacgtctcccgtggaactctgggaatctctaaataatggtcgcgatgtcaaggttcatgatcatggcattattaccaataacgaatcatccaagggatccgcctcacgttccaccgagagatcaaacttctcgtctatctatgacaacttggcattcgagattagttctccttatatagtgggattaaagactcactcaactacttctcggtggagttttccatgtccgtcaatgcccgtcaaggtcgagtctaagattcaggtttcctcccccttcgctcaagctaaagaagctgagccgcgcctcgagttatgtaacatcgagcctcatgcagatgcaaagaaagaccttgtcttcggggccaacattgtccgccaaaatcaacatgaagttgtcaagggccctcaatctgcatgcagtgagccaaaattgggatctcccaaagaaagtgatgtgtgccgtcagatccagtctacgtacaggatctgtcatgcgaagaaggtggttgctgacgcggttgataagagatttattgtagtcaactccagtaaatttcaaccaggtgaagttttcaaggtactttggaattctccctttgtcaacacgacaatgtccaagttcgttgaaagctttacgcattatccgtctgtcagcagtttgttaattggcgcacatcctcacatcaatttccttcttcagagatctgaagaaattggaatcccaatagaaaacggtctcttgctcattaaactgcgctatattcatgaagggtgtctcgaggtaccggtttacgtggtggcccttccttggccacggaagccccctaaacaaatccgtggcagcagcaatactcacaaaagctctacgatcgattcattggtcaacttattaccacttcacagaatctcctctacgatacaaatgatacacggaaaaatggccaacgcaatggacctctccaattgggtgaaaatgtacgacccaggagcaaatggtcagagtgacggttttacgatcgcctttgactcgtttgcatgtcaagaaactggttacatctcgaacgctttcgaatgcgcttctgcgatgaactctataagcggtccaggagtagcgaagagaacctacgctagtgcagtcggtcaggaagagcccgataatggtcacgcaaagaaacgacagaaacgacatgaggacaatgacagcaaacaaaaatcagacaagcccatgtccacgacctctcgctccgtcaactccgagaatacctccccattctacaaggaaacacatgatgaagatactacgaagaaacgtttcgcgtgcccatttttgaagcataatcaagctaaatacggcaaagtgacaacgtgcttgggatcatggccaacaatcgctcgattaaaagaacatatctaccgcaagcacgcagctgatcaatatcgatgcagtcgatgtctcatcaaatgcgagaatcactctcaactacgcgagcatctacgagctgaccctccgtgtccggtaataataagaaattctttgcatgacgacatgctcgacgatttacaactagcggagatcaagaaaaagtcgcggcgccgcaccgaggctgacaaatggaacgatatctatcgcatcatttttcgaattgattcggaagttgaaataccatcgcctttctgggaaaatatcatgctcggtccaactgtatcagatcaccagctggacactttatcgcagtttgaagaatacctccgacgtcaagtcacgactcagaatacaggagaaatccaaacatgtctaagttacattcatggctttctgcaagcaacacagagttattgttcctctcaatccgattctggacatgtgtctcaatctacatctgaactcccaatcctagattctgatagtagtgacgggtccagcgaacaagcatcaaattttgacacgaagatagactatgccagctcactccgcggcatcactgcgcatgtgccaattgaattcggtttggcagctgaggcgtttacacaagattttgacatgctctttggactcccattgaacatcagcgatagagattagggtaggatgcatgcgggaaatttccggtttcaatgattttaggagttcttattcacttttactatgttgatctcatctgagtgttttttgcaagcgacacttatatggaattgcttcttagtttattaggga

SEQ ID NO: 23010 - DNA, 501 bp, Muscodor strobelii
  misc_feature: SGI cDNA ID NO. 567824
  misc_feature: Reduced expression when VOC is produced
  misc_feature: Encodes the peptide sequence at SEQ ID NO 23011
atgaagttcgccgttgctgctgccgctctcgccgctggcgtttctgccggtagctaccctgcctactcagcctcccccaactctaccgttgtctcctacaccaccgccgttgtcacctcttacgaggttgcctgcactggtgccaccaccctcacctacggcaccgagacctacagcatcagcacccctggtactattactatgaccggtggatcttacaccgtctcgatccccgtctacaccacctcgtccgtcgagtgtgtctcttgctccagcgctgcttatcccacgagcactcctgctcccactagcagctaccccgtctacccaactggcagcaactcgacctctggatacccagttccctcgacttcatcttacccggcctcgtcttcctccattcctccggctacctaccctactcctgtgcccactgctggcgccagccgcatcggtgctggtctcgccgccattgcaggtgttgtcgccttcgctctctaa

SEQ ID NO: 23011 - protein, 166 aa, Muscodor strobelii
  misc_feature: SGI Peptide ID NO. 567824
  misc_feature (31)..(166): NCBI GI: 261351824 Blast Desc: VDBG_00359 [Verticillium albo-atrum VaMs.102]
  misc_feature (31)..(151): NCBI GI: 46137219 Blast Desc: FG10125.1 [Gibberella zeae PH-1]
  misc_feature (1)..(92): NCBI GI: 115442878 Blast Desc: [Aspergillus terreus NIH2624] gi|114188115|gb|EAU29815.1| [Aspergillus terreus NIH2624]
  misc_feature (31)..(151): NCBI GI: 226495039 Blast Desc: LOC100273336 [Zea mays] gi|194703524|gb|ACF85846.1| [Zea mays]
  misc_feature (31)..(166): NCBI GI: 85098917 Blast Desc: clock-controlled protein 6 [Neurospora crassa OR74A] gi|8488971|sp|Q01302.2|CCG6_NEUCR RecName: Full=Clock-controlled protein 6 gi|3746899|gb|AAC64287.1| clock-controlled gene-6 6 6
  misc_feature (45)..(110): NCBI GI: 255935823 Blast Desc: Pc13g05030 [Penicillium chrysogenum Wisconsin 54-1255] gi|211583558|emb|CAP91572.1| Pc13g05030 [Penicillium chrysogenum Wisconsin 54-1255]
  misc_feature (31)..(151): NCBI GI: 256732175 Blast Desc: NECHADRAFT_104502 [Nectria haematococca mpVI 77-13-4]
  misc_feature (35)..(107): NCBI GI: 226531354 Blast Desc: LOC100274404 [Zea mays] gi|194707752|gb|ACF87960.1| [Zea mays]
  misc_feature (35)..(110): NCBI GI: 212532617 Blast Desc: clock-controlled protein, [Penicillium marneffei ATCC 18224] gi|210071829|gb|EEA25918.1| clock-controlled protein, [Penicillium marneffei ATCC 18224]
  misc_feature (1)..(166): NCBI GI: 156043665 Blast Desc: [Sclerotinia sclerotiorum 1980] gi|154695223|gb|EDN94961.1| [Sclerotinia sclerotiorum 1980]
  misc_feature: Useful for introducing or modulating the production of volatile compounds
MKFAVAAAALAAGVSAGSYPAYSASPNSTVVSYTTAVVTSYEVACTGATTLTYGTETYSISTPGTITMTGGSYTVSIPVYTTSSVECVSCSSAAYPTSTPAPTSSYPVYPTGSNSTSGYPVPSTSSYPASSSSIPPATYPTPVPTAGASRIGAGLAAIAGVVAFAL

SEQ ID NO: 23012 - DNA, 1445 bp, Muscodor strobelii
  misc_feature: SGI EST ID NO. CUFF.54282.0
  misc_feature: Variant of the nucleotide sequence at SEQ ID NO 23010
tttcgctctattctcctcctccttaccaacccacactcattcaatactactacaccctgacttttacagtcaatttcattcgttaacagtatacctaatacctaagatcctaaaagatccgacttaatcacctccaaggtttaatccaacaccagacaactcagtcaaaatgaagttcgccgttgctgctgccgctctcgccgctggcgtttctgccggtagctaccctgcctactcagcctcccccaactctaccgttgtctcctacaccaccgccgttgtcacctcttacgaggttgcctgcactggtgccaccaccctcacctacggcaccgagacctacagcatcagcacccctggtactattactatgaccggtggatcttacaccgtctcgatccccgtctacaccacctcgtccgtcgagtgtgtctcttgctccagcgctgcttatcccacgagcactcctgctcccactagcagctaccccgtctacccaactggcagcaactcgacctctggatacccagttccctcgacttcatcttacccggcctcgtcttcctccattcctccggctacctaccctactcctgtgcccactgctggcgccagccgcatcggtgctggtctcgccgccattgcaggtgttgtcgccttcgctctctaaattgctcgctcctaattattttcacatttcggtctgagatctgggcaatgactgagttaatacctaatcgattcacgcgactcgccaaagaggtcaaacgagaggatgtcatgacagggaaaaagtgcaagctaattggagtcggtgttaattttgggactcggggagtttaatttggatgggagatcattcgaagcgacggcattctctttctgtattgcatcatggttccagagatgcatgcgggatgcaaacctattttttctggattcttgtacatggtgctttgaggacaagcctaagcctggagaatcgaattgaatgatatgttgtggttacaattatttccgttacggatgggattcgtgtgaaggtgtgatgatacgaagccttcgacttgcccaattccgaatccgattctgccttgtcgttgaagagaaaatatcgatcgatcgatctaatacctgtgctctcgccgccagacccaggagtatctacgattcttgtgtacaaatttcacgcggagcacatactaccctaaaatcggtggatgttttattggtccccagacaacttccagtgtcgagctgtggctcttgtgtgataccctatagatacttctcgacattgatcagggaccgagttttggtctgccgtcttacaaattggccctctacctttgccatgtgatgttgtgaccgattatcgtcatgcacgttcaactggaatgctagtgacaaggaacagcttctgaagactcaaactcaaccttcac

SEQ ID NO: 23013 - DNA, 201 bp, Muscodor strobelii
  misc_feature: SGI cDNA ID NO. 567825
  misc_feature: Encodes the peptide sequence at SEQ ID NO 23014
atggataagcaacccgtcaagctcgtcaaggtcacccgcgtcctcggccgtaccggctctcgcggtggtgtcacccaggtccgcgtcgagttcctcgaggaccacacccgatcgatcatccgtaacgtcaagggacccgtccgtgaggacgatatcctctgccttctcgagtccgaacgtgaggcccgccgtctccgataa

SEQ ID NO: 23014 - protein, 66 aa, Muscodor strobelii
  misc_feature: SGI Peptide ID NO. 567825
  misc_feature (1)..(66): Pfam Id: PF01200 Pfam Desc: Ribosomal protein S28e
  misc_feature (3)..(66): NCBI GI: 221220918 Blast Desc: 40S ribosomal protein S28 [Salmo salar]
  misc_feature (3)..(66): NCBI GI: 261360820 Blast Desc: 40S ribosomal protein S28 [Verticillium albo-atrum VaMs.102]
  misc_feature (3)..(66): NCBI GI: 212545865 Blast Desc: Ribosomal protein S28e [Penicillium marneffei ATCC 18224] gi|242820646|ref|XP_002487548.1| Ribosomal protein S28e [Talaromyces stipitatus ATCC 10500] Ribosomal protein S28e ATCC
  misc_feature (3)..(66): NCBI GI: 261352270 Blast Desc: 40S ribosomal protein S28 [Verticillium albo-atrum VaMs.102]
  misc_feature (3)..(66): NCBI GI: 154323856 Blast Desc: 40S ribosomal protein S28 [Botryotinia fuckeliana B05.10] gi|150842556|gb|EDN17749.1| 40S ribosomal protein S28 [Botryotinia fuckeliana B05.10]
  misc_feature (3)..(66): NCBI GI: 255954339 Blast Desc: Pc21g08830 [Penicillium chrysogenum Wisconsin 54-1255] gi|211589633|emb|CAP95780.1| Pc21g08830 [Penicillium chrysogenum Wisconsin 54-1255]
  misc_feature (3)..(66): NCBI GI: 189204368 Blast Desc: 40S ribosomal protein S28 [Pyrenophora tritici-repentis Pt-1C-BFP] gi|187985618|gb|EDU51106.1| 40S ribosomal protein S28 [Pyrenophora tritici-repentis Pt-1C-BFP]
  misc_feature (3)..(66): NCBI GI: 169610187 Blast Desc: SNOG_08190 [Phaeosphaeria nodorum SN15] gi|111063346|gb|EAT84466.1| SNOG_08190 [Phaeosphaeria nodorum SN15]
  misc_feature (3)..(66): NCBI GI: 85098029 Blast Desc: 40S ribosomal protein S28 [Neurospora crassa OR74A] gi|51316762|sp|Q7S6W5.1|RS28_NEUCR RecName: Full=40S ribosomal protein S28 gi|28922054|gb|EAA31325.1| 40S ribosomal protein S28
  misc_feature (3)..(66): NCBI GI: 119482684 Blast Desc: Ribosomal protein S28e [Neosartorya fischeri NRRL 181] gi|121711345|ref|XP_001273288.1| Ribosomal protein S28e [Aspergillus clavatus NRRL 1] gi|119401439|gb|EAW11862.1| protein
MDKQPVKLVKVTRVLGRTGSRGGVTQVRVEFLEDHTRSIIRNVKGPVREDDILCLLESEREARRLR

SEQ ID NO: 23015 - DNA, 727 bp, Muscodor strobelii
  misc_feature: SGI EST ID NO. CUFF.54094.0
  misc_feature: Variant of the nucleotide sequence at SEQ ID NO 23013
ctgcaattgacgagggtccactcaagcgtcgtcgtggggtgtctaccaaattcctccatcaccaccgaactttcgcacctcgtcgtcccgctcgcacgctcgccttgtcaacacgatcccatccatctctcacttgccaaacccagcgccaaaatggataagcaacccgtcaagctcgtcaaggtcacccgcgtcctcggccgtaccggctctcgcggtggtgtcacccaggtccgcgtcgagttcctcgaggaccacacccgatcgatcatccgtaacgtcaagggacccgtccgtgaggacgatatcctctgccttctcgagtccgaacgtgaggcccgccgtctccgataattgtttacgacgatcagcgtgtgtggagggaattttacgatggggatcttcggcgcacctttacggacacttcctagaccagtcatgatccgtactatctgagacggatcccgctacggcggatgccaagattaggattggctgacaccggtcaatacccttagaggatatgaggcaggaaaaatcatgaagcaaaataactgcaacgagataggcgttgagtgatatgacgccggcttccggttcatacatggctggcgcaaattgacatattcgttccgatcaacacataccgaattccacgatttcagtacatgtgaagtccaaatggaatggagaccatccgcaacagacacatttcattcaacgtcgt

SEQ ID NO: 23016 - DNA, 1584 bp, Muscodor strobelii
  misc_feature: SGI cDNA ID NO. 567826
  misc_feature: Elevated expression when VOC is produced
  misc_feature: Encodes the peptide sequence at SEQ ID NO 23017
atgtcgacggcgaaggaaaccgaatccccaacgaacggctcatcgctagcaatagaggtcgagaagggagccgagtccattacgccccatgaccatggccctttacctatacaaaaacacgttattagcgatgaccccgatgaggcgctgagattgatgaaagctcatgagggcgaatcgcttgtgattagccccgaagagcaaaagaagctgttgaggaaaatcgattaccgcttaatgccgttcctatgtatcgtgtacggattgaattatttagataagactacactgtcatatgcctcgatcatgggactcaagactgatattggaattggaacatctgagtacaactgggttgcatcgattttctactttggatatctggtctgggagtggcctaccaatcggcttctccaaagactacccttagcgaagtactcggctgccaatgtgattatttggggattgatcctcgccgccaccgccggaatcaaaaacttcgggggagctctcgctgttcgatttttccttggagtcgcagaagccgcagttagtcctggattcgctctcttcacctcacaatggtatactcagcgcgaacaaggtcttcgcgtcaatatctggttcagcttcaacggttggggtcaaatagtcggtggtgccatcgcatatggcatatctgttgggacagcagcgcatcctgtcgccatcaagggctggcaactgattttccttgtactcggcttgtttaccgctttcatgggaacgttattcttatacttcatgccagacagccaactcaatgctcgatttctcaccgaacatgaaaaagtcatggccgtcgaacggatccgtcaaaaccagcaaggcgtggggaacaaacacttcaagtggtatcagtgcaaggaggctttaacagatcctctggtgtgggcttttgtgctttacgccttctttgcggatattcccaatggcggagtctcaaactacttttcgcagctgattgtatcgtttgggttcacgccaaaccagtctttgcttctaggcatcccaggcggcgccgttcaagtcatcacgctactctgctctggatacttcggtctcaggttcaagaatcgcattcttttcggaggcatgggtacgacaattgcaatcgtcggactgttcatcattcgcttcctacccgccgagaatagagggggaagactcgcaggctactacttatatcaatcagcctcaacaggctttgtcatgctactcagtcttatttcgtcgaatattgcagggtatacgaagaagacaactaccgcggctatgtacttgatcgcgtattgcgttggcaatattatcgggccgcaggtttttcggcccagcgatgcgccgttgtttcgtaatgctgcgacggtcttgctggtgactctcatcgttgcagacttgactctggtattcacctatttctggtgcaaacgtcaaaataagatcaaagcagcgattcgcgagagcccagagtatgtcaagattgacggacaagagtttatggatctcacggatcgcgaaaacccggaattcacctacagtctgtag

SEQ ID NO: 23017 - protein, 527 aa, Muscodor strobelii
  misc_feature: SGI Peptide ID NO. 567826
  misc_feature (83)..(452): Pfam Id: PF07690 Pfam Desc: Major Facilitator Superfamily
  misc_feature (5)..(523): NCBI GI: 156051007 Blast Desc: SS1G_08092 [Sclerotinia sclerotiorum 1980] gi|154692491|gb|EDN92229.1| SS1G_08092 [Sclerotinia sclerotiorum 1980]
  misc_feature (1)..(527): NCBI GI: 189192038 Blast Desc: membrane transporter [Pyrenophora tritici-repentis Pt-1C-BFP] gi|187973964|gb|EDU41463.1| membrane transporter [Pyrenophora tritici-repentis Pt-1C-BFP]
  misc_feature (1)..(527): NCBI GI: 115442978 Blast Desc: [Aspergillus terreus NIH2624] gi|114188165|gb|EAU29865.1| [Aspergillus terreus NIH2624]
  misc_feature (24)..(527): NCBI GI: 119480629 Blast Desc: MFS allantoate transporter, [Neosartorya fischeri NRRL 181] gi|119408497|gb|EAW18446.1| MFS allantoate transporter, [Neosartorya fischeri NRRL 181]
  misc_feature (24)..(527): NCBI GI: 71000976 Blast Desc: MFS allantoate transporter [Aspergillus fumigatus Af293] gi|66852807|gb|EAL93131.1| MFS allantoate transporter, [Aspergillus fumigatus Af293] gi|159129260|gb|EDP54374.1| MFS
  misc_feature (37)..(527): NCBI GI: 121698248 Blast Desc: MFS allantoate transporter, [Aspergillus clavatus NRRL 1] gi|119395902|gb|EAW06334.1| MFS allantoate transporter, [Aspergillus clavatus NRRL 1]
  misc_feature (4)..(527): NCBI GI: 169783960 Blast Desc: [Aspergillus oryzae RIB40] gi|238493785|ref|XP_002378129.1| MFS allantoate transporter, [Aspergillus flavus NRRL3357] gi|83775186|dbj|BAE65309.1| protein
  misc_feature (25)..(527): NCBI GI: 242776312 Blast Desc: MFS allantoate transporter, [Talaromyces stipitatus ATCC 10500] gi|218722439|gb|EED21857.1| MFS allantoate transporter, [Talaromyces stipitatus ATCC 10500]
  misc_feature (4)..(527): NCBI GI: 119192972 Blast Desc: CIMG_00863 [Coccidioides immitis RS]
  misc_feature (7)..(527): NCBI GI: 240105889 Blast Desc: Major Facilitator Superfamily protein [Coccidioides posadasii C735 delta SOWgp]
  misc_feature: Useful for introducing or modulating the production of volatile compounds
MSTAKETESPTNGSSLAIEVEKGAESITPHDHGPLPIQKHVISDDPDEALRLMKAHEGESLVISPEEQKKLLRKIDYRLMPFLCIVYGLNYLDKTTLSYASIMGLKTDIGIGTSEYNWVASIFYFGYLVWEWPTNRLLQRLPLAKYSAANVIIWGLILAATAGIKNFGGALAVRFFLGVAEAAVSPGFALFTSQWYTQREQGLRVNIWFSFNGWGQIVGGAIAYGISVGTAAHPVAIKGWQLIFLVLGLFTAFMGTLFLYFMPDSQLNARFLTEHEKVMAVERIRQNQQGVGNKHFKWYQCKEALTDPLVWAFVLYAFFADIPNGGVSNYFSQLIVSFGFTPNQSLLLGIPGGAVQVITLLCSGYFGLRFKNRILFGGMGTTIAIVGLFIIRFLPAENRGGRLAGYYLYQSASTGFVMLLSLISSNIAGYTKKTTTAAMYLIAYCVGNIIGPQVFRPSDAPLFRNAATVLLVTLIVADLTLVFTYFWCKRQNKIKAAIRESPEYVKIDGQEFMDLTDRENPEFTYSL

SEQ ID NO: 23018 - DNA, 4278 bp, Muscodor strobelii
  misc_feature: SGI EST ID NO. CUFF.54101.1
  misc_feature: Variant of the nucleotide sequence at SEQ ID NO 23016
cacaaactgtattcatttgcatacaaccatcattaataccttgtccagccctggacgttatctccatcagcggcaggtcagctcgggaagtcgttagggtggcctatcattgtccgcccaccctgacgttacattgcatatcaacgcggagaagcaatgatcgtccgtggccgacgccgtatctagtagtactaccatgctcgatgtgtcgtgcgcataagcaatcatgtcatggttttaaatatgttgatccccttcatcctgttgctcgtttctcatgacctgtttcaattccaactgtaacattgaacttcattatgtcgacggcgaaggaaaccgaatccccaacgaacggctcatcgctagcaatagaggtcgagaagggagccgagtccattacgccccatgaccatggccctttacctatacaaaaacacgttattagcgatgaccccgatgaggcgctgagattgatgaaagctcatgagggcgaatcgcttgtgattagccccgaagagcaaaagaagctgttgaggaaaatcgattaccgcttaatgccgttcctatgtatcgtgtacggattgaattatttagataagactacactgtcatatgcctcgatcatgggactcaagactgatattggaattggaacatctgagtacaactgggttgcatcgattttctactttggatatctggtctgggagtggcctaccaatcggcttctccaaagactacccttagcgaagtactcggctgccaatgtgattatttggggattgatcctcgccgccaccgccggaatcaaaaacttcgggggagctctcgctgttcgatttttccttggagtcgcagaagccgcagttagtcctggattcgctctcttcacctcacaatggtatactcagcgcgaacaaggtcttcgcgtcaatatctggttcagcttcaacggttggggtcaaatagtcggtggtgccatcgcatatggcatatctgttgggacagcagcgcatcctgtcgccatcaagggctggcaactgattttccttgtactcggcttgtttaccgctttcatgggaacgttattcttatacttcatgccagacagccaactcaatgctcgatttctcaccgaacatgaaaaagtcatggccgtcgaacggatccgtcaaaaccagcaaggcgtggggaacaaacacttcaagtggtatcagtgcaaggaggctttaacagatcctctggtgtgggcttttgtgctttacgccttctttgcggatattcccaatggcggagtctcaaactacttttcgcagctgattgtatcgtttgggttcacgccaaaccagtctttgcttctaggcatcccaggcggcgccgttcaagtcatcacgctactctgctctggatacttcggtctcaggttcaagaatcgcattcttttcggaggcatgggtacgacaattgcaatcgtcggactgttcatcattcgcttcctacccgccgagaatagagggggaagactcgcaggctactacttatatcaatcagcctcaacaggctttgtcatgctactcagtcttatttcgtcgaatattgcagggtatacgaagaagacaactaccgcggctatgtacttgatcgcgtattgcgttggcaatattatcgggccgcaggtttttcggcccagcgatgcgccgttgtttcgtaatgctgcgacggtcttgctggtgactctcatcgttgcagacttgactctggtattcacctatttctggtgcaaacgtcaaaataagatcaaagcagcgattcgcgagagcccagagtatgtcaagattgacggacaagagtttatggatctcacggatcgcgaaaacccggaattcacctacagtctgtagatatatacgaatgatgattatcatacatgaaatatatagaactgaagcttggcgaatattctgtatataatgtatcgtgaattctatgtcattctatgcgtaaccgataagcgggccaatccaccaactccaaaacaagagctctatctgatacaaatgttcctcgaaaatcttgcatagtactgcctatccttcaaacatgctgatcatacagaatcacagaacgtacaaaacgccgcaagcaccaattcatcctcatttcgatcttgttccggcttccaaggcgattgtcgatagtcttccaaccccagagaatgcgcaaatggtgtacaagatccctcaacgaatccgataccgcaactccttccggactgtctcagcaaccttcaatgcctccgtcctagaagtcctcgagaaaacattcaaatacgcaacaaaagtattctttcccacactaggatgcggcaccttctgtcctctcttcaacaaacaacccgctcgtccaatatgttggcgtaattccggcttgcgggcaagtaactcagcgcagacatcgtcggagtcgaagattccctcgcaggtttgctggtcgaagttcaccgggatcatgacgagtactgtgtggctttgggctccggaggtaaatgattgggagagggcctttgcgcgggggatgtcggcgatggcgagaaggagggagagtccccagtagtttattccgtagacggattcgggggtctgcgaggcgaaaagtcccggggggcgcgggttgacttctattatccaggggcttgggggttgaatctgggattgagattgggactgggattgagggacggggtgcaggtcgacgacgccgttgattgatgtgtagcgtgttgccgagtgagctacgcgcgcttcgacgtgcattattcctgtcgtgaagcccatgcctttgattgtattttggactgcggttttcaaagagagttgttcggcctctggcagagcggagggaaacaccatggcggtttcgtggaagttcctgcgagtgtctgatgtgtttggagatgtctggatatctgcggatttaggaaagtcgtcgcagatttcgcagaagtggacttcgccgtcgatgaataccatgtttacgtcgacttctggaccgtcgcagtatgactctacgaggacttttccgccgtatttgttctttcctgcgttttgcgcgacggttattgcttgggatagttctgcggcgctgtcgacgcgagacacgccgtcggagtttaggccgaagcagggtttcactatgagtggaaaattgagctcggattcaggggaattgacgagggaaagggcttcttcggcacttccggcgagtgctgctgtcctgttctggaattttcccagtttgtatttgtttgttgctgtctcgaaggcggatgttgactggtgcgggagtttgagcttggctgccgcagcgctgacggggatttggaaggcttcgataaatgttacgattccgcctacgtcgttgatgcctttgaatccttcttttgcgttgcccgagttgcagtatttgttgaccatatcgacgatttcatcgaccatctcaggtcgcgaggggtcttcccaccattgcgctggtgccgggatcaggtactcgtaccaggaggcatattgaggttgtgtgatccaccagtcatcgcgctcgatgatgatgagatcgatgcctagtgctactgcggcgcgatgagcgaattgagtccagcctccgcctgcgggatcttggttactgcacccaataacaacgagacgcttgcgggttaacggtttcgtggagatccagttgaaagagagtttctcttcaaagtcttcctcgatatttggcgtaatgcaggggaagcgctccagtccgtagtcgacgaggggacatattgtaggcttgagtaggacggcgcccatagatgatttgagagtatcgaggatggaagttgactcgcaattgacccttgttcccggataagcctgaagaggagttgcgaatgctgttactttctcgacccaaaaagcatcttgaaggcgaagaggcagaatatctgctctgatgatctggccagcttgcaagggaatcaagaatctcgcgagacggggcacgtgagccttcgaagcagtgtatatgcaatctttcaaaaatcccaatatatcttcgtttccaacgtcctcttgagtaagaacttgcgcgttatcatcttcgtccaagcggagtactagctcatcctgagcaatgctagtgatatgaacaggcaaactgctagagcttatgcagagcaagaagtcgacaacctgaacaggcgttgcgtccttagactcaaatttggagacgaaagtcgtt

SEQ ID NO: 23019 - DNA, 2115 bp, Muscodor strobelii
  misc_feature: SGI cDNA ID NO. 567827
  misc_feature: Encodes the peptide sequence at SEQ ID NO 23020
atgtccgagatacataaagcccatatctgggctcatgatgataactatcagaccaaatgtatagaatggagttggaaaacgactttcgtctccaaatttgagtctaaggacgcaacgcctgttcaggttgtcgacttcttgctctgcataagctctagcagtttgcctgttcatatcactagcattgctcaggatgagctagtactccgcttggacgaagatgataacgcgcaagttcttactcaagaggacgttggaaacgaagatatattgggatttttgaaagattgcatatacactgcttcgaaggctcacgtgccccgtctcgcgagattcttgattcccttgcaagctggccagatcatcagagcagatattctgcctcttcgccttcaagatgctttttgggtcgagaaagtaacagcattcgcaactcctcttcaggcttatccgggaacaagggtcaattgcgagtcaacttccatcctcgatactctcaaatcatctatgggcgccgtcctactcaagcctacaatatgtcccctcgtcgactacggactggagcgcttcccctgcattacgccaaatatcgaggaagactttgaagagaaactctctttcaactggatctccacgaaaccgttaacccgcaagcgtctcgttgttattgggtgcagtaaccaagatcccgcaggcggaggctggactcaattcgctcatcgcgccgcagtagcactaggcatcgatctcatcatcatcgagcgcgatgactggtggatcacacaacctcaatatgcctcctggtacgagtacctgatcccggcaccagcgcaatggtgggaagacccctcgcgacctgagatggtcgatgaaatcgtcgatatggtcaacaaatactgcaactcgggcaacgcaaaagaaggattcaaaggcatcaacgacgtaggcggaatcgtaacatttatcgaagccttccaaatccccgtcagcgctgcggcagccaagctcaaactcccgcaccagtcaacatccgccttcgagacagcaacaaacaaatacaaactgggaaaattccagaacaggacagcagcactcgccggaagtgccgaagaagccctttccctcgtcaattcccctgaatccgagctcaattttccactcatagtgaaaccctgcttcggcctaaactccgacggcgtgtctcgcgtcgacagcgccgcagaactatcccaagcaataaccgtcgcgcaaaacgcaggaaagaacaaatacggcggaaaagtcctcgtagagtcatactgcgacggtccagaagtcgacgtaaacatggtattcatcgacggcgaagtccacttctgcgaaatctgcgacgactttcctaaatccgcagatatccagacatctccaaacacatcagacactcgcaggaacttccacgaaaccgccatggtgtttccctccgctctgccagaggccgaacaactctctttgaaaaccgcagtccaaaatacaatcaaaggcatgggcttcacgacaggaataatgcacgtcgaagcgcgcgtagctcactcggcaacacgctacacatcaatcaacggcgtcgtcgacctgcaccccgtccctcaatcccagtcccaatctcaatcccagattcaacccccaagcccctggataatagaagtcaacccgcgccccccgggacttttcgcctcgcagacccccgaatccgtctacggaataaactactggggactctccctccttctcgccatcgccgacatcccccgcgcaaaggccctctcccaatcatttacctccggagcccaaagccacacagtactcgtcatgatcccggtgaacttcgaccagcaaacctgcgagggaatcttcgactccgacgatgtctgcgctgagttacttgcccgcaagccggaattacgccaacatattggacgagcgggttgtttgttgaagagaggacagaaggtgccgcatcctagtgtgggaaagaatacttttgttgcgtatttgaatgttttctcgaggacttctaggacggaggcattgaaggttgctgagacagtccggaaggagttgcggtatcggattcgttga

SEQ ID NO: 23020 - protein, 704 aa, Muscodor strobelii
  misc_feature: SGI Peptide ID NO. 567827
  misc_feature (52)..(701): NCBI GI: 238844074 Blast Desc: conserved [Microsporum canis CBS 113480]
  misc_feature (58)..(701): NCBI GI: 238485654 Blast Desc: conserved [Aspergillus flavus NRRL3357] gi|220698944|gb|EED55283.1| conserved [Aspergillus flavus NRRL3357]
  misc_feature (58)..(698): NCBI GI: 169771751 Blast Desc: [Aspergillus oryzae RIB40] gi|83768204|dbj|BAE58343.1| protein product [Aspergillus oryzae]
  misc_feature (42)..(701): NCBI GI: 119494142 Blast Desc: NFIA_007600 [Neosartorya fischeri NRRL 181] gi|119412143|gb|EAW22084.1| conserved [Neosartorya fischeri NRRL 181]
  misc_feature (1)..(704): NCBI GI: 46109598 Blast Desc: FG01681.1 [Gibberella zeae PH-1]
  misc_feature (42)..(701): NCBI GI: 159122515 Blast Desc: conserved [Aspergillus fumigatus A1163]
  misc_feature (111)..(701): NCBI GI: 70984449 Blast Desc: conserved [Aspergillus fumigatus Af293] gi|66845358|gb|EAL85693.1| conserved [Aspergillus fumigatus Af293]
  misc_feature (81)..(704): NCBI GI: 116205653 Blast Desc: CHGG_10710 [Chaetomium globosum CBS 148.51] gi|88176838|gb|EAQ84306.1| CHGG_10710 [Chaetomium globosum CBS 148.51]
  misc_feature (13)..(703): NCBI GI: 240108640 Blast Desc: CPC735_009910 [Coccidioides posadasii C735 delta SOWgp]
  misc_feature (59)..(703): NCBI GI: 212535522 Blast Desc: conserved [Penicillium marneffei ATCC 18224] gi|210070316|gb|EEA24406.1| conserved [Penicillium marneffei ATCC 18224]
MSEIHKAHIWAHDDNYQTKCIEWSWKTTFVSKFESKDATPVQVVDFLLCISSSSLPVHITSIAQDELVLRLDEDDNAQVLTQEDVGNEDILGFLKDCIYTASKAHVPRLARFLIPLQAGQIIRADILPLRLQDAFWVEKVTAFATPLQAYPGTRVNCESTSILDTLKSSMGAVLLKPTICPLVDYGLERFPCITPNIEEDFEEKLSFNWISTKPLTRKRLVVIGCSNQDPAGGGWTQFAHRAAVALGIDLIIIERDDWWITQPQYASWYEYLIPAPAQWWEDPSRPEMVDEIVDMVNKYCNSGNAKEGFKGINDVGGIVTFIEAFQIPVSAAAAKLKLPHQSTSAFETATNKYKLGKFQNRTAALAGSAEEALSLVNSPESELNFPLIVKPCFGLNSDGVSRVDSAAELSQAITVAQNAGKNKYGGKVLVESYCDGPEVDVNMVFIDGEVHFCEICDDFPKSADIQTSPNTSDTRRNFHETAMVFPSALPEAEQLSLKTAVQNTIKGMGFTTGIMHVEARVAHSATRYTSINGVVDLHPVPQSQSQSQSQIQPPSPWIIEVNPRPPGLFASQTPESVYGINYWGLSLLLAIADIPRAKALSQSFTSGAQSHTVLVMIPVNFDQQTCEGIFDSDDVCAELLARKPELRQHIGRAGCLLKRGQKVPHPSVGKNTFVAYLNVFSRTSRTEALKVAETVRKELRYRIR

SEQ ID NO: 23021 - DNA, 3720 bp, Muscodor strobelii
  misc_feature: SGI EST ID NO. CUFF.54102.2
  misc_feature: Variant of the nucleotide sequence at SEQ ID NO 23019
cggtacttgctcgtttagtctgagtaaatttagagaaggaaatatgaaatacgatatatatcgggaaactaaatcaataaaaacaggcaaggcgtgatactgtgccgtattcatacaggtcaaggcagacttcgcaataccgaaattggtctcgatccttggtccaagcgctaccgtatcgggtccgttgccagataccccaggcccaaaggtactgtatccttgcgtgtatcacggccggaggagtgacatttaatcttcgccaaaataaccatctttgcggaatagctgcctgtcatccgccgccgcccacgtgtcatgagctcctacccaagcgtagctagacgttccccgatagccgtcatgtacggatgagtcttccttgatattgatcaaggatcgactcagctgaggtgaggggtatgacgatggctatgctaattttattgcaacgtctatcataccactcactacttgtgaagcccacgatcatgaaaccaaaggaatacacgtacctgcaatcttgtttctcttttgagaacttcgtagttattgccagtcataggatacaaaggtacggtacttttcttattttgtgggacctagtcacctggaggtccgtaatgtgcaagctaagatcaacgctaggaggtatcatatcgcggagataggtggtaacgtgttagaccactgcctatttgcgacttatgtagtgttagtgggataattgggaacacgacacgccggatactgcctcgctcgaaggaatcagatacaggtctagctgaaggagtcccgtattttgggatccatctgcgattgttcagttatgtaggcccgaggggtttcggatgtcaggaactgtcctccgttggaggcataaggatgagtatgaggatttggtataaagggaatgacgtcgcgaggtgggatgagagaaggagttgatggattcatcgttcagaggttttatttcgtggacgcgcataagaagagtgaagtgaactcttcctttcaaactagtcgctaaaatgtccgagatacataaagcccatatctgggctcatgatgataactatcagaccaaatgtatagaatggagttggaaaacgactttcgtctccaaatttgagtctaaggacgcaacgcctgttcaggttgtcgacttcttgctctgcataagctctagcagtttgcctgttcatatcactagcattgctcaggatgagctagtactccgcttggacgaagatgataacgcgcaagttcttactcaagaggacgttggaaacgaagatatattgggatttttgaaagattgcatatacactgcttcgaaggctcacgtgccccgtctcgcgagattcttgattcccttgcaagctggccagatcatcagagcagatattctgcctcttcgccttcaagatgctttttgggtcgagaaagtaacagcattcgcaactcctcttcaggcttatccgggaacaagggtcaattgcgagtcaacttccatcctcgatactctcaaatcatctatgggcgccgtcctactcaagcctacaatatgtcccctcgtcgactacggactggagcgcttcccctgcattacgccaaatatcgaggaagactttgaagagaaactctctttcaactggatctccacgaaaccgttaacccgcaagcgtctcgttgttattgggtgcagtaaccaagatcccgcaggcggaggctggactcaattcgctcatcgcgccgcagtagcactaggcatcgatctcatcatcatcgagcgcgatgactggtggatcacacaacctcaatatgcctcctggtacgagtacctgatcccggcaccagcgcaatggtgggaagacccctcgcgacctgagatggtcgatgaaatcgtcgatatggtcaacaaatactgcaactcgggcaacgcaaaagaaggattcaaaggcatcaacgacgtaggcggaatcgtaacatttatcgaagccttccaaatccccgtcagcgctgcggcagccaagctcaaactcccgcaccagtcaacatccgccttcgagacagcaacaaacaaatacaaactgggaaaattccagaacaggacagcagcactcgccggaagtgccgaagaagccctttccctcgtcaattcccctgaatccgagctcaattttccactcatagtgaaaccctgcttcggcctaaactccgacggcgtgtctcgcgtcgacagcgccgcagaactatcccaagcaataaccgtcgcgcaaaacgcaggaaagaacaaatacggcggaaaagtcctcgtagagtcatactgcgacggtccagaagtcgacgtaaacatggtattcatcgacggcgaagtccacttctgcgaaatctgcgacgactttcctaaatccgcagatatccagacatctccaaacacatcagacactcgcaggaacttccacgaaaccgccatggtgtttccctccgctctgccagaggccgaacaactctctttgaaaaccgcagtccaaaatacaatcaaaggcatgggcttcacgacaggaataatgcacgtcgaagcgcgcgtagctcactcggcaacacgctacacatcaatcaacggcgtcgtcgacctgcaccccgtccctcaatcccagtcccaatctcaatcccagattcaacccccaagcccctggataatagaagtcaacccgcgccccccgggacttttcgcctcgcagacccccgaatccgtctacggaataaactactggggactctccctccttctcgccatcgccgacatcccccgcgcaaaggccctctcccaatcatttacctccggagcccaaagccacacagtactcgtcatgatcccggtgaacttcgaccagcaaacctgcgagggaatcttcgactccgacgatgtctgcgctgagttacttgcccgcaagccggaattacgccaacatattggacgagcgggttgtttgttgaagagaggacagaaggtgccgcatcctagtgtgggaaagaatacttttgttgcgtatttgaatgttttctcgaggacttctaggacggaggcattgaaggttgctgagacagtccggaaggagttgcggtatcggattcgttgagggatcttgtacaccatttgcgcattctctggggttggaagactatcgacaatcgccttggaagccggaacaagatcgaaatgaggatgaattggtgcttgcggcgttttgtacgttctgtgattctgtatgatcagcatgtttgaaggataggcagtactatgcaagattttcgaggaacatttgtatcagatagagctcttgttttggagttggtggattggcccgcttatcggttacgcatagaatgacatagaattcacgatacattatatacagaatattcgccaagcttcagttctatatatttcatgtatgataatcatcattcgtatatatctacagactgtaggtgaattccgggttttcgcgatccgtgagatccataaactcttgtccgtcaatcttgacatactctgggctctcgcgaatcgctgctttgatcttattttgacgtttgcaccagaaataggtgaataccagagtcaagtctgcaacgatgagagtcaccagcaagaccgtcgcagcattacgaaacaacggcgcatcgctgggccgaaaaacctgcggcccg

SEQ ID NO: 23022 - DNA, 2106 bp, Muscodor strobelii
  misc_feature: SGI cDNA ID NO. 567828
  misc_feature: Encodes the peptide sequence at SEQ ID NO 23023
atgacatacctacaagacgagatccaagccttctctctcaacaatccagaagagttctggggagctcaggcctcacatctccactggcataaaaatcccacatcgatcctcacgaaaacgtcgaagaagttgaagtctggcgtcgaacacccgcattggaagtggtttgatggaggcgagatctcgacttgttataattgcgttgatcgccatgtggaagccggtaatggagaccgcccggcgattttctgggatagtgctgttacgggagtgaaacagacgctgacgtacaaacagttgctcgatgaggttgagactacggctggtgcgttgagagaggagggcgtacagaaaggggacgtggttctggtttatagtgtgcccatgattcccgcagccttaataggcatcctggcaataaatcgtctaggtgcaattcacgccgtagtgttcggcggatttgcaccagcatctctcgctcagcgcattgaagcttcgaagccagttgcgattatgacagcttcttgcggcattgagggcaacaagccacctacggcttataagccattcattcgtgacgcgattcgactctccagtttcaagccaaaccgtgttattgtttggcagcggaatgaaaaaagatgggatgttctggataaggcgagtggagagcgcaactggtttaagatggtgaggagttgcagggcgaggaaggtcaaagctgcttgcgtccctgttggctcaaacgatggcatatacatcatttatacaagtgggacgacaggcacaccgaaaggtgttgttcgtaatgccggcggccacgctgttggcttacatctctcaattgcatacgtgttcgggatacggggtcccggagacgttatattcacggccagtgatattggatgggttgtagttgcacaggttggacattcctacatcatctatgcgccacttctcactggagccacaacggtccttttcgaaggcaaacctatcgggactccagatagctctacgttctggaggatcatacaggaatacaatgtttcgacactcttcaccgctcccaccgcgttaagagcgataaagcgcgatgatcccggaaataaacacctcaagagaataggacaacaaggcggaatgaaaagcctcaaggccctgttcttggcaggcgaacgttcggaaccgtcgattatcacgatgtatcaacaactgatagagaaatatggggcacctggtgctcttgtcatagacaattggtggtcttccgaaagcggctccccaatttctggtataggtcttttgccacaagccgggagagatagactgggtgcaacagagtctcctaagctaccacagattcagcccggcagcgctggcaaagcactacctggcttcgatgtcagatgcgtagatgacaatggcaatgaggttaaggcgggtaagatgggcaacattgtgttgggcatccctcttgcgcccacaggctttactacattgtggaacgatgatgagagattttacaagagctatctaaagcggtttgacggcaaatggattgatacaggcgatgctggaatgatcaacgcggaaggatttatcagcataatgagccgtagtgacgatttgatcaatactgccggccatcgcttatccaccggttcgatcgagcaggccatcaccagccatcccatggtagctgaggcgagtgttgttggcgttccagactcgatcaagggacagctaccattcgcattcgtcacattgtcggtgcctgaccatccaacttcagccattcctagtgaatccttatacaatgagatacaacagcaagtgcggaaacaaattggaggaatcgcgaccctgggaggaattgtgcaaggtaaaggaatgatccctaaaacgcgatctggaaaaaccctccggcgtgtgctaagagaacttgttgagaatgccgtacatggtgaatacgagaaggacgtacaataccccgccacgattgaagattcttcggtcatcgacgtggcaagaaagaaagtcgctgaatacttccaagagaggggagatgcacacaaagcactcgaagctagagcgaaactttga

SEQ ID NO: 23023 - protein, 701 aa, Muscodor strobelii
  misc_feature: SGI Peptide ID NO. 567828
  misc_feature (96)..(572): Pfam Id: PF00501 Pfam Desc: AMP-binding enzyme
  misc_feature (5)..(701): NCBI GI: 154315726 Blast Desc: BC1G_04435 [Botryotinia fuckeliana B05.10] gi|150846831|gb|EDN22024.1| BC1G_04435 [Botryotinia fuckeliana B05.10]
  misc_feature (1)..(701): NCBI GI: 28949993 Blast Desc: related to acetyl coenzyme A synthetase [Neurospora crassa]
  misc_feature (2)..(701): NCBI GI: 189211109 Blast Desc: propionate-CoA ligase [Pyrenophora tritici-repentis Pt-1C-BFP] gi|187977978|gb|EDU44604.1| propionate-CoA ligase [Pyrenophora tritici-repentis Pt-1C-BFP]
  misc_feature (3)..(700): NCBI GI: 256732174 Blast Desc: [Nectria haematococca mpVI 77-13-4]
  misc_feature (5)..(700): NCBI GI: 171691813 Blast Desc: protein product [Podospora anserina] gi|170945855|emb|CAP72656.1| protein product [Podospora anserina]
  misc_feature (1)..(701): NCBI GI: 116179904 Blast Desc: CHGG_00580 [Chaetomium globosum CBS 148.51] gi|88184877|gb|EAQ92345.1| CHGG_00580 [Chaetomium globosum CBS 148.51]
  misc_feature (3)..(701): NCBI GI: 169600937 Blast Desc: SNOG_03323 [Phaeosphaeria nodorum SN15] gi|111068934|gb|EAT90054.1| SNOG_03323 [Phaeosphaeria nodorum SN15]
  misc_feature (1)..(694): NCBI GI: 67539326 Blast Desc: AN5833.2 [Aspergillus nidulans FGSC A4] gi|40739152|gb|EAA58342.1| AN5833.2 [Aspergillus nidulans FGSC A4] gi|259480012|tpe|CBF70755.1| TPA: propionate-CoA ligase FGSC
  misc_feature (2)..(701): NCBI GI: 119193100 Blast Desc: CIMG_00927 [Coccidioides immitis RS]
  misc_feature (2)..(701): NCBI GI: 240105853 Blast Desc: AMP-binding enzyme, [Coccidioides posadasii C735 delta SOWgp]
  misc_feature (10)..(674): SWISSPROT Homolog: EC 6.2.1.1 Acetate--CoA ligase
MTYLQDEIQAFSLNNPEEFWGAQASHLHWHKNPTSILTKTSKKLKSGVEHPHWKWFDGGEISTCYNCVDRHVEAGNGDRPAIFWDSAVTGVKQTLTYKQLLDEVETTAGALREEGVQKGDVVLVYSVPMIPAALIGILAINRLGAIHAVVFGGFAPASLAQRIEASKPVAIMTASCGIEGNKPPTAYKPFIRDAIRLSSFKPNRVIVWQRNEKRWDVLDKASGERNWFKMVRSCRARKVKAACVPVGSNDGIYIIYTSGTTGTPKGVVRNAGGHAVGLHLSIAYVFGIRGPGDVIFTASDIGWVVVAQVGHSYIIYAPLLTGATTVLFEGKPIGTPDSSTFWRIIQEYNVSTLFTAPTALRAIKRDDPGNKHLKRIGQQGGMKSLKALFLAGERSEPSIITMYQQLIEKYGAPGALVIDNWWSSESGSPISGIGLLPQAGRDRLGATESPKLPQIQPGSAGKALPGFDVRCVDDNGNEVKAGKMGNIVLGIPLAPTGFTTLWNDDERFYKSYLKRFDGKWIDTGDAGMINAEGFISIMSRSDDLINTAGHRLSTGSIEQAITSHPMVAEASVVGVPDSIKGQLPFAFVTLSVPDHPTSAIPSESLYNEIQQQVRKQIGGIATLGGIVQGKGMIPKTRSGKTLRRVLRELVENAVHGEYEKDVQYPATIEDSSVIDVARKKVAEYFQERGDAHKALEARAKL

SEQ ID NO: 23024 - DNA, 3216 bp, Muscodor strobelii
  misc_feature: SGI EST ID NO. CUFF.54229.0
  misc_feature: Variant of the nucleotide sequence at SEQ ID NO 23022
ccccaataggtatatatatgagagctggggttggtttggggttgatgcggggacagctcaaagctcaagcaaatgatcacatctcgtctcaagtgtgccttgcatccaattttcttctaagatttatgtcagcgtacagcaatttttctttcattctcttaaccacattcgaagttcctcctgggcagcgctctagatcaagagcagcgagctagttcaatcgatttcgccatccagcacgaccaggatacgcgccatacgtacctctccgaactcttcacacggactctcacaatttcatctcactgccacactcacactcacatctcaccgcgtctcctctttctcacctttcccatttcccttcaccccaaggtcccaaccgcgactctgtagttcacgatgacatacctacaagacgagatccaagccttctctctcaacaatccagaagagttctggggagctcaggcctcacatctccactggcataaaaatcccacatcgatcctcacgaaaacgtcgaagaagttgaagtctggcgtcgaacacccgcattggaagtggtttgatggaggcgagatctcgacttgttataattgcgttgatcgccatgtggaagccggtaatggagaccgcccggcgattttctgggatagtgctgttacgggagtgaaacagacgctgacgtacaaacagttgctcgatgaggttgagactacggctggtgcgttgagagaggagggcgtacagaaaggggacgtggttctggtttatatgcccatgattcccgcagccttaataggcatcctggcaataaatcgtctaggtgcaattcacgccgtagtgttcggcggatttgcaccagcatctctcgctcagcgcattgaagcttcgaagccagttgcgattatgacagcttcttgcggcattgagggcaacaagccacctacggcttataagccattcattcgtgacgcgattcgactctccagtttcaagccaaaccgtgttattgtttggcagcggaatgaaaaaagatgggatgttctggataaggcgagtggagagcgcaactggtttaagatggtgaggagttgcagggcgaggaaggtcaaagctgcttgcgtccctgttggctcaaacgatggcatatacatcatttatacaagtgggacgacaggcacaccgaaaggtgttgttcgtaatgccggcggccacgctgttggcttacatctctcaattgcatacgtgttcgggatacggggtcccggagacgttatattcacggccagtgatattggatgggttgtaggtaccggaaaaagctcttcgaccccctttctatttatttcttggctactgtttggaccaaattcgatctttcgccttccacaaaaccccggcgtatccttacgataaggctgcagatgacgatcacttacatgaagttgcacaggttggacattcctacatcatctatgcgccacttctcactggagccacaacggtccttttcgaaggcaaacctatcgggactccagatagctctacgttctggaggatcatacaggaatacaatgtttcgacactcttcaccgctcccaccgcgttaagagcgataaagcgcgatgatcccggaaataaacacctcaagagaataggacaacaaggcggaatgaaaagcctcaaggccctgttcttggcaggcgaacgttcggaaccgtcgattatcacgatgtatcaacaactgatagagaaatatggggcacctggtgctcttgtcatagacaattggtggtcttccgaaagcggctccccaatttctggtataggtcttttgccacaagccgggagagatagactgggtgcaacagagtctcctaagctaccacagattcagcccggcagcgctggcaaagcactacctggcttcgatgtcagatgcgtagatgacaatggcaatgaggttaaggcgggtaagatgggcaacattgtgttgggcatccctcttgcgcccacaggctttactacattgtggaacgatgatgagagattttacaagagctatctaaagcggtttgacggcaaatggattgatacaggcggtgagtatcgatatagtaacgcccgtctcgtcgaatcatgtcctttgaattactaacttgcacacagatgctggaatgatcaacgcggaaggatttatcagcataatgagccgtagtgacgatttgatcaatactgccggccatcgcttatccaccggtaataccactcccgcattcctgggacctttgcgcaatagctgacgtgaggcacgtggacaggttcgatcgagcaggccatcaccagccatcccatggtagctgaggcgagtgttgttggcgttccagactcgatcaagggacagctaccattcgcattcgtcacattgtcggtgcctgaccatccaacttcagccattcctagtgaatccttatacaatgagatacaacagcaagtgcggaaacaaattggaggaatcgcgaccctgggaggaattgtgcaaggtaaaggaatgatccctaaaacgcgatctggaaaaaccctccggcgtgtgctaagagaacttgttgagaatgccgtacatggtgaatacgagaaggacgtacaataccccgccacgattgaagattcttcggtcatcgacgtggcaagaaagaaagtcgctgaatacttccaagagaggggagatgcacacaaagcactcgaagctagagcgaaactttgagagttcttttctctatgtggatgttgtattcgagttccacaactatgcttcgacatgactggttgcggagtgttgatgcctacgcgatgccgagacccgatgtgaccgaactgacaagcggcgctgtccacgccgtaccagccacagtcgggttgatgtcatagtgatctttgtggtggtttgtatcacgatttggggccaattaggcaagacttatgattgcacaaaacttaaggtaggtcaacaaacaatagtgtatcaatatcgtcctatatcttaacatagcctcaacgccataccttcggtcaggatggtgactccgctttggtccgccccggcgcggtgaagcacgacatcatgttagctacccctgcgcaaacatacggattgaccaatcaaaaaagctgcccctcgctaaacgttaaatttagctttctgcattttca

SEQ ID NO: 23025 - DNA, 1317 bp, Muscodor strobelii
  misc_feature: SGI cDNA ID NO. 567829
  misc_feature: Reduced expression when VOC is produced
  misc_feature: Encodes the peptide sequence at SEQ ID NO 23026
atgtggtggttatttcgcatagtctcgagctccgtcttcctgctgacgatagtcctctccatccccatcagcttcgatgtaggcggccgcgacactggcctggcttacagcctcgccctcttcctcttctactttctatacagcgccgccaagctcgccacgcctgacgactcgcgcgtaagatggggccttaccaaggttctacaggtctcccagtggatagtgattcccaccctgttgatatggtccctgcacaacttcgccgtggacgccagcagtaccgactgggtgtccaagaccatcggcagcttgggccgacagacgcaacatgccacctggacggactggttcttcgggaatgggggccttgtcgagtcggtcacgctcggcagctgggacaagactttgcgctactccagtcccgtctttcaactggctgaagggttttgcactctgctagtcatccaagccggaggccagatctcgcgatggttggtgaacagaggccggagcgatacttgggtgcttatcttgctcatactttcggcctctatcatcgcgccctcggtctacttcttgtggaggatggctctgttcccatccatcaacaatatcgatgcaaccttgataggcgtgacggtgacgtctgccttcttcctaggcgctatcggaatcacgacaggccgaggaaatcccatcgagtcgtcgttgctcttcgcctacgtggtcctttgcgtctaccagatcttcacagactatgtacagtcgcctgaagcccaagcggccgccgaggcacaagctgccagccaacccgacttcccgcctttacccccgatcatcatggcgagctattcgacgtttctccatcttcttggaaccctgccatccgccgtcttctcctcgctaagcttcctgcatgccgcgttccagaccatcgctccgtccgtcattatatcgctcgtctatcgcatcatcgtcttctactgcgccaccagaatcattcccgccgttcgagagtcgggtgcgagggcgctgatgcaagaaccatcgttcgacgactcagacggcgctaatcgactcctcggtgtcctctcttggttctcaccttccattctcatcgccgtctacaccagtcttcttttgcaacacttctcgacgagcgaccaagagggctggactctgcgggacggcgacgcagatggaaatttcttcagatggatcaatgtggctgcgactatgggtctatacgccattgagctatacctaggaaatgaggatgctgacggcggtatggtgagtcattggaaaatggactga

SEQ ID NO: 23026 - protein, 438 aa, Muscodor strobelii
  misc_feature: SGI Peptide ID NO. 567829
  misc_feature (5)..(423): Pfam Id: PF08426 Pfam Desc: ICE2
  misc_feature (1)..(438): NCBI GI: 46137721 Blast Desc: FG10376.1 [Gibberella zeae PH-1]
  misc_feature (1)..(438): NCBI GI: 171692087 Blast Desc: protein product [Podospora anserina] gi|170945992|emb|CAP72793.1| protein product [Podospora anserina]
  misc_feature (1)..(438): NCBI GI: 256731877 Blast Desc: [Nectria haematococca mpVI 77-13-4]
  misc_feature (3)..(438): NCBI GI: 85099608 Blast Desc: NCU01279 [Neurospora crassa OR74A] gi|28922342|gb|EAA31580.1| conserved [Neurospora crassa OR74A] gi|38566805|emb|CAE76113.1| conserved [Neurospora crassa]
  misc_feature (3)..(438): NCBI GI: 240110003 Blast Desc: CPC735_035080 [Coccidioides posadasii C735 delta SOWgp]
  misc_feature (3)..(438): NCBI GI: 119184844 Blast Desc: CIMG_07177 [Coccidioides immitis RS]
  misc_feature (3)..(438): NCBI GI: 258568584 Blast Desc: conserved [Uncinocarpus reesii 1704] gi|237906482|gb|EEP80883.1| conserved [Uncinocarpus reesii 1704]
  misc_feature (3)..(438): NCBI GI: 261198961 Blast Desc: ICE2 family protein [Ajellomyces dermatitidis SLH14081] gi|239595034|gb|EEQ77615.1| ICE2 family protein [Ajellomyces dermatitidis SLH14081] gi|239609854|gb|EEQ86841.1|
  misc_feature (3)..(438): NCBI GI: 145239037 Blast Desc: An08g00470 [Aspergillus niger] gi|134076668|emb|CAK45199.1| protein product [Aspergillus niger]
  misc_feature (3)..(438): NCBI GI: 154288296 Blast Desc: conserved [Ajellomyces capsulatus NAm1] gi|150408584|gb|EDN04125.1| conserved [Ajellomyces capsulatus NAm1]
  misc_feature: Useful for introducing or modulating the production of volatile compounds
MWWLFRIVSSSVFLLTIVLSIPISFDVGGRDTGLAYSLALFLFYFLYSAAKLATPDDSRVRWGLTKVLQVSQWIVIPTLLIWSLHNFAVDASSTDWVSKTIGSLGRQTQHATWTDWFFGNGGLVESVTLGSWDKTLRYSSPVFQLAEGFCTLLVIQAGGQISRWLVNRGRSDTWVLILLILSASIIAPSVYFLWRMALFPSINNIDATLIGVTVTSAFFLGAIGITTGRGNPIESSLLFAYVVLCVYQIFTDYVQSPEAQAAAEAQAASQPDFPPLPPIIMASYSTFLHLLGTLPSAVFSSLSFLHAAFQTIAPSVIISLVYRIIVFYCATRIIPAVRESGARALMQEPSFDDSDGANRLLGVLSWFSPSILIAVYTSLLLQHFSTSDQEGWTLRDGDADGNFFRWINVAATMGLYAIELYLGNEDADGGMVSHWKMD

SEQ ID NO: 23027 - DNA, 2481 bp, Muscodor strobelii
  misc_feature: SGI EST ID NO. CUFF.54111.0
  misc_feature: Variant of the nucleotide sequence at SEQ ID NO 23025
tgcgaccttcgctatcaatcaatcacattagcttcggctggggcatgttatttctactcgattaaaattcactggtccctcccaatgtcccactgcggttttggccgctccacggctgcacaagcaccaccgcatttgttgccaaaaattcaacatcaacaagactgtcgccgtcttttcatccctcggccttgtctgccttaatacgtgcctagcaaacgcctatagttcctatacttttttactctttttgactatatccttccgtccctatagtcacccttcctataacccccccttcagttgcatacccctgggttaaggtacctgatcagcctctgcctcccgccctgcccacttatctacgtacaagtatccgtcacatttcatcatacctctcgacgcgtgacctgcgccctcctcggctgcctttgactcagactcaacagcccgccagcccagttctcgtcatcgaccctctgcccgggagacactcgcctgcatagccgagtatacaggacaaaaagttctcatcgcgctgtcgctaaactcagctttacatccgggataccttggtacctctgcaccaacatccaacccgaactgtcgccctggccagctgcctcgctaggtcggcgcggcaatagccaccatcaccgcgctcatgtggtggttatttcgcatagtctcgagctccgtcttcctgctgacgatagtcctctccatccccatcagcttcgatgtaggcggccgcgacactggcctggcttacagcctcgccctcttcctcttctactttctatacagcgccgccaagctcgccacgcctgacgactcgcgcgtaagatggggccttaccaaggttctacaggtctcccagtggatagtgattcccaccctgttgatatggtccctgcacaacttcgccgtggacgccagcagtaccgactgggtgtccaagaccatcggcagcttgggccgacagacgcaacatgccacctggacggactggttcttcgggaatgggggccttgtcgagtcggtcacgctcggcagctgggacaagactttgcgctactccagtcccgtctttcaactggctgaagggttttgcactctgctagtcatccaagccggaggccagatctcgcgatggttggtgaacagaggccggagcgatacttgggtgcttatcttgctcatactttcggcctctatcatcgcgccctcggtctacttcttgtggaggatggctctgttcccatccatcaacaatatcgatgcaaccttgataggcgtgacggtgacgtctgccttcttcctaggcgctatcggaatcacgacaggccgaggaaatcccatcgagtcgtcgttgctcttcgcctacgtggtcctttgcgtctaccagatcttcacagactatgtacagtcgcctgaagcccaagcggccgccgaggcacaagctgccagccaacccgacttcccgcctttacccccgatcatcatggcgagctattcgacgtttctccatcttcttggaaccctgccatccgccgtcttctcctcgctaagcttcctgcatgccgcgttccagaccatcgctccgtccgtcattatatcgctcgtctatcgcatcatcgtcttctactgcgccaccagaatcattcccgccgttcgagagtcgggtgcgagggcgctgatgcaagaaccatcgttcgacgactcagacggcgctaatcgactcctcggtgtcctctcttggttctcaccttccattctcatcgccgtctacaccagtcttcttttgcaacacttctcgacgagcgaccaagagggctggactctgcgggacggcgacgcagatggaaatttcttcagatggatcaatgtggctgcgactatgggtctatacgccattgagctatacctaggaaatgaggatgctgacggcggtatggtgagtcattggaaaatggactgagagcgagaaagacgcgaagacgcgaagacataaagggggagggggcacctggcggatagtcaagagaggcacgggcctcaaataccccaaagaagagttcggttcacattcacgtcgattaaggatgtttcacttgactcctcgcggaaaagtcaagattgacacaaagcacggttgtgcattgaagggattttacacagcacctggcgttggggagtacttttatatgtcactacgagatactgataaaggcggtatgggaagcaagcgcatgcgtctaagggtctaacagataccagttcggagataagaacgaacatgcacgcgcgcgagtataggcatgaagaggatcattggattcgaggcgaggttgataccagctgatggttcttggtggtaatgaacaggaactcaatagcactgaagtaaaattgatatcacaagttatctgttacgtttcccactgtgcgactcaatgacgtaggtagaaactggatgta

SEQ ID NO: 23028 - DNA, 1413 bp, Muscodor strobelii
  misc_feature: SGI cDNA ID NO. 567830
  misc_feature: Encodes the peptide sequence at SEQ ID NO 23029
atgcccttgcaatttgtcaataactcagtcatcgacccaaaggccaggaagttgatccgcagccatgtgatgaaagggaagaatgtcggaaagaccaggacaccaaagcggaaagatccagcagtggtcgcgagagaacaggctatagccgagagaaagaaagccgtcgtggaaaaatactatgaacgaaatgattttgcaacagatatggtgccgagtcacagatccatcgttgctgtgactcgcaatatctgcaacgacagaaatctcttgcacttcccaggcacgctcacttctcacaatatgtttcagcttcagcagttgtacttctatcttctcgatgctatctgtcctccccaattctgcagcccaactgatctgatggcgtggatatggttccggatggtgttcctcgacgaagcttacttccacatcacaattgcaacatcttccgccgtcgcccgctttctaggcgccgagtcagaggaaaattccaatatcgccatataccacatgtccaagacttttcgcttactaaatcaaaagctctcgggacgtgatgcactctcggactctactatcgctgccattatcggaacgacgttctgggatagacttcacggcgacccagataaggcaatggttcacctgaatggggcgatcaagttaatagaactaacaggtggcatccggcaacttgcggaaagagagttcccgattgcagaaaagactctacgagccgacattgaacttgctctggccatgggatctaaacttcggttctgttccgacgacgtgcctagtcattacttgatccccaatctccgagaatatcttcataataagggcgatgcaccaattctctctcaatccgtgtgtatagaacttcgcgaagtggctctcgatataatcggtcttgcacatgttctccgagaccaggaaggacggagacagaaattggacgtatttaactttcagagcaccatgctctttcttgggtatcaacttttggaagtcggctatgcccccaacgattcaaacgttactactacacttgatgatttagtgtacctatcgcttacgtcctttctgattacgacttggataggcatcggtcgcaagatcatcaggtttcctactcttttcgagtcttttcgactggctgctcagaatatctgcattaataccgaacccagccaagttgttctctgggcccttgtcgtcggcagagtttcagtgctctcgaaacaagacgacatttggctcatgccgaaaatacgaaacgttgctcaaaggctcaagcttcgtaactgggccgaggctaccgaattactgaacgaattcccttggattaaggccctacataatcaagagggccaatcgttctggtattctattatgcgcagtcgctaa

SEQ ID NO: 23029 - protein, 470 aa, Muscodor strobelii
  misc_feature: SGI Peptide ID NO. 567830
  misc_feature (1)..(463): NCBI GI: 240274981 Blast Desc: conserved [Ajellomyces capsulatus H143]
  misc_feature (1)..(463): NCBI GI: 225558546 Blast Desc: conserved [Ajellomyces capsulatus G186AR]
  misc_feature (5)..(466): NCBI GI: 242812770 Blast Desc: conserved [Talaromyces stipitatus ATCC 10500] gi|218714365|gb|EED13788.1| conserved [Talaromyces stipitatus ATCC 10500]
  misc_feature (4)..(463): NCBI GI: 256720043 Blast Desc: NECHADRAFT_89397 [Nectria haematococca mpVI 77-13-4]
  misc_feature (169)..(469): NCBI GI: 154303792 Blast Desc: BC1G_08780 [Botryotinia fuckeliana B05.10] gi|150854364|gb|EDN29556.1| BC1G_08780 [Botryotinia fuckeliana B05.10]
  misc_feature (1)..(466): NCBI GI: 212534058 Blast Desc: conserved [Penicillium marneffei ATCC 18224] gi|210069584|gb|EEA23674.1| conserved [Penicillium marneffei ATCC 18224]
  misc_feature (1)..(463): NCBI GI: 256729299 Blast Desc: NECHADRAFT_84116 [Nectria haematococca mpVI 77-13-4]
  misc_feature (168)..(459): NCBI GI: 67540290 Blast Desc: AN6315.2 [Aspergillus nidulans FGSC A4] gi|40739509|gb|EAA58699.1| [Aspergillus nidulans FGSC A4] gi|259479469|tpe|CBF69719.1| TPA: conserved [Aspergillus nidulans
  misc_feature (1)..(469): NCBI GI: 159122257 Blast Desc: AFUB_099800 [Aspergillus fumigatus A1163]
  misc_feature (123)..(466): NCBI GI: 212544576 Blast Desc: conserved [Penicillium marneffei ATCC 18224] gi|210065411|gb|EEA19505.1| conserved [Penicillium marneffei ATCC 18224]
MPLQFVNNSVIDPKARKLIRSHVMKGKNVGKTRTPKRKDPAVVAREQAIAERKKAVVEKYYERNDFATDMVPSHRSIVAVTRNICNDRNLLHFPGTLTSHNMFQLQQLYFYLLDAICPPQFCSPTDLMAWIWFRMVFLDEAYFHITIATSSAVARFLGAESEENSNIAIYHMSKTFRLLNQKLSGRDALSDSTIAAIIGTTFWDRLHGDPDKAMVHLNGAIKLIELTGGIRQLAEREFPIAEKTLRADIELALAMGSKLRFCSDDVPSHYLIPNLREYLHNKGDAPILSQSVCIELREVALDIIGLAHVLRDQEGRRQKLDVFNFQSTMLFLGYQLLEVGYAPNDSNVTTTLDDLVYLSLTSFLITTWIGIGRKIIRFPTLFESFRLAAQNICINTEPSQVVLWALVVGRVSVLSKQDDIWLMPKIRNVAQRLKLRNWAEATELLNEFPWIKALHNQEGQSFWYSIMRSR

SEQ ID NO: 23030 - DNA, 3265 bp, Muscodor strobelii
  misc_feature: SGI EST ID NO. CUFF.54246.1
  misc_feature: Variant of the nucleotide sequence at SEQ ID NO 23028
acgagttaaggttagcaggtgtttctcttacatctgccagtttgctgcgctaccacgaggtcgatagcttgatggcttgacagctcaatatctcctgacagcgctcggagttaagcacgatgacgccgcccacggaacactgggaccagtgtgcgtattcgggcttcgcggactgcgacttgtaacaactccaacggaataccaaagtccaagcgaagtgataaaatgaaacactctggaaatttgatgcccggaacaccgaatagaaatgcccttgcaatttgtcaataactcagtcatcgacccaaaggccaggaagttgatccgcagccatgtgatgaaagggaagaatgtcggaaagaccaggacaccaaagcggaaagatccagcagtggtcgcgagagaacaggctatagccgagagaaagaaagccgtcgtggaaaaatactatgaacgaaatgattttgcaacagatatggtgccgagtcacagatccatcgttgctgtgactcgcaatatctgcaacgacagaaatctcttgcacttcccaggcacgctcacttctcacaatatgtttcagcttcagcagttgtacttctatcttctcgatgctatctgtcctccccaattctgcagcccaactgatctgatggcgtggatatggttccggatggtgttcctcgacgaagcttacttccacatcacaattgcaacatcttccgccgtcgcccgctttctaggcgccgagtcagaggaaaattccaatatcgccatataccacatgtccaagacttttcgcttactaaatcaaaagctctcgggacgtgatgcactctcggactctactatcgctgccattatcggaacgacgttctgggatagacttcacggcgacccagataaggcaatggttcacctgaatggggcgatcaagttaatagaactaacaggtggcatccggcaacttgcggaaagagagttcccgattgcagaaaagactctacgagccgacattgaacttgctctggccatgggatctaaacttcggttctgttccgacgacgtgcctagtcattacttgatccccaatctccgagaatatcttcataataagggcgatgcaccaattctctctcaatccgtgtgtatagaacttcgcgaagtggctctcgatataatcggtcttgcacatgttctccgagaccaggaaggacggagacagaaattggacgtatttaactttcagagcaccatgctctttcttgggtatcaacttttggaagtcggctatgcccccaacgattcaaacgttactactacacttgatgatttagtgtacctatcgcttacgtcctttctgattacgacttggataggcatcggtcgcaagatcatcaggtttcctactcttttcgagtcttttcgactggctgctcagaatatctgcattaataccgaacccagccaagttgttctctgggcccttgtcgtcggcagagtttcagtgctctcgaaacaagacgacatttggctcatgccgaaaatacgaaacgttgctcaaaggctcaagcttcgtaactgggccgaggctaccgaattactgaacgaattcccttggattaaggccctacataatcaagagggccaatcgttctggtattctattatgcgcagtcgctaagatcttaggtcgattatcggccgtggtggaacactgtctgctcaaaaagtggcgagcgcgattattacaccgctgagaatgcgcagctcctcgtgcttgtagatactatcgtacatatccacctaatttccaaggccatgccctacaagattttttgaacgcaaccaggctcgatctcatcaagcttctcgacgaccccggcccatatcttcttctgcatcgcctggccctcagagtcgttgacccaatcaggaacgtaatgactggcaaaccgaaagtcagcattcagcacatcagaagggttcgtcgggatcactgactccttgaccttgcagtccgataaatatcgtccgtggctctccttaccagcgatcgcggcatgtagtacagtgcgactgccttcctcagccgttcgaccaagtattgctgtcatgctggacacagtaatccatgtgatgatcttggcatgtctaaggaggcctgtcttgcatagacctggactgatcatgttcatcactacaccagtgcgtgatactggagccaagcgcgaaagctcgcgccaagcatagatttggagcagctttgatagaccgtatctatcataggccattaacctctaaagcgcacatcatgggtgttcgcgaaagatgacatacctactatccatctccgaattctcatcgttcaatccaccccagatgtcgtccttggtatcttcaaggttctgcttcctgtggaagcccagaccgctagttaccatgacgaggtgtggcacagtcgagtatgtcttcgctgtttccgacactgtcgaaggaaactagatcagcgactgctctcagatcatatcaaccagcagtactcacttttgggaagcaacaacacagccaataacaacgttgaaaacacgttgacagtaatactcgtctccatcccctccgccctagagaacttatcaagcgcaatcgacgcattctcaatgacaccatcgattctctccagttccttcacagccctcttcgcaaaccctttcacagaatcatagctcgagaggtccaatttccaaacttcagcgatgtctctcttattggtatctctctcgatcttggacagtgcttcctcgcctgcggctaagttgcgaacggcgattatgacttttctggcttctaggcgcacgagatgctttgctgtttcgaagccgatgccgttgttagaccctgttacgatgaagattcgacctcgaatgtcggatggggttgcgaggaggggcatggtccgccagtgttcgcggaggaactcggggatggattcgccggttgacatcttgaatgcgttggggataatgggatgttgggtgttagttggattattgggttcgagaacggagttaaagctgggaatgtggctggtgacttaagatacgtgtattgacgatagagaataagaagatgtctcgtaaaggtgagggcacgcactctatatactcatagtcctgcggcttctatccctgtactgcaccatcaatcaagggagtttacgtcctcccgaatgtccgtttttcattatcagcatgaatcatactcggca

SEQ ID NO: 23031 - DNA, 1002 bp, Muscodor strobelii
  misc_feature: SGI cDNA ID NO. 567831
  misc_feature: Encodes the peptide sequence at SEQ ID NO 23032
atgtcaaccggcgaatccatccccgagttcctccgcgaacactggcggaccatgcccctcctcgcaaccccatccgacattcgaggtcgaatcttcatcgtaacagggtctaacaacggcatcggcttcgaaacagcaaagcatctcgtgcgcctagaagccagaaaagtcataatcgccgttcgcaacttagccgcaggcgaggaagcactgtccaagatcgagagagataccaataagagagacatcgctgaagtttggaaattggacctctcgagctatgattctgtgaaagggtttgcgaagagggctgtgaaggaactggagagaatcgatggtgtcattgagaatgcgtcgattgcgcttgataagttctctagggcggaggggatggagacgagtattactgtcaacgtgttttcaacgttgttattggctgtgttgttgcttcccaaaatgtcggaaacagcgaagacatactcgactgtgccacacctcgtcatggtaactagcggtctgggcttccacaggaagcagaaccttgaagataccaaggacgacatctggggtggattgaacgatgagaattcggagatggatagtagatacggtctatcaaagctgctccaaatctatgcttggcgcgagctttcgcgcttggctccagtatcacgcactggtgtagtgatgaacatgatcagtccaggtctatgcaagacaggcctccttagacatgccaagatcatcacatggattactgtgtccagcatgacagcaatacttggtcgaacggctgaggaaggcagtcgcactgtactacatgccgcgatcgctggtaaggagagccacggacgatatttatcggactgcaaggtcaaggatcattacgttcctgattgggtcaacgactctgagggccaggcgatgcagaagaagatatgggccggggtcgtcgagaagcttgatgagatcgagcctggttgcgttcaaaaaatcttgtag

SEQ ID NO: 23032 - protein, 333 aa, Muscodor strobelii
  misc_feature: SGI Peptide ID NO. 567831
  misc_feature (30)..(181): Pfam Id: PF00106 Pfam Desc: short chain dehydrogenase
  misc_feature (30)..(153): Pfam Id: PF00106 Pfam Desc: short chain dehydrogenase
  misc_feature (10)..(322): NCBI GI: 256729504 Blast Desc: NECHADRAFT_84147 [Nectria haematococca mpVI 77-13-4]
  misc_feature (13)..(329): NCBI GI: 225558548 Blast Desc: conserved [Ajellomyces capsulatus G186AR]
  misc_feature (7)..(333): NCBI GI: 212534056 Blast Desc: short-chain dehydrogenase/reductase family protein, [Penicillium marneffei ATCC 18224] gi|210069583|gb|EEA23673.1| short-chain dehydrogenase/reductase family protein, [Penicillium
  misc_feature (9)..(332): NCBI GI: 169605103 Blast Desc: SNOG_05567 [Phaeosphaeria nodorum SN15] gi|111065511|gb|EAT86631.1| SNOG_05567 [Phaeosphaeria nodorum SN15]
  misc_feature (14)..(333): NCBI GI: 242789310 Blast Desc: short-chain dehydrogenase/reductase family protein, [Talaromyces stipitatus ATCC 10500] gi|218717922|gb|EED17342.1| short-chain dehydrogenase/reductase family protein, [Talaromyces
  misc_feature (16)..(292): NCBI GI: 119473781 Blast Desc: short chain dehydrogenase/reductase family oxidoreductase, [Neosartorya fischeri NRRL 181] gi|119406919|gb|EAW16869.1| short chain dehydrogenase/reductase
  misc_feature (9)..(324): NCBI GI: 212533413 Blast Desc: short-chain dehydrogenase, [Penicillium marneffei ATCC 18224] gi|210072227|gb|EEA26316.1| short-chain dehydrogenase, [Penicillium marneffei ATCC 18224]
  misc_feature (13)..(329): NCBI GI: 240274983 Blast Desc: conserved [Ajellomyces capsulatus H143]
  misc_feature (19)..(333): NCBI GI: 159128417 Blast Desc: short-chain dehydrogenase/reductase family protein, [Aspergillus fumigatus A1163]
  misc_feature (19)..(292): NCBI GI: 146323149 Blast Desc: short-chain dehydrogenase/reductase family protein [Aspergillus fumigatus Af293] gi|129556489|gb|EAL86408.2| short-chain dehydrogenase/reductase family protein, [Aspergillus
  misc_feature (31)..(293): SWISSPROT Homolog: EC 1.1.1.189 Prostaglandin-E(2) 9-reductase
  misc_feature (31)..(293): SWISSPROT Homolog: EC 1.1.1.197 15-hydroxyprostaglandin dehydrogenase (NADP(+))
  misc_feature (31)..(293): SWISSPROT Homolog: EC 1.1.1.184 Carbonyl reductase (NADPH)
MSTGESIPEFLREHWRTMPLLATPSDIRGRIFIVTGSNNGIGFETAKHLVRLEARKVIIAVRNLAAGEEALSKIERDTNKRDIAEVWKLDLSSYDSVKGFAKRAVKELERIDGVIENASIALDKFSRAEGMETSITVNVFSTLLLAVLLLPKMSETAKTYSTVPHLVMVTSGLGFHRKQNLEDTKDDIWGGLNDENSEMDSRYGLSKLLQIYAWRELSRLAPVSRTGVVMNMISPGLCKTGLLRHAKIITWITVSSMTAILGRTAEEGSRTVLHAAIAGKESHGRYLSDCKVKDHYVPDWVNDSEGQAMQKKIWAGVVEKLDEIEPGCVQKIL

SEQ ID NO: 23033 - DNA, 378 bp, Muscodor strobelii
  misc_feature: SGI cDNA ID NO. 567832
  misc_feature: Encodes the peptide sequence at SEQ ID NO 23034
atggatccgaccaagatgaccaatgctgagcttaatgagcggcttcaagcacttgataaggacaaagacaaagcactagaagatttcaatggctacctgagcgcagagcgccgaaataacgacaaaatacgcgctttcgcggatgaacatgatagactcgaaaaacaaatcgaacaagagaagaatgccggccgagacacaacagagcttgagcaacaattgaaacaaaatgacgcggatcacgactatgctcataagaacgcgctgagattatgccaacacaggcttgaccaacatgacgagatagacaagtcaggtaaaggaaaggttgccgtacaagacgagatcaacaagcgtcgtaatgacggtccatcctga

SEQ ID NO: 23034 - protein, 125 aa, Muscodor strobelii
  misc_feature: SGI Peptide ID NO. 567832
MDPTKMTNAELNERLQALDKDKDKALEDFNGYLSAERRNNDKIRAFADEHDRLEKQIEQEKNAGRDTTELEQQLKQNDADHDYAHKNALRLCQHRLDQHDEIDKSGKGKVAVQDEINKRRNDGPS

SEQ ID NO: 23035 - DNA, 272 bp, Muscodor strobelii
  misc_feature: SGI EST ID NO. CUFF.54131.0
  misc_feature: Variant of the nucleotide sequence at SEQ ID NO 23033
ggccagtttgaaaacaacttatacgcctctttacctttctctgcgacagtttctgtgaggtcgagaacataaatcacggtggccatggatccgaccaagatgaccaatgctgagcttaatgagcggcttcaagcacttgataaggacaaagacaaagcactagaagatttcaatggctacctgagcgcagagcgccgaaataacgacaaaatacgcgctttcgcggatgaacatgatagactcgaaaaacaaatcgaacaagagaagaatgc

SEQ ID NO: 23036 - DNA, 1125 bp, Muscodor strobelii
  misc_feature: SGI cDNA ID NO. 567833
  misc_feature: Encodes the peptide sequence at SEQ ID NO 23037
atgattcttccaaaggttgcagctttatgggcattgagcctaccaacagtctcgactgcgcaatacacgccggcggcacaagttggctatgaagcgcggagtctcgaggagatacatgcggtagcagtgaaagagcctggcaacctcaaaattgttgctggcggcgatggtggacatcagtgggacagtgtcatcgacgcgtggaaccagaagtttccagatatcaagctcgactttaccatcgatctgtccaaatatgccgatgttcgcattgaccgcgagtggtatgaaggcaatgaaagtaccgatatcgcccttctgcagacgctacatgactacccacgctggaaagaacaaaatcgtctgttgcattacaagccagccgtgtttgacgacttgtatttcagcgagaaggatccagatggggcatggatccccgctgcatcatacccgctgacatttccccccatagtcaccagcggcgccattaagtatgacagcacgaaggtcgatgcatccgagatcccgacagactttgccgatttcaccgacgcaaaatggaaaaacaagctcgttctgacatatccaaatgatgacgatgttaccctttacctcttcagcaagcttctgtcacagtatgggttcgaatggctcgaggccctccagaagaataacgtgacttgggtacgaggcacacacacaacggtcgctatgatccaagatgcgcataatgatacatcggatcctctagcgatcactttcaccagtatagaagggcaaggcgacttttggaacgtttctcagccgatcaatccgcctaagtcgggcgtgtcatggtcgcaagctgcggggatctttgctagtaccaagcgacccaacaaagctaagctattcatcagctggatcgtgagcgatgaattccagggatctcttgtcagctatggatatccgagtgcacgcgcgaagctagataagtacgcagtctatagcaacccaagcgcggagattacaggctacagacagttcctcaacgatcaagcgggtgctgcgcgatggaggcagacgtttgaaagcataatcggtacggcctcagggccagatccgttgtcgattttcccgcaataa

SEQ ID NO: 23037 - protein, 374 aa, Muscodor strobelii
  misc_feature: SGI Peptide ID NO. 567833
  misc_feature (20)..(374): NCBI GI: 238491256 Blast Desc: conserved [Aspergillus flavus NRRL3357] gi|220697278|gb|EED53619.1| conserved [Aspergillus flavus NRRL3357]
  misc_feature (27)..(374): NCBI GI: 169773293 Blast Desc: [Aspergillus oryzae RIB40] gi|83768976|dbj|BAE59113.1| protein product [Aspergillus oryzae]
  misc_feature (1)..(373): NCBI GI: 156055060 Blast Desc: SS1G_04881 [Sclerotinia sclerotiorum 1980] gi|154702666|gb|EDO02405.1| SS1G_04881 [Sclerotinia sclerotiorum 1980]
  misc_feature (11)..(373): NCBI GI: 154304493 Blast Desc: BC1G_09122 [Botryotinia fuckeliana B05.10] gi|150854102|gb|EDN29294.1| BC1G_09122 [Botryotinia fuckeliana B05.10]
  misc_feature (31)..(369): NCBI GI: 169609637 Blast Desc: SNOG_07911 [Phaeosphaeria nodorum SN15] gi|160701883|gb|EAT84187.2| SNOG_07911 [Phaeosphaeria nodorum SN15]
  misc_feature (1)..(369): NCBI GI: 170097509 Blast Desc: [Laccaria bicolor S238N-H82] gi|164645377|gb|EDR09625.1| [Laccaria bicolor S238N-H82]
  misc_feature (6)..(369): NCBI GI: 170097507 Blast Desc: [Laccaria bicolor S238N-H82] gi|164645376|gb|EDR09624.1| [Laccaria bicolor S238N-H82]
  misc_feature (28)..(369): NCBI GI: 170120467 Blast Desc: [Laccaria bicolor S238N-H82] gi|164633432|gb|EDQ98111.1| [Laccaria bicolor S238N-H82]
  misc_feature (12)..(369): NCBI GI: 46110763 Blast Desc: FG02263.1 [Gibberella zeae PH-1]
  misc_feature (32)..(369): NCBI GI: 270494586 Blast Desc: extracellular solute-binding protein family 1 [Acidovorax avenae subsp. avenae ATCC 19860] gi|270328614|gb|EFA39420.1| extracellular solute-binding protein
MILPKVAALWALSLPTVSTAQYTPAAQVGYEARSLEEIHAVAVKEPGNLKIVAGGDGGHQWDSVIDAWNQKFPDIKLDFTIDLSKYADVRIDREWYEGNESTDIALLQTLHDYPRWKEQNRLLHYKPAVFDDLYFSEKDPDGAWIPAASYPLTFPPIVTSGAIKYDSTKVDASEIPTDFADFTDAKWKNKLVLTYPNDDDVTLYLFSKLLSQYGFEWLEALQKNNVTWVRGTHTTVAMIQDAHNDTSDPLAITFTSIEGQGDFWNVSQPINPPKSGVSWSQAAGIFASTKRPNKAKLFISWIVSDEFQGSLVSYGYPSARAKLDKYAVYSNPSAEITGYRQFLNDQAGAARWRQTFESIIGTASGPDPLSIFPQ

SEQ ID NO: 23038 - DNA, 348 bp, Muscodor strobelii
  misc_feature: SGI EST ID NO. CUFF.54140.0
  misc_feature: Variant of the nucleotide sequence at SEQ ID NO 23036
cgatgacacaggaccgaatttacagtctcacgagaacagtaatgcggcgcaaggccaggtatctgacgatgatagcaaagaaggatataaatgaagagctactgcccgggtcaatatcgtgattttcacaacatccagcgccaaatctgtcattgagttcgccgaaatgattcttccaaaggttgcagctttatgggcattgagcctaccaacagtctcgactgcgcaatacacgccggcggcacaagttggctatgaagcgcggagtctcgaggagatacatgcggtagcagtgaaagagcctggcaacctcaaaattgttgctggcggcgatggtggacatcagtg

SEQ ID NO: 23039 - DNA, 1368 bp, Muscodor strobelii
  misc_feature: SGI cDNA ID NO. 567834
  misc_feature: Encodes the peptide sequence at SEQ ID NO 23040
atgaccttctcttactatgttcttagcacagtcatgctgggcactttaagtcaggcaggaagcgctgtaatggcggaatctcttccttttgtgcgccgagatataaccgacaacaatagcaccacagcgccgacagcgcctctcggtccaggtgactttggattaccggagaataacctagctctccaggcctcgcactggtgggcttggggtcagccgggcatggcactgtctaatatatccacatcaacacccgacgacgatacctcgcgtatactggacacgaatgactttcatgattatatttctagcctcgattgcactcccacttacgtgactgtccaattcaaagatcaggactcgttcgataaggctcaggaagagtgggagtatctcacacctggtgtacctaatgctggcagtaccgcgcgcaacgtcaagctagtggccaatactcacccaggcgatactagcaacacctgctcaggccgacagccgtatgtgatcaaccagatcgcctacgacagttgcagccggaccgcaaagctctacgggccggccatggattggctcgatgcgttcgatggctatacgttcagcgccaatgccgtctcaggccccggtgcctcaaactcgactaatcagaaacccgagacaatcgctgccctctttttcggcgaaatacagtatgatcttgcggctaccatcacggcgagccggagaagcaacactggggctttcgacgggacggtgcagatatcgattcccaatctatcgatccaattcttagatatccaggcgttctcgaacggcagcgaagaaacgactactggtagcataggtcctggatcgattttcggcgacgctgtcgacttcggtctcggcaccatcgcgggggcgttagctctcacagtcgaggccaccctgggatcttttgggctccaagccgttgactttggcgccacttttagcatatcacctgcaccggctactatcaccgttggcttcggaaaccaaggcagcgcgaccacaaacaacaacttcggcatcaacatcatcaacagcaacgaaagagccctgaccggcaacggtatcgtagcccagttgtcaccgacgcttgctgtgggcgtcggcatccaggggttcggggggatctcgtctgccggggttattttccagggaacctcgatactctatagcgctgaccagactggatgtagtggtggcagattcggtctgtcaacgaagactgacgtgttggcgggcgcacggctttttggcggtatcgcacccatcgagcaggcgcaggacaatacaattggcggcttcatcacgacaaatactaacacttttaacagttgcctctag

SEQ ID NO: 23040 - protein, 455 aa, Muscodor strobelii
  misc_feature: SGI Peptide ID NO. 567834
  misc_feature (61)..(195): NCBI GI: 256721715 Blast Desc: NECHADRAFT_88666 [Nectria haematococca mpVI 77-13-4]
  misc_feature (63)..(315): NCBI GI: 255941270 Blast Desc: Pc16g10980 [Penicillium chrysogenum Wisconsin 54-1255] gi|211586027|emb|CAP93768.1| Pc16g10980 [Penicillium chrysogenum Wisconsin 54-1255]
  misc_feature (63)..(251): NCBI GI: 115433142 Blast Desc: [Aspergillus terreus NIH2624] gi|114189560|gb|EAU31260.1| [Aspergillus terreus NIH2624]
  misc_feature (71)..(205): NCBI GI: 238503141 Blast Desc: conserved [Aspergillus flavus NRRL3357] gi|220691614|gb|EED47962.1| conserved [Aspergillus flavus NRRL3357]
  misc_feature (71)..(205): NCBI GI: 169776447 Blast Desc: [Aspergillus oryzae RIB40] gi|83771425|dbj|BAE61557.1| protein product [Aspergillus oryzae]
  misc_feature (54)..(310): NCBI GI: 169776249 Blast Desc: [Aspergillus oryzae RIB40] gi|83771326|dbj|BAE61458.1| protein product [Aspergillus oryzae]
  misc_feature (54)..(310): NCBI GI: 238502951 Blast Desc: conserved [Aspergillus flavus NRRL3357] gi|220691519|gb|EED47867.1| conserved [Aspergillus flavus NRRL3357]
MTFSYYVLSTVMLGTLSQAGSAVMAESLPFVRRDITDNNSTTAPTAPLGPGDFGLPENNLALQASHWWAWGQPGMALSNISTSTPDDDTSRILDTNDFHDYISSLDCTPTYVTVQFKDQDSFDKAQEEWEYLTPGVPNAGSTARNVKLVANTHPGDTSNTCSGRQPYVINQIAYDSCSRTAKLYGPAMDWLDAFDGYTFSANAVSGPGASNSTNQKPETIAALFFGEIQYDLAATITASRRSNTGAFDGTVQISIPNLSIQFLDIQAFSNGSEETTTGSIGPGSIFGDAVDFGLGTIAGALALTVEATLGSFGLQAVDFGATFSISPAPATITVGFGNQGSATTNNNFGINIINSNERALTGNGIVAQLSPTLAVGVGIQGFGGISSAGVIFQGTSILYSADQTGCSGGRFGLSTKTDVLAGARLFGGIAPIEQAQDNTIGGFITTNTNTFNSCL

SEQ ID NO: 23041 - DNA, 2142 bp, Muscodor strobelii
  misc_feature: SGI cDNA ID NO. 567835
  misc_feature: Elevated expression when VOC is produced
  misc_feature: Encodes the peptide sequence at SEQ ID NO 23042
atggctatgaaggcggtaaaagtacttgccgctggcatggcttcattgccgttggcacaggcgtacgatatccagggcatgctgggcgctcctcgccgaagtgccgcgcttgtgaatccaagcggaaaactggctctcttctcatctgtcagctacgattggacagagcaggcagccacaacaacgtggcagcttatggacgtgaagactggcagtatcactgaggcgcctttcgactccgcagtctacgaggtcgtctgggttggtcctacggatactagtatcctgtacatcaatggcacgaacgacgatattcctggcggtgtgacactctatactgcagacataagtcgtaaggtgttctcgccaaagctagttgcttccttggcggcacctttccaggggctcaaggccgtgcagaccaaagacggtggtatcaattatgtcgtaaatgcgctcagccactggggcaatggctcagcctataatcccgagtttgcatccacgccattaagctcgggtgtggtctatgactctaactggatccgccactgggacacttatgtcacgcccgagcgatacgcggttttcggtggcagtattgctccccgaaataacagttatgctataaaccgtcagccgaagaacctcatatggggaattaacgccacggtcactcgccctgagtctcctgtccagccatttggagacgccggcgactatgatatctcgcctgatggaaagacagtcgcttttctcacaaaggcacctgaactacccaaagccaactatacagctagttatatctatattgtgccccatgacggctctgagaagcctgttcaagtcaatggaccaaagacgacagcacctctgcaagccaagggagcaagcgcatcaccacgatggtctcctgacggcactaagcttgcatatcttcaaatggatggaataacctatgagtctgatcgcaacaaactgtacatcgcagcgatcgacggccttaattccgaggtttccgttattgctgaggactgggactcgactccatcaggattcaagtggtatcctgatggcgaaagtatttgggcaatttctgagctgtactcatcgtctcgcctttacgtggttcctgtcgacgcagatagctctttcgtgccgtctaactttactggttctgatactagtgttgctgactttgaaattctgcctgatggaagcgctctcgtttcctccgcatccagctggactagccgcatgttctacacgcaggcgccgggtgaagagaaaaccgtgctttttactgctaacgaggtcgatgcggagcttcagggtttgcagcctaaggacgtatcggatttctgggtcgagaacgacgacggtgacatgatccaaacatttatgtactacccgactgacttcgacgcgacgaagaaatatccgcttatgttcgtgatccatggtggtcctcagagctctcttggcgatatctggagcgtgcgctggaatctccgtctctgggctgagcaaggcttcgtcgtgacatccacgcaatttactgggacgccaagttacggtcaggcgttcaccgacaagatcaccaacaactggggtggaacaccatatacggatcttgtcaaggtcttcgaacatctcagggataacgtgccgttcgtggacacagaccgtgccatcgcgggaggcgccagcttcggttgctacatgaccaattggattcaaggccacaaccttggtcgggagttcaaggggttggtctgccacgacggtaagatgacggacgagctgtactttatcgagcacgacgccgacggcacgatctgggaggaccgcgcgaattacgaacgctgggatccgctgggccacgcagctaacttctcaacgccggaactcgtcgttcacagtgatcgcgactaccgcattgccatttctgaggggctccagacctttaatgttcttcagggtcggggagtacctagccgtttcattcacttccccgacgagacccatcagattacgaaccgaaacaatgctctcttgtggcatacgcatattttcaactggattcgatattgggctgggctcgacgaggagcttatacaagagggtattgtgcatcagtga

SEQ ID NO: 23042 - protein, 713 aa, Muscodor strobelii
  misc_feature: SGI Peptide ID NO. 567835
  misc_feature (498)..(702): Pfam Id: PF00326 Pfam Desc: Prolyl oligopeptidase family
  misc_feature (1)..(713): NCBI GI: 169595722 Blast Desc: SNOG_00604 [Phaeosphaeria nodorum SN15] gi|111070979|gb|EAT92099.1| SNOG_00604 [Phaeosphaeria nodorum SN15]
  misc_feature (1)..(713): NCBI GI: 189209211 Blast Desc: dipeptidyl-peptidase V precursor [Pyrenophora tritici-repentis Pt-1C-BFP] gi|187977031|gb|EDU43657.1| dipeptidyl-peptidase V precursor [Pyrenophora tritici-repentis
  misc_feature (27)..(702): NCBI GI: 255935533 Blast Desc: Pc13g03560 [Penicillium chrysogenum Wisconsin 54-1255] gi|211583413|emb|CAP91425.1| Pc13g03560 [Penicillium chrysogenum Wisconsin 54-1255]
  misc_feature (25)..(703): NCBI GI: 121698850 Blast Desc: secreted dipeptidyl peptidase [Aspergillus clavatus NRRL 1] gi|119395969|gb|EAW06401.1| secreted dipeptidyl peptidase [Aspergillus clavatus NRRL 1]
  misc_feature (3)..(703): NCBI GI: 115443380 Blast Desc: dipeptidyl-peptidase 5 precursor [Aspergillus terreus NIH2624] gi|114188366|gb|EAU30066.1| dipeptidyl-peptidase 5 precursor [Aspergillus terreus NIH2624]
  misc_feature (3)..(701): NCBI GI: 225683368 Blast Desc: dipeptidyl-peptidase [Paracoccidioides brasiliensis Pb03]
  misc_feature (25)..(703): NCBI GI: 229485354 Blast Desc: DPP5_ASPFC RecName: Full=Dipeptidyl-peptidase 5; AltName: Full=Dipeptidyl-peptidase V; Short=DPP V; Short=DppV; Flags: Precursor gi|159129322|gb|EDP54436.1| secreted dipeptidyl
  misc_feature (25)..(703): NCBI GI: 119480747 Blast Desc: secreted dipeptidyl peptidase [Neosartorya fischeri NRRL 181] gi|119408556|gb|EAW18505.1| secreted dipeptidyl peptidase [Neosartorya fischeri NRRL 181]
  misc_feature (25)..(703): NCBI GI: 71001112 Blast Desc: secreted dipeptidyl peptidase DppV [Aspergillus fumigatus Af293] gi|229485355|sp|P0C959.1|DPP5_ASPFU RecName: Full=Dipeptidyl-peptidase 5; AltName: Full=Dipeptidyl-peptidase
  misc_feature (25)..(703): NCBI GI: 2340046 Blast Desc: secreted dipeptidyl peptidase [Aspergillus fumigatus]
  misc_feature (281)..(691): SWISSPROT Homolog: EC 3.4.19.1 Acylaminoacyl-peptidase
  misc_feature: Useful for introducing or modulating the production of volatile compounds
MAMKAVKVLAAGMASLPLAQAYDIQGMLGAPRRSAALVNPSGKLALFSSVSYDWTEQAATTTWQLMDVKTGSITEAPFDSAVYEVVWVGPTDTSILYINGTNDDIPGGVTLYTADISRKVFSPKLVASLAAPFQGLKAVQTKDGGINYVVNALSHWGNGSAYNPEFASTPLSSGVVYDSNWIRHWDTYVTPERYAVFGGSIAPRNNSYAINRQPKNLIWGINATVTRPESPVQPFGDAGDYDISPDGKTVAFLTKAPELPKANYTASYIYIVPHDGSEKPVQVNGPKTTAPLQAKGASASPRWSPDGTKLAYLQMDGITYESDRNKLYIAAIDGLNSEVSVIAEDWDSTPSGFKWYPDGESIWAISELYSSSRLYVVPVDADSSFVPSNFTGSDTSVADFEILPDGSALVSSASSWTSRMFYTQAPGEEKTVLFTANEVDAELQGLQPKDVSDFWVENDDGDMIQTFMYYPTDFDATKKYPLMFVIHGGPQSSLGDIWSVRWNLRLWAEQGFVVTSTQFTGTPSYGQAFTDKITNNWGGTPYTDLVKVFEHLRDNVPFVDTDRAIAGGASFGCYMTNWIQGHNLGREFKGLVCHDGKMTDELYFIEHDADGTIWEDRANYERWDPLGHAANFSTPELVVHSDRDYRIAISEGLQTFNVLQGRGVPSRFIHFPDETHQITNRNNALLWHTHIFNWIRYWAGLDEELIQEGIVHQ

SEQ ID NO: 23043 - DNA, 1815 bp, Muscodor strobelii
  misc_feature: SGI EST ID NO. CUFF.54177.0
  misc_feature: Variant of the nucleotide sequence at SEQ ID NO 23041
cacaggcgtacgatatccagggcatgctgggcgctcctcgccgaagtgccgcgcttgtgaatccaagcggaaaactggctctcttctcatctgtcagctacgattggacagagcaggcagccacaacaacgtggcagcttatggacgtgaagactggcagtatcactgaggcgcctttcgactccgcagtctacgaggtcgtctgggttggtcctacggatactagtatcctgtacatcaatggcacgaacgacgatattcctggcggtgtgacactctatactgcagacataagtcgtaaggtgttctcgccaaagctagttgcttccttggcggcacctttccaggggctcaaggccgtgcagaccaaagacggtggtatcaattatgtcgtaaatgcgctcagccactggggcaatggctcagcctataatcccgagtttgcatccacgccattaagctcgggtgtggtctatgactctaactggatccgccactgggacacttatgtcacgcccgagcgatacgcggttttcggtggcagtattgctccccgaaataacagttatgctataaaccgtcagccgaagaacctcatatggggaattaacgccacggtcactcgccctgagtctcctgtccagccatttggagacgccggcgactatgatatctcgcctgatggaaagacagtcgcttttctcacaaaggcacctgaactacccaaagccaactatacagctagttatatctatattgtgccccatgacggctctgagaagcctgttcaagtcaatggaccaaagacgacagcacctctgcaagccaagggagcaagcgcatcaccacgatggtctcctgacggcactaagcttgcatatcttcaaatggatggaataacctatgagtctgatcgcaacaaactgtacatcgcagcgatcgacggccttaattccgaggtttccgttattgctgaggactgggactcgactccatcaggattcaagtggtatcctgatggcgaaagtatttgggcaatttctgagctgtactcatcgtctcgcctttacgtggttcctgtcgacgcagatagctctttcgtgccgtctaactttactggttctgatactagtgttgctgactttgaaattctgcctgatggaagcgctctcgtttcctccgcatccagctggactagccgcatgttctacacgcaggcgccgggtgaagagaaaaccgtgctttttactgctaacgaggtcgatgcggagcttcagggtttgcagcctaaggacgtatcggatttctgggtcgagaacgacgacggtgacatgatccaaacatttatgtactacccgactgacttcgacgcgacgaagaaatatccgcttatgttcgtgatccatggtggtcctcagagctctcttggcgatatctggagcgtgcgctggaatctccgtctctgggctgagcaaggcttcgtcgtgacatccacgcaatttactgggacgccaagttacggtcaggcgttcaccgacaagatcaccaacaactggggtggaacaccatatacggatcttgtcaaggtcttcgaacatctcagggataacgtgccgttcgtggacacagaccgtgccatcgcgggaggcgccagcttcggttgctacatgaccaattggattcaaggccacaaccttggtcgggagttcaaggggttggtctgccacgacggtaaggtgaatcaggtgggcgcgtatggtacgtatagaaagatctcacgcgagttatgttttgattgtattcttaagccatagt

SEQ ID NO: 23044 - DNA, 444 bp, Muscodor strobelii
  misc_feature: SGI cDNA ID NO. 567836
  misc_feature: Encodes the peptide sequence at SEQ ID NO 23045
atgtctcagattacgacctactcttatcccatcgtgggcgagtatatgcgcaagaaccatcactacagtgcagcggtgcgcacaggaaacagaatcaatatcgcaggccaaggcgggtggccgcgaacaaacgacaagttcgagatttcgactgatatcaacgctgaagtggaccaggcgttcgacaacgttgactatgtgctgaagcaagccggtggcaagggatggtcacaggtatacaaggtcacgacgtaccacctagacttcgcagagtcagcggagcgtgttgtcgagaactaccggaagtatatgccagatcactgtcctacttggactgccatcggtgtcaagcagctcggcctccccggtatgaatattgagattgaggtcgaggcgtatgatcctgagggtgcgaagttagttcatgagggcaagggaaattaa

SEQ ID NO: 23045 - protein, 147 aa, Muscodor strobelii
  misc_feature: SGI Peptide ID NO. 567836
  misc_feature (16)..(134): Pfam Id: PF01042 Pfam Desc: Endoribonuclease L-PSP
  misc_feature (20)..(134): Pfam Id: PF01042 Pfam Desc: Endoribonuclease L-PSP
  misc_feature (1)..(139): NCBI GI: 242797265 Blast Desc: L-PSP endoribonuclease family protein, [Talaromyces stipitatus ATCC 10500] gi|218719563|gb|EED18983.1| L-PSP endoribonuclease family protein, [Talaromyces stipitatus ATCC
  misc_feature (1)..(136): NCBI GI: 238492507 Blast Desc: L-PSP endoribonuclease family protein, [Aspergillus flavus NRRL3357] gi|220695984|gb|EED52326.1| L-PSP endoribonuclease family protein, [Aspergillus flavus NRRL3357]
  misc_feature (1)..(138): NCBI GI: 169866563 Blast Desc: CC1G_06058 [Coprinopsis cinerea okayama7#130] gi|116498952|gb|EAU81847.1| CC1G_06058 [Coprinopsis cinerea okayama7#130]
  misc_feature (1)..(137): NCBI GI: 256721535 Blast Desc: NECHADRAFT_93173 [Nectria haematococca mpVI 77-13-4]
  misc_feature (1)..(136): NCBI GI: 256733336 Blast Desc: NECHADRAFT_77309 [Nectria haematococca mpVI 77-13-4]
  misc_feature (1)..(135): NCBI GI: 255931927 Blast Desc: Pc12g06820 [Penicillium chrysogenum Wisconsin 54-1255] gi|211582139|emb|CAP80309.1| Pc12g06820 [Penicillium chrysogenum Wisconsin 54-1255]
  misc_feature (1)..(132): NCBI GI: 256720835 Blast Desc: NECHADRAFT_9618 [Nectria haematococca mpVI 77-13-4]
  misc_feature (1)..(139): NCBI GI: 261356937 Blast Desc: endoribonuclease L-psp family protein [Verticillium albo-atrum VaMs.102]
  misc_feature (1)..(136): NCBI GI: 145246094 Blast Desc: An12g02100 [Aspergillus niger] gi|134080008|emb|CAK48492.1| protein product [Aspergillus niger]
  misc_feature (1)..(132): NCBI GI: 46110555 Blast Desc: FG02159.1 [Gibberella zeae PH-1]
MSQITTYSYPIVGEYMRKNHHYSAAVRTGNRINIAGQGGWPRTNDKFEISTDINAEVDQAFDNVDYVLKQAGGKGWSQVYKVTTYHLDFAESAERVVENYRKYMPDHCPTWTAIGVKQLGLPGMNIEIEVEAYDPEGAKLVHEGKGN

SEQ ID NO: 23046 - DNA, 771 bp, Muscodor strobelii
  misc_feature: SGI EST ID NO. CUFF.54183.0
  misc_feature: Variant of the nucleotide sequence at SEQ ID NO 23044
ttaagatcgtgaagtctattcaaggtcatccagagaccgtattcgaagtgaaggataacacactaagatcctcgtactgaacaatatttcgtatcccatcatgtctcagattacgacctactcttatcccatcgtgggcgagtatatgcgcaagaaccatcactacagtgcagcggtgcgcacaggaaacagaatcaatatcgcaggccaaggcgggtggccgcgaacaaacgacaagttcgagatttcgactgatatcaacgctgaagtggaccaggcgttcgacaacgttgactatgtgctgaagcaagccggtggcaagggatggtcacaggtatacaaggtcacgacgtaccacctagacttcgcagagtcagcggagcgtgttgtcgagaactaccggaagtatatgccagatcactgtcctacttggactgccatcggtgtcaagcagctcggcctccccggtatgaatattgagattgaggtcgaggcgtatgatcctgagggtgcgaagttagttcatgagggcaagggaaattaattcctgcgaaggattatttggagttgaaatctgagtggtcgggctcgatctgtatcggaagtcttgcgacaacgcgaatacttatcgctacaatcactacaagtctgacggaatggagtcagtgtttccaatctcctcaatccgatataagctagccatatttctcagaccaaacgaagacgcgatgacaatttaagaacaataaaaaacagatcaatggagataaa

SEQ ID NO: 23047 - DNA, 285 bp, Muscodor strobelii
  misc_feature: SGI cDNA ID NO. 567837
  misc_feature: Encodes the peptide sequence at SEQ ID NO 23048
atgtcgaccttcaagaagctagaggccgagaaacagtcggaacgcgacgctttgcgaaaagctggtgagagtctgagggaataccaagagcttgacgataagctacacccgacgtatgcagacgacatgggtcagttgcaccatgactatgatgaacagcagctcaagcaaatgggaaagcggagagataagtgtcggcaagaggccagagaatggaccaaaaaggctgaggcttccaaagcgaagcaagcggagctgtcgcgacggcttggaaataagtcctga

SEQ ID NO: 23048 - protein, 94 aa, Muscodor strobelii
  misc_feature: SGI Peptide ID NO. 567837
MSTFKKLEAEKQSERDALRKAGESLREYQELDDKLHPTYADDMGQLHHDYDEQQLKQMGKRRDKCRQEAREWTKKAEASKAKQAELSRRLGNKS

SEQ ID NO: 23049 - DNA, 145 bp, Muscodor strobelii
  misc_feature: SGI EST ID NO. CUFF.54219.0
  misc_feature: Variant of the nucleotide sequence at SEQ ID NO 23047
accaagagcttgacgataagctacacccgacgtatgcagacgacatgggtcagttgcaccatgactatgatgaacagcagctcaagcaaatgggaaagcggagagataagtgtcggcaagaggccagagaatggaccaaaaaggc

SEQ ID NO: 23050 - DNA, 1128 bp, Muscodor strobelii
  misc_feature: SGI cDNA ID NO. 567838
  misc_feature: Encodes the peptide sequence at SEQ ID NO 23051
atggccgatcagcctgaacaggacatgcacatgctgatgccactaatccaagaggcagcacaagcagccgccaaagtctctcccagtgcatcgagcgcatctgcaccaccgccccagtcagcagcatcatccaagactccgactgcacagaatgatctctcattgcctccgccgtccggcccccaggtcgactacttcgccggcatcctcaaagagctggatccgtatcgatccacgcccatggagttcattagtctgctgctccacgctgctatccgcgacagtgctgttgctaccgagcttcaccgtctgagagccgagaagatccaaaatcccgatacctggcgacccatcatccccgttgccatcggtgacccccatcctgccacgccccaatcaccacacaaccagtttgcctcgactgccacgggtcagagcgttcggtaccagcgcgcccccgcagaccatgtcgtccagccgcgacagtcctcccagtcggacatcaagatgatgagcccaagcgacggtagaccaccgctggaccattccaaggtcgaccctgccctcaccgacttcaagcccaagcaagccgatgacgctgaaatgcaggaagcaccctgcgactttacctgggttctagaccaggctcagcatttcctcggctggaaagaggagcttgacggtccctcgggctcgtcacggacttccctcggcactactgctgccatcgagatccagaagctacttaaggagatgaatgcgcagatggacaagcatgagaacttcgccaaccgagtacacatcctatccgtcatgcgtgaagtcatcttcacggccgtcgccgctgacacgccactcggccgtgaatgtcgtgatgtatcgcagacctacgacctttcaacgctggaaccctcgccggactacaacatgcttggccgcccccaagcctacgacgcctgcttcttgttagccgcgcgaaagctaacaccggaacagcgcaagaagctccaagttctcgaagagggcaagtggatgcacgagctgcagcagctcgtggcccaggcaagccagaaggactgctatcctctcctcgagcaaaccctagtctggatcgatgccttccattag

SEQ ID NO: 23051 - protein, 375 aa, Muscodor strobelii
  misc_feature: SGI Peptide ID NO. 567838
MADQPEQDMHMLMPLIQEAAQAAAKVSPSASSASAPPPQSAASSKTPTAQNDLSLPPPSGPQVDYFAGILKELDPYRSTPMEFISLLLHAAIRDSAVATELHRLRAEKIQNPDTWRPIIPVAIGDPHPATPQSPHNQFASTATGQSVRYQRAPADHVVQPRQSSQSDIKMMSPSDGRPPLDHSKVDPALTDFKPKQADDAEMQEAPCDFTWVLDQAQHFLGWKEELDGPSGSSRTSLGTTAAIEIQKLLKEMNAQMDKHENFANRVHILSVMREVIFTAVAADTPLGRECRDVSQTYDLSTLEPSPDYNMLGRPQAYDACFLLAARKLTPEQRKKLQVLEEGKWMHELQQLVAQASQKDCYPLLEQTLVWIDAFH

SEQ ID NO: 23052 - DNA, 1699 bp, Muscodor strobelii
  misc_feature: SGI EST ID NO. CUFF.54378.1
  misc_feature: Variant of the nucleotide sequence at SEQ ID NO 23050
cggccaggtctcagccagtcagtcacagtctcttgccagtcattgcgttgcatcgcgcggggcgatcgcaagatacttctcgtcgcatctcgacttaataagtgggcagccttaaagaagtggacattgccccagagagtgccggactccatacgttcggtccatacattcggtccatactcggtccatagccacgaggccctactccatcgcctgctccatctgccactccattcgctgctccatcagtcgcgccggactccatatcatgcatcatggccgatcagcctgaacaggacatgcacatgctgatgccactaatccaagaggcagcacaagcagccgccaaagtctctcccagtgcatcgagcgcatctgcaccaccgccccagtcagcagcatcatccaagactccgactgcacagaatgatctctcattgcctccgccgtccggcccccaggtcgactacttcgccggcatcctcaaagagctggatccgtatcgatccacgcccatggagttcattagtctgctgctccacgctgctatccgcgacagtgctgttgctaccgagcttcaccgtctgagagccgagaagatccaaaatcccgatacctggcgacccatcatccccgttgccatcggtgacccccatcctgccacgccccaatcaccacacaaccagtttgcctcgactgccacgggtcagagcgttcggtaccagcgcgcccccgcagaccatgtcgtccagccgcgacagtcctcccagtcggacatcaagatgatgagcccaagcgacggtagaccaccgctggaccattccaaggtcgaccctgccctcaccgacttcaagcccaagcaagccgatgacgctgaaatgcaggaagcaccctgcgactttacctgggttctagaccaggctcagcatttcctcggctggaaagaggagcttgacggtccctcgggctcgtcacggacttccctcggcactactgctgccatcgagatccagaagctacttaaggagatgaatgcgcagatggacaagcatgagaacttcgccaaccgagtacacatcctatccgtcatgcgtgaagtcatcttcacggccgtcgccgctgacacgccactcggccgtgaatgtcgtgatgtatcgcagacctacgacctttcaacgctggaaccctcgccggactacaacatgcttggccgcccccaagcctacgacgcctgcttcttgttagccgcgcgaaagctaacaccggaacagcgcaagaagctccaagttctcgaagagggcaagtggatgcacgagctgcagcagctcgtggcccaggcaagccagaaggactgctatcctctcctcgagcaaaccctagtctggatcgatgccttccattagtgtggtccggattcgattatgatttgggatggtaggcgtttgggaaaaaagagttccgcgtgataagataccctttgtttctgcttggacttccacggattaatggggaaaagggggtactgcgacctcagttgttgagatcgactcaggaagagtgtgtacaccttacgtaggtaggtatgcatatgtgagagggtctcggtctggtcatgagatgtgtgtaatttggcataatggcataggggagaaaattcggcttagttgcatctaatagactgatgataattcaacctctt

SEQ ID NO: 23053 - DNA, 1926 bp, Muscodor strobelii
  misc_feature: SGI cDNA ID NO. 567839
  misc_feature: Encodes the peptide sequence at SEQ ID NO 23054
atggacaactccacgaccccttcatcggactccaatagctcacaggacctgggccaacagggccaacagagccaggacggtacactccgctgtatgtactgcgcgaactgtgacacaggatcgcagctgcgcaaggttgtttcacacttcttcggcagaaataaaatttgtactcgccagatccctgcccgttgctgggtccactactgtcgcaagcactatcaacgatctcgatatcgcaacgctcatgaattcgccaagactcaggtcgatctgattctccagcaaattcgccttgtccacgcctggagcgaggagaacagattgcatgggaggcccggagtcgtgcaaaactgggctttcaccatgcgcaagcgggaggcaactcgcgtccaagataagtccaagaagcgaccttatcccggcgacagcgaccttgatgacgatgacgatgttctcgaccgcgccgtcctgaacggtactgctgttcccaattggctgaaggagaagtgtggtgagaactacaccaccgatgagatcctgtcaatcatcacagaactccagacagagatggaggaaaagaagatggcccaggttccggacatagagattctccccactctgtcgaccgacgactccgatgaatccaaactaaaggccccgaccaaacgcaagtcatcctatcctaagctgcacaagagagctcagtccgtcggtgttgccatgtcaggatcgtcagcaaagcagtcagcgcaacagtcgacctactggcacagtaactcgccgaactctgggcccttcgagaagcgccaacgcctgtctaatatacctatgtacggtgaccatcacaatgcttcttcgctacccagcctcgcaaacgccggcatgtcgaatatgccgtcttcgactgtaccgctgccttcttcgtcacagctaccctttcgccccggccaattcgtgccgaacccgcaacctcaggcattccgcgccgaggatgtatttgggggtcgtagacgtgcacaaacgtcacattcgtcgtacaacagttatggaccgggtccgttgcctataccttcgggccagcgcttcaataacgccactgtaatggcgcacccgcactccaatccctccgctgccgatcgcaatggacaccatagatcggtgtctgagttcggcatgccccaaatgcccagctctaacagcttcaacttcgacatgcctgttccctcgacgcatctgtcgatgtcccgaacagccagcggtggtgggtacaaccacaacaacatgcccatgaacaacataccgactccgtccacgtattcccagctggccgctgtctctggacccaacaaccaaggcatccctacttcaaatgcttacgcttctcacaatggcaacaactcttgggctccgatgaacgtgatgggccgatcgcctcatgtggctcccggacactcccgtcaccagagcaccccggctacttcccagccgccggccacgcgcttttcgcctgcttacaaccagaacagcatgtataacttcaacggtggctataacacatcacacatgggtagcttccaacctcacgccatgaatcaatcgctcccataccctgctacgcagcctagcctgttctgtgacgcttcatccgaccatgacgctcaggattcgcatacacagtctagtcaatttggcgcctcgccttcggtccatcagactcggaccactgctgcacaggcggctcaatatggtgtctcgtcgtcagttcaccagacccctaccccaggtacacagcctggttcatatggcgctacatcgactgtcaaccacactctgaaccatggcacacagtctgctcagcatgaggcctcgtccgccgtacaggagacccagcagacgaaggatctttacaaagaccaacgctga

SEQ ID NO: 23054 - protein, 641 aa, Muscodor strobelii
  misc_feature: SGI Peptide ID NO. 567839
  misc_feature (29)..(402): NCBI GI: 261351979 Blast Desc: ORP1 [Verticillium albo-atrum VaMs.102]
  misc_feature (26)..(241): NCBI GI: 156055192 Blast Desc: SS1G_04947 [Sclerotinia sclerotiorum 1980] gi|154702732|gb|EDO02471.1| SS1G_04947 [Sclerotinia sclerotiorum 1980]
  misc_feature (14)..(226): NCBI GI: 145605774 Blast Desc: MGG_06873 [Magnaporthe grisea 70-15] gi|145013564|gb|EDJ98205.1| MGG_06873 [Magnaporthe grisea 70-15]
  misc_feature (7)..(226): NCBI GI: 14009653 Blast Desc: AF315717_1 ORP1 [Magnaporthe grisea]
  misc_feature (31)..(208): NCBI GI: 256731719 Blast Desc: NECHADRAFT_20897 [Nectria haematococca mpVI 77-13-4]
  misc_feature (26)..(208): NCBI GI: 46136855 Blast Desc: FG09943.1 [Gibberella zeae PH-1]
  misc_feature (34)..(242): NCBI GI: 171694305 Blast Desc: protein product [Podospora anserina] gi|170947101|emb|CAP73906.1| protein product [Podospora anserina]
  misc_feature (31)..(220): NCBI GI: 116197895 Blast Desc: CHGG_07103 [Chaetomium globosum CBS 148.51] gi|88178382|gb|EAQ85850.1| CHGG_07103 [Chaetomium globosum CBS 148.51]
  misc_feature (7)..(216): NCBI GI: 164426459 Blast Desc: NCU04236 [Neurospora crassa OR74A] gi|157071344|gb|EAA31991.2| [Neurospora crassa OR74A]
  misc_feature (27)..(216): NCBI GI: 11595514 Blast Desc: [Neurospora crassa]
MDNSTTPSSDSNSSQDLGQQGQQSQDGTLRCMYCANCDTGSQLRKVVSHFFGRNKICTRQIPARCWVHYCRKHYQRSRYRNAHEFAKTQVDLILQQIRLVHAWSEENRLHGRPGVVQNWAFTMRKREATRVQDKSKKRPYPGDSDLDDDDDVLDRAVLNGTAVPNWLKEKCGENYTTDEILSIITELQTEMEEKKMAQVPDIEILPTLSTDDSDESKLKAPTKRKSSYPKLHKRAQSVGVAMSGSSAKQSAQQSTYWHSNSPNSGPFEKRQRLSNIPMYGDHHNASSLPSLANAGMSNMPSSTVPLPSSSQLPFRPGQFVPNPQPQAFRAEDVFGGRRRAQTSHSSYNSYGPGPLPIPSGQRFNNATVMAHPHSNPSAADRNGHHRSVSEFGMPQMPSSNSFNFDMPVPSTHLSMSRTASGGGYNHNNMPMNNIPTPSTYSQLAAVSGPNNQGIPTSNAYASHNGNNSWAPMNVMGRSPHVAPGHSRHQSTPATSQPPATRFSPAYNQNSMYNFNGGYNTSHMGSFQPHAMNQSLPYPATQPSLFCDASSDHDAQDSHTQSSQFGASPSVHQTRTTAAQAAQYGVSSSVHQTPTPGTQPGSYGATSTVNHTLNHGTQSAQHEASSAVQETQQTKDLYKDQR

SEQ ID NO: 23055 - DNA, 1395 bp, Muscodor strobelii
  misc_feature: SGI EST ID NO. CUFF.54252.0
  misc_feature: Variant of the nucleotide sequence at SEQ ID NO 23053
gtgcaaaactgggctttcaccatgcgcaagcgggaggcaactcgcgtccaagataagtccaagaagcgaccttatcccggcgacagcgaccttgatgacgatgacgatgttctcgaccgcgccgtcctgaacggtactgctgttcccaattggctgaaggagaagtgtggtgagaactacaccaccgatgagatcctgtcaatcatcacagaactccagacagagatggaggaaaagaagatggcccaggttccggacatagagattctccccactctgtcgaccgacgactccgatgaatccaaactaaaggccccgaccaaacgcaagtcatcctatcctaagctgcacaagagagctcagtccgtcggtgttgccatgtcaggatcgtcagcaaagcagtcagcgcaacagtcgacctactggcacagtaactcgccgaactctgggcccttcgagaagcgccaacgcctgtctaatatacctatgtacggtgaccatcacaatgcttcttcgctacccagcctcgcaaacgccggcatgtcgaatatgccgtcttcgactgtaccgctgccttcttcgtcacagctaccctttcgccccggccaattcgtgccgaacccgcaacctcaggcattccgcgccgaggatgtatttgggggtcgtagacgtgcacaaacgtcacattcgtcgtacaacagttatggaccgggtccgttgcctataccttcgggccagcgcttcaataacgccactgtaatggcgcacccgcactccaatccctccgctgccgatcgcaatggacaccatagatcggtgtctgagttcggcatgccccaaatgcccagctctaacagcttcaacttcgacatgcctgttccctcgacgcatctgtcgatgtcccgaacagccagcggtggtgggtacaaccacaacaacatgcccatgaacaacataccgactccgtccacgtattcccagctggccgctgtctctggacccaacaaccaaggcatccctacttcaaatgcttacgcttctcacaatggcaacaactcttgggctccgatgaacgtgatgggccgatcgcctcatgtggctcccggacactcccgtcaccagagcaccccggctacttcccagccgccggccacgcgcttttcgcctgcttacaaccagaacagcatgtataacttcaacggtggctataacacatcacacatgggtagcttccaacctcacgccatgaatcaatcgctcccataccctgctacgcagcctagcctgttctgtgacgcttcatccgaccatgacgctcaggattcgcatacacagtctagtcaatttggcgcctcgccttcggtccatcagactcggaccactgctgcacaggcg

SEQ ID NO: 23056 - DNA, 2256 bp, Muscodor strobelii
  misc_feature: SGI cDNA ID NO. 567840
  misc_feature: Encodes the peptide sequence at SEQ ID NO 23057
atggtgaaccctgacgcaaaaagaagacgcgttcggaagggcacgcgtagctgttgggagtgtagaagacggaaaatccgctgtcaatatgtgtccgaagaagccaaaatatgtatcgggtgcgaatctcgtggcacaaactgtgtaagtcaggagtttgcagacgagcagactccggctcccgaacgacgcatcacacagagactgggacgagtggaagaaatgctcgaaaagttggtggagaagatcatgccagattcttatacgacggggcgaggtggacggcatgcagaaacgccgtccgcttcggccgacgatgacgatgacccctctgacccaactcagggtgcatgccctttttcgtcctcaaagccaccaatcttcggacttcttagcccgttacgtgaaaatgcaccactatcgtgcacacgtccgccaccagacgtaccgacgccagcgtcgagtacggctgactgtccagccttgtccttgaagaatgcccaggtatctaagacattacacgcactcttcccatcccaacaggatatggaggccataacatctgcgagcacgggatcgcactttgttgtgatgttctttcatcgatatcgtgacattaccgaggggcggacagagcccctctcatctatcaaggagataccaccagtcacagctcatccggctgtgctcgcgcgccgattaatgcaactcgcgaattgtcttcagcagctgcaggccaaagatactccaaaactcatgtcgcgagactcaacggccactatgatggctaagattttgtccacaatggctgaaaccgttgtctacaacgaccaactagtgggaaatgtcgaaggggtagagactctggcactagtcgccttgtatcatgctaatgcgggtaacttacgcaaggcatggcttatacttcgacgcgcaatatcagttgctcaactgatgggcatggaccgttctggagctcggcaagtaaaatccgtcgaaacgagatcgtgcccaataaaagtgaccagaaccaaagcgctctggttccggctcaacttcacggacagatacctttctctattactcggacttcccgccggcacagatgataattcattcttgcttcaagaagacgacgacgaaatgattgacaagctggaaaaacagcatactatcgtcacaggtgcgatcatcaaacgcaatacttgtaaaggagatcccgcgtttagtgctacgcaagctatagactatgatcttgaacaaacagcgcgaagtgccggagctttgttctggcagccgccagtctttgatcctttcttaggtcccgaggagagaatgcgtgttctaacccagcttatgttgcaaatgaaccactacaacctcttaattcttctgcatcttccttacgttctccgcgatgcaaaggagcgaagatgggactacagcaaggagacatgtgtgacctcatcgcggcagcttcttcgcacatttctgctcttccgcaagtttaacgatacttcttttgcgtgtcgacatacagactacggcgctctgacagcgtcaatgactctgcttttgggacatctggaccccaaattgagagctcgagatcaagcctcgacaagcaggcgagaggcggatcgcacgctagttttggaggttcgtgataagcttcaggaaatgtccaacgaacataacgataagttatcgcgcgaagctgcgctgataatcacccgactccttccattactgagccctgaagaaatgatggacaatggcgaccacagtacaggggttcataccgacgtagcatcaaattcggctcctgtacgccttgatattccattccttgggacaattaatatcaacgccttcttggctcccaccacctcaactcaggagattccaggctcgccaacatttagcgggccagcgcccgttgccacaactttgaatgaaggatatgagaatctgccctcggacactggctttttcaatgatcccttgccgcccactcccggacagtgtaatgacggctatcaaaccttcggatcttgtcttacgtttccactcgggtatgaatccaacaactatgtcaccgatttcaataccgttgcgccagcaatgcaatttgagtggtcacaatcacagcttgcgcgcccggagctcgcggctgactctgatcaatggacattccaaggattcgatacggcatattttgagagtctattttcatcgggagttcacgcgctgtaa

SEQ ID NO: 23057 - protein, 751 aa, Muscodor strobelii
  misc_feature: SGI Peptide ID NO. 567840
  misc_feature (16)..(57): Pfam Id: PF00172 Pfam Desc: Fungal Zn(2)-Cys(6) binuclear cluster domain
  misc_feature (282)..(381): Pfam Id: PF04082 Pfam Desc: Fungal specific transcription factor domain
  misc_feature (6)..(748): NCBI GI: 46111107 Blast Desc: FG02435.1 [Gibberella zeae PH-1]
  misc_feature (1)..(746): NCBI GI: 256726271 Blast Desc: NECHADRAFT_104862 [Nectria haematococca mpVI 77-13-4]
  misc_feature (5)..(623): NCBI GI: 171677358 Blast Desc: protein product [Podospora anserina] gi|170936747|emb|CAP61405.1| protein product [Podospora anserina]
  misc_feature (9)..(634): NCBI GI: 256721404 Blast Desc: NECHADRAFT_73198 [Nectria haematococca mpVI 77-13-4]
  misc_feature (2)..(744): NCBI GI: 242797239 Blast Desc: conserved [Talaromyces stipitatus ATCC 10500] gi|218719558|gb|EED18978.1| conserved [Talaromyces stipitatus ATCC 10500]
  misc_feature (8)..(745): NCBI GI: 256723730 Blast Desc: NECHADRAFT_86697 [Nectria haematococca mpVI 77-13-4]
  misc_feature (6)..(744): NCBI GI: 115396206 Blast Desc: [Aspergillus terreus NIH2624] gi|114193311|gb|EAU35011.1| [Aspergillus terreus NIH2624]
  misc_feature (5)..(746): NCBI GI: 189196762 Blast Desc: C6 zinc finger domain containing protein [Pyrenophora tritici-repentis Pt-1C-BFP] gi|187980598|gb|EDU47224.1| C6 zinc finger domain containing protein [Pyrenophora tritici-repentis
  misc_feature (7)..(622): NCBI GI: 242779925 Blast Desc: conserved [Talaromyces stipitatus ATCC 10500] gi|218719635|gb|EED19054.1| conserved [Talaromyces stipitatus ATCC 10500]
  misc_feature (4)..(583): NCBI GI: 238501036 Blast Desc: conserved [Aspergillus flavus NRRL3357] gi|220691989|gb|EED48336.1| conserved [Aspergillus flavus NRRL3357]
MVNPDAKRRRVRKGTRSCWECRRRKIRCQYVSEEAKICIGCESRGTNCVSQEFADEQTPAPERRITQRLGRVEEMLEKLVEKIMPDSYTTGRGGRHAETPSASADDDDDPSDPTQGACPFSSSKPPIFGLLSPLRENAPLSCTRPPPDVPTPASSTADCPALSLKNAQVSKTLHALFPSQQDMEAITSASTGSHFVVMFFHRYRDITEGRTEPLSSIKEIPPVTAHPAVLARRLMQLANCLQQLQAKDTPKLMSRDSTATMMAKILSTMAETVVYNDQLVGNVEGVETLALVALYHANAGNLRKAWLILRRAISVAQLMGMDRSGARQVKSVETRSCPIKVTRTKALWFRLNFTDRYLSLLLGLPAGTDDNSFLLQEDDDEMIDKLEKQHTIVTGAIIKRNTCKGDPAFSATQAIDYDLEQTARSAGALFWQPPVFDPFLGPEERMRVLTQLMLQMNHYNLLILLHLPYVLRDAKERRWDYSKETCVTSSRQLLRTFLLFRKFNDTSFACRHTDYGALTASMTLLLGHLDPKLRARDQASTSRREADRTLVLEVRDKLQEMSNEHNDKLSREAALIITRLLPLLSPEEMMDNGDHSTGVHTDVASNSAPVRLDIPFLGTININAFLAPTTSTQEIPGSPTFSGPAPVATTLNEGYENLPSDTGFFNDPLPPTPGQCNDGYQTFGSCLTFPLGYESNNYVTDFNTVAPAMQFEWSQSQLARPELAADSDQWTFQGFDTAYFESLFSSGVHAL

SEQ ID NO: 23058 - DNA, 2616 bp, Muscodor strobelii
  misc_feature: SGI EST ID NO. CUFF.54290.0
  misc_feature: Variant of the nucleotide sequence at SEQ ID NO 23056
catttatagacatccttagctcgtccgttgcttccgttgcagtgccgacattggcggaattccggataacacgcgatacggacgagatacgttgtgcatagtgatacctttgtcttgtcaccagggtggggactttgaaatgccaaatatggcagaacttcctattcgcgattccgatatggtgaaccctgacgcaaaaagaagacgcgttcggaagggcacgcgtagctgttgggagtaagacggaaaatccgctgtcaatatgtgtccgaagaagccaaaatatgtatcgggtgcgaatctcgtggcacaaactgtgtaagtcaggagtttgcagacgagcagactccggctcccgaacgacgcatcacacagagactgggacgagtggaagaaatgctcgaaaagttggtggagaagatcatgccagattcttatacgacggggcgaggtggacggcatgcagaaacgccgtccgcttcggccgacgatgacgatgacccctctgacccaactcagggtgcatgccctttttcgtcctcaaagccaccaatcttcggacttcttagcccgttacgtgaaaatgcaccactatcgtgcacacgtccgccaccagacgtaccgacgccagcgtcgagtacggctgactgtccagccttgtccttgaagaatgcccaggtatctaagacattacacgcactcttcccatcccaacaggatatggaggccataacatctgcgagcacgggatcgcactttgttgtgatgttctttcatcgatatcgtgacattaccgaggggcggacagagcccctctcatctatcaaggagataccaccagtcacagctcatccggctgtgctcgcgcgccgattaatgcaactcgcgaattgtcttcagcagctgcaggccaaagatactccaaaactcatgtcgcgagactcaacggccactatgatggctaagattttgtccacaatggctgaaaccgttgtctacaacgaccaactagtgggaaatgtcgaaggggtagagactctggcactagtcgccttgtatcatgctaatgcgggtaacttacgcaaggcatggcttatacttcgacgcgcaatatcagttgctcaactgatgggcatggaccgttctggagctcggcaagtaaaatccgtcgaaacgagatcgtgcccaataaaagtgaccagaaccaaagcgctctggttccggctcaacttcacggacagatacctttctctattactcggacttcccgccggcacagatgataattcattcttgcttcaagaagacgacgacgaaatgattgacaagctggaaaaacagcatactatcgtcacaggtgcgatcatcaaacgcaatacttgtaaaggagatcccgcgtttagtgctacgcaagctatagactatgatcttgaacaaacagcgcgaagtgccggagctttgttctggcagccgccagtctttgatcctttcttaggtcccgaggagagaatgcgtgttctaacccagcttatgttgcaaatgaaccactacaacctcttaattcttctgcatcttccttacgttctccgcgatgcaaaggagcgaagatgggactacagcaaggagacatgtgtgacctcatcgcggcagcttcttcgcacatttctgctcttccgcaagtttaacgatacttcttttgcgtgtcgacatacagactacggcgctctgacagcgtcaatgactctgcttttgggacatctggaccccaaattgagagctcgagatcaagcctcgacaagcaggcgagaggcggatcgcacgctagttttggaggttcgtgataagcttcaggaaatgtccaacgaacataacgataagttatcgcgcgaagctgcgctgataatcacccgactccttccattactgagccctgaagaaatgatggacaatggcgaccacagtacaggggttcataccgacgtagcatcaaattcggctcctgtacgccttgatattccattccttgggacaattaatatcaacgccttcttggctcccaccacctcaactcaggagattccaggctcgccaacatttagcgggccagcgcccgttgccacaactttgaatgaaggatatgagaatctgccctcggacactggctttttcaatgatcccttgccgcccactcccggacagtgtaatgacggctatcaaaccttcggatcttgtcttacgtttccactcgggtatgaatccaacaactatgtcaccgatttcaataccgttgcgccagcaatgcaatttgagtggtcacaatcacagcttgcgcgcccggagctcgcggctgactctgatcaatggacattccaaggattcgatacggcatattttgagagtctattttcatcgggagttcacgcgctgtaagatagacggccgtgtgaaaacggcaagttgctctgagtcggacgtgtacgatggattgaacggtacgctttatggactttataaattttacataggaggaataggctctcctatcaacaagataccctaggaaatatatacagtgtgcatcaggtgattgtaaattggtattactttattcctatt

SEQ ID NO: 23059 - DNA, 2169 bp, Muscodor strobelii
  misc_feature: SGI cDNA ID NO. 567841
  misc_feature: Encodes the peptide sequence at SEQ ID NO 23060
atgatgagcctttcacgcttcgcgactgcgatcttcgcagccgccatttgtttccgaacatgcgtcgctcaggacccaactccgtacaccgacccagacacgaagatagaattcgggacatgggtgcaaggcgacatgaccataggcatgtcactgcctggggacgcgttgacaaaggattccacagagtacattggtatattaaaatgtacgaccggatggtgtggtctctcgcacggagaatccggccaaatgacacaggctctgctcctgatggcgtgggccaatggcgacgaagtcttaacatcatttagatttgcgacggggtacaatatgcccgaagtctacaccggcgatgccaagttgacgcagatatcatctaaggtaaccgacacaggtttcgaactcatctatagatgtgaaggctgcttcgcctggaaccaaaatggcgcaactggaagcgtcaagacgagctccgggttcttcgtactcggaagggctggttcgaagactgtaccggtcggccccgattgtccagatacgatcacattcgggcagcatgataccttcggtcaattcggcgctcccttaacgactatcgcaaagacttcatacaataattggactccactggcgacaaaaaccgtccctggtgagtgtgaccctagcggtaccacgacaccaagccctacaccagtttgtcaagatgaaatggacggcaaagtgttcgattatatcatcgtgggtgcaggcgcaggcggtattcctgttgccgatcgcctgagtgaacaaggccacagtgttcttctgcttgagaaaggccctccgtctctcggcatgtggggtggtaatatgaagccgctctggctaggcaagacagatctcacccgattcgacattccgggtctttgcaacgagatctgggtgaactctggtggtgtctcctgcacagataccgatcagatggctggctgcgtcctcggtggcggcactgccgtcaatgcaggcctgtggtggaagccacacccagaagactggaacgagaactttcctgctggatggcatgataccgatttggcagtcgctactcagaaggttttctcgagaattccgggaactaccaggccatcaatggatggcaaactatacatgtcacaaggagtcaacgttctcagcaaggctctgagccaaggcggatggactgctgtcaatgaacccaacaaattaccgacctcgaagaaccgaacttacggcgccacaacttatatgtactctgggggcggcatcggtcctcaagaccagctggaggtcgttgcttcatccgccgatggtccgtccatgatcgggaacgactcctggatcaacttacccgttgggtataacttggttgatcacgttaataccgatactttcattactcatcctgatgtcgtcttttatgatttctatcaggcctggacggatcccattccatcggacaaaacggcatatttgtccaaacgcaccggaattcttgctcagtctgcacctaatatcgggcctgtgttctgggaggagattacgggaggggatggaaaggtccgccagcttatgtggacagctcgcattgaaggtgccgaccagaccggaagtaacagcactatgatcatgagccagtatctcggccgtggttctacctctcgcggccgcatgaccatccgacagggactagacaccttcgtttctgacccaccatacctcaaagacgcagaggataaggctgccgtagtcgcaggaattgacagtctgcggaagagtattaccggatactcaaatcttacatgggcaaagcctgcacctaatgagacaacgcaggcctatgttgacggaattgaagtgagcgctagtaagagacgtgcgaatcactggctgggaactaataaaataggcttggatgatggccgacaagcaaatggcacggcagtcgtggacatcaataccaaggtctacggcaccaataatctgttcgtcgtagatgcatcaatattccccggtcagaccacatcgaatccgtcagcaatgatcgttatagcatctgaaaatgccgcggcacgcatactggcactgaagaacgggcccgtggcgaagagcgtcacttataagactggcgcccggatcctgacgctgtag

SEQ ID NO: 23060 - protein, 722 aa, Muscodor strobelii
  misc_feature: SGI Peptide ID NO. 567841
  misc_feature (549)..(695): Pfam Id: PF05199 Pfam Desc: GMC oxidoreductase
  misc_feature (244)..(279): Pfam Id: PF01266 Pfam Desc: FAD dependent oxidoreductase
  misc_feature (244)..(276): Pfam Id: PF00890 Pfam Desc: FAD binding domain
  misc_feature (633)..(695): Pfam Id: PF05199 Pfam Desc: GMC oxidoreductase
  misc_feature (243)..(276): Pfam Id: PF00732 Pfam Desc: GMC oxidoreductase
  misc_feature (244)..(274): Pfam Id: PF07992 Pfam Desc: Pyridine nucleotide-disulphide oxidoreductase
  misc_feature (6)..(702): NCBI GI: 115385497 Blast Desc: ATEG_09993 [Aspergillus terreus NIH2624] gi|114187742|gb|EAU29442.1| ATEG_09993 [Aspergillus terreus NIH2624]
  misc_feature (1)..(430): NCBI GI: 85090051 Blast Desc: NCU05923 [Neurospora crassa OR74A] gi|28919573|gb|EAA28998.1| NCU05923 [Neurospora crassa OR74A]
  misc_feature (1)..(427): NCBI GI: 7739769 Blast Desc: cellobiose dehydrogenase [Humicola insolens]
  misc_feature (1)..(458): NCBI GI: 116201475 Blast Desc: CHGG_08622 [Chaetomium globosum CBS 148.51] gi|88177140|gb|EAQ84608.1| CHGG_08622 [Chaetomium globosum CBS 148.51]
  misc_feature (1)..(427): NCBI GI: 171677849 Blast Desc: protein product [Podospora anserina] gi|170936993|emb|CAP61651.1| protein product [Podospora anserina]
  misc_feature (1)..(430): NCBI GI: 145616732 Blast Desc: MGG_11036 [Magnaporthe grisea 70-15] gi|145023159|gb|EDK06699.1| MGG_11036 [Magnaporthe grisea 70-15]
  misc_feature (1)..(430): NCBI GI: 119482417 Blast Desc: cellobiose dehydrogenase [Neosartorya fischeri NRRL 181] gi|119409391|gb|EAW19340.1| cellobiose dehydrogenase [Neosartorya fischeri NRRL 181]
  misc_feature (1)..(443): NCBI GI: 121717196 Blast Desc: cellobiose dehydrogenase [Aspergillus clavatus NRRL 1] gi|119404194|gb|EAW14611.1| cellobiose dehydrogenase [Aspergillus clavatus NRRL 1]
  misc_feature (1)..(443): NCBI GI: 169775671 Blast Desc: [Aspergillus oryzae RIB40] gi|83771037|dbj|BAE61169.1| protein product [Aspergillus oryzae]
  misc_feature (1)..(443): NCBI GI: 238502313 Blast Desc: cellobiose dehydrogenase [Aspergillus flavus NRRL3357] gi|220691200|gb|EED47548.1| cellobiose dehydrogenase [Aspergillus flavus NRRL3357]
  misc_feature (23)..(427): SWISSPROT Homolog: EC 1.1.99.18 Cellobiose dehydrogenase (acceptor)
MMSLSRFATAIFAAAICFRTCVAQDPTPYTDPDTKIEFGTWVQGDMTIGMSLPGDALTKDSTEYIGILKCTTGWCGLSHGESGQMTQALLLMAWANGDEVLTSFRFATGYNMPEVYTGDAKLTQISSKVTDTGFELIYRCEGCFAWNQNGATGSVKTSSGFFVLGRAGSKTVPVGPDCPDTITFGQHDTFGQFGAPLTTIAKTSYNNWTPLATKTVPGECDPSGTTTPSPTPVCQDEMDGKVFDYIIVGAGAGGIPVADRLSEQGHSVLLLEKGPPSLGMWGGNMKPLWLGKTDLTRFDIPGLCNEIWVNSGGVSCTDTDQMAGCVLGGGTAVNAGLWWKPHPEDWNENFPAGWHDTDLAVATQKVFSRIPGTTRPSMDGKLYMSQGVNVLSKALSQGGWTAVNEPNKLPTSKNRTYGATTYMYSGGGIGPQDQLEVVASSADGPSMIGNDSWINLPVGYNLVDHVNTDTFITHPDVVFYDFYQAWTDPIPSDKTAYLSKRTGILAQSAPNIGPVFWEEITGGDGKVRQLMWTARIEGADQTGSNSTMIMSQYLGRGSTSRGRMTIRQGLDTFVSDPPYLKDAEDKAAVVAGIDSLRKSITGYSNLTWAKPAPNETTQAYVDGIEVSASKRRANHWLGTNKIGLDDGRQANGTAVVDINTKVYGTNNLFVVDASIFPGQTTSNPSAMIVIASENAAARILALKNGPVAKSVTYKTGARILTL

SEQ ID NO: 23061 - DNA, 699 bp, Muscodor strobelii
  misc_feature: SGI EST ID NO. CUFF.54294.0
  misc_feature: Variant of the nucleotide sequence at SEQ ID NO 23059
cgggcctgtggtgagttattcgcaaatgactagtaatagaagcctggtctaatagataatcagttctgggaggagattacgggaggggatggaaaggtccgccagcttatgtggacagctcgcattgaaggtgccgaccagaccggaagtaacagcactatgatcatgagccagtatctcggccgtggttctacctctcgcggccgcatgaccatccgacagggactagacaccttcgtttctgacccaccatacctcaaagacgcagaggataaggctgccgtagtcgcaggaattgacagtctgcggaagagtattaccggatactcaaatcttacatgggcaaagcctgcacctaatgagacaacgcaggcctatgttgacggaattgaagtgagcgctagtaagagacgtgcgaatcactggctgggtaagcaatctttcccttgcggtgtggtatttgagacgtcttcaggctaacgcgacgtctccaggaactaataaaataggcttggatgatggccgacaagcaaatggcacggcagtcgtggacatcaataccaaggtctacggcaccaataatctgttcgtcgtagatgcatcaatattccccggtcagaccacatcgaatccgtcagcaatgatcgttatagcatctgaaaatgccgcggcacgcatactggcactgaagaacgggcc

SEQ ID NO: 23062 - DNA, 675 bp, Muscodor strobelii
  misc_feature: SGI cDNA ID NO. 567842
  misc_feature: Encodes the peptide sequence at SEQ ID NO 23063
atgaaggctgctatgagaactatagtcacaacggctctggccgcgcaatgcgtctccggacactatattttccaggcgctggctaaaggcacagcaaaaggcgtggcttatgagtacacccgccgcaacaccaattacaactccccagtaaccgatctcgcctcaaacgacctccgatgtaatgttggtggcgctaccggtagcaatacaagtactctggagatgaacgcaggcgatccgtttactttcactcttgatactgccgtttaccatcaagggccaatttcgatctacatgtcgaaagccccaggcgccgtcgcagattacgatggtagtggtgactggtttaagactttcgactggggcccaacatttagcggtggctccgcatcgtggcctctcagagacacatattccagcacaattccgaagtgcatcccgagtggcgagtatctgctacgtatccattctcttgctattcacaatccgggttcaaccccacaatggtacgtcagctgtgggcaagtcaaggtctcaggaggtggaagtaaggctgggtcgcccacggtcaagattccgggggctttcaaggcgactgatccgggatacactgccaacatttacaacaacttcaacagctacaccgttcctggaccggctgtcttcacgtgttaa

SEQ ID NO: 23063 - protein, 224 aa, Muscodor strobelii
  misc_feature: SGI Peptide ID NO. 567842
  misc_feature (141)..(216): Pfam Id: PF03443 Pfam Desc: Glycosyl hydrolase family 61
  misc_feature (8)..(224): NCBI GI: 171677847 Blast Desc: protein product [Podospora anserina] gi|170936992|emb|CAP61650.1| protein product [Podospora anserina]
  misc_feature (1)..(224): NCBI GI: 39945130 Blast Desc: MGG_04547 [Magnaporthe grisea 70-15] gi|145011373|gb|EDJ96029.1| MGG_04547 [Magnaporthe grisea 70-15]
  misc_feature (1)..(224): NCBI GI: 46127267 Blast Desc: FG08011.1 [Gibberella zeae PH-1]
  misc_feature (5)..(222): NCBI GI: 171684255 Blast Desc: protein product [Podospora anserina] gi|170942088|emb|CAP67740.1| protein product [Podospora anserina]
  misc_feature (18)..(224): NCBI GI: 116192683 Blast Desc: CHGG_06059 [Chaetomium globosum CBS 148.51] gi|88181972|gb|EAQ89440.1| CHGG_06059 [Chaetomium globosum CBS 148.51]
  misc_feature (1)..(224): NCBI GI: 116195750 Blast Desc: CHGG_04473 [Chaetomium globosum CBS 148.51] gi|88180386|gb|EAQ87854.1| CHGG_04473 [Chaetomium globosum CBS 148.51]
  misc_feature (21)..(224): NCBI GI: 85110940 Blast Desc: NCU00836 [Neurospora crassa OR74A] gi|28925415|gb|EAA34466.1| conserved [Neurospora crassa OR74A]
  misc_feature (10)..(218): NCBI GI: 261358496 Blast Desc: fungal cellulose binding domain-containing protein [Verticillium albo-atrum VaMs.102]
  misc_feature (4)..(223): NCBI GI: 169599727 Blast Desc: SNOG_02687 [Phaeosphaeria nodorum SN15] gi|111068298|gb|EAT89418.1| SNOG_02687 [Phaeosphaeria nodorum SN15]
  misc_feature (1)..(222): NCBI GI: 156050139 Blast Desc: SS1G_07656 [Sclerotinia sclerotiorum 1980] gi|154692057|gb|EDN91795.1| SS1G_07656 [Sclerotinia sclerotiorum 1980]
MKAAMRTIVTTALAAQCVSGHYIFQALAKGTAKGVAYEYTRRNTNYNSPVTDLASNDLRCNVGGATGSNTSTLEMNAGDPFTFTLDTAVYHQGPISIYMSKAPGAVADYDGSGDWFKTFDWGPTFSGGSASWPLRDTYSSTIPKCIPSGEYLLRIHSLAIHNPGSTPQWYVSCGQVKVSGGGSKAGSPTVKIPGAFKATDPGYTANIYNNFNSYTVPGPAVFTC

SEQ ID NO: 23064 - DNA, 1743 bp, Muscodor strobelii
  misc_feature: SGI cDNA ID NO. 567843
  misc_feature: Elevated expression when VOC is produced
  misc_feature: Encodes the peptide sequence at SEQ ID NO 23065
atgtccgctaacgacacatacgacttcatagttgtggggggcggaactgcgggaaatgtagtcgcggggcgactcgctgagaatcccaacgtccgcattctaatcattgaagcaggtatcgctaaccccgaggacatagcgcagattaccacaccttcggcagctatgacattgcggaacagcgaatatgactggagatacaagacaactatggtgaagagagatgactatgaacgtatcgagaaacccaatacacgtggcaaagccctgggaggaagctcgtcgttgaactacttcacgtggaccccagggtgcaaacccacatttgataactggtcggagttcggcggcgaagaatggacttgggaacctcttgttcactacttgcgcaagtcagctacctaccatgacgagtctggccgatatccaaaagaatttgaaaagctaggcctgggcggtccactacatatctcgcacgcagatttgcttgaggatctcgcgccattccgtgagaaaatcactaaagcttggctttcgcagggccataagctcaatgataatatctatgacggcgagatgagcggattgactcgatgcgttgactcgatttatcagggtaagagatcgggttcgtatcttttcgtgaaagataaacccaatatcactattcttgccgagacacattccaagaaactcatcatcaacgaggaaagtcggactgcaagtggggtgatagttttcgacaagtctggcaatgagttgagtctctacgcgactcgcgaggtgatcgtatctcaaggagtcttcgaatctcctaagcttctcatgctttcgggtatcggaccaaaacaccatctggaccagttcggcatccccaccatcgttgattcgcctcacgtcggacaacacctaaccgatcacccgggagtgccgtttgttctacgagtcaaagacgggttcggcatggacaattttcttttccgccaaacaccagagcacatcgcagcggtagccgcatatgaaaagagcagcacaggacccgtgagctcgggtcttttggagctcgtcggctttcctagaatcgatgagtacttcgagaaggataagctctatcgcgagcgcaaagccgccaatggtgggaaagaccccttctctcccgagggtcagcctcatttcgaactagactttgtttgtgcgttcggtactgcattccagtggcactatccccagcccaaagaaggttgctacatcagtgttgttgtggatttagtccgcccggtttcagctcctggcgaggtgactctccagagtgcagacccgctcgtacaaccaaacatcaatctcaacttctttgcggacgacttagacatcatcggaatgagagagggtattcgctttagctacgatgttcttaccaaaggagatggcttcaaagatgtcgttctctcggagtatccttgggagatgcctcttgatgatgatgaggctatgcatcatgcagtacttgatcgttgccagactgccttccatccttgtggcagtgcccgtctgtcaaagaccattgaacagggcgtagtagaccctcaacttagggtccacgggatcaagaatttgcgattgattgacgcctccgtcacgccgattattcctgattgtcgcattcaaaactctatatacatgattgctgagaagggtgccgatatgttgaaagctgcacacaaggacctctatcctgagtcgtga

SEQ ID NO: 23065 - protein, 580 aa, Muscodor strobelii
  misc_feature: SGI Peptide ID NO. 567843
  misc_feature (419)..(565): Pfam Id: PF05199 Pfam Desc: GMC oxidoreductase
  misc_feature (7)..(322): Pfam Id: PF00732 Pfam Desc: GMC oxidoreductase
  misc_feature (493)..(565): Pfam Id: PF05199 Pfam Desc: GMC oxidoreductase
  misc_feature (419)..(467): Pfam Id: PF05199 Pfam Desc: GMC oxidoreductase
  misc_feature (7)..(158): Pfam Id: PF00732 Pfam Desc: GMC oxidoreductase
  misc_feature (218)..(308): Pfam Id: PF00732 Pfam Desc: GMC oxidoreductase
  misc_feature (7)..(577): NCBI GI: 165292380 Blast Desc: formate oxidase 1 [Debaryomyces vanrijiae]
  misc_feature (7)..(577): NCBI GI: 165292384 Blast Desc: formate oxidase 3 [Debaryomyces vanrijiae]
  misc_feature (7)..(577): NCBI GI: 165292382 Blast Desc: formate oxidase 2 [Debaryomyces vanrijiae]
  misc_feature (3)..(577): NCBI GI: 254584888 Blast Desc: ZYRO0F18634p [Zygosaccharomyces rouxii] gi|238940905|emb|CAR29079.1| ZYRO0F18634p [Zygosaccharomyces rouxii]
  misc_feature (1)..(577): NCBI GI: 115398085 Blast Desc: ATEG_05456 [Aspergillus terreus NIH2624] gi|114192825|gb|EAU34525.1| ATEG_05456 [Aspergillus terreus NIH2624]
  misc_feature (1)..(577): NCBI GI: 145235595 Blast Desc: An03g05670 [Aspergillus niger] gi|134058133|emb|CAK38327.1| protein product [Aspergillus niger]
  misc_feature (1)..(579): NCBI GI: 169780506 Blast Desc: [Aspergillus oryzae RIB40] gi|83773457|dbj|BAE63584.1| protein product [Aspergillus oryzae]
  misc_feature (1)..(577): NCBI GI: 255940544 Blast Desc: Pc16g07070 [Penicillium chrysogenum Wisconsin 54-1255] gi|211585664|emb|CAP93377.1| Pc16g07070 [Penicillium chrysogenum Wisconsin 54-1255]
  misc_feature (1)..(579): NCBI GI: 256728226 Blast Desc: NECHADRAFT_97832 [Nectria haematococca mpVI 77-13-4]
  misc_feature (56)..(577): NCBI GI: 254583275 Blast Desc: ZYRO0E10340p [Zygosaccharomyces rouxii] gi|238942943|emb|CAR31114.1| ZYRO0E10340p [Zygosaccharomyces rouxii]
  misc_feature (7)..(571): SWISSPROT Homolog: EC 1.1.99.32 L-sorbose 1-dehydrogenase
  misc_feature: Useful for introducing or modulating the production of volatile compounds
MSANDTYDFIVVGGGTAGNVVAGRLAENPNVRILIIEAGIANPEDIAQITTPSAAMTLRNSEYDWRYKTTMVKRDDYERIEKPNTRGKALGGSSSLNYFTWTPGCKPTFDNWSEFGGEEWTWEPLVHYLRKSATYHDESGRYPKEFEKLGLGGPLHISHADLLEDLAPFREKITKAWLSQGHKLNDNIYDGEMSGLTRCVDSIYQGKRSGSYLFVKDKPNITILAETHSKKLIINEESRTASGVIVFDKSGNELSLYATREVIVSQGVFESPKLLMLSGIGPKHHLDQFGIPTIVDSPHVGQHLTDHPGVPFVLRVKDGFGMDNFLFRQTPEHIAAVAAYEKSSTGPVSSGLLELVGFPRIDEYFEKDKLYRERKAANGGKDPFSPEGQPHFELDFVCAFGTAFQWHYPQPKEGCYISVVVDLVRPVSAPGEVTLQSADPLVQPNINLNFFADDLDIIGMREGIRFSYDVLTKGDGFKDVVLSEYPWEMPLDDDEAMHHAVLDRCQTAFHPCGSARLSKTIEQGVVDPQLRVHGIKNLRLIDASVTPIIPDCRIQNSIYMIAEKGADMLKAAHKDLYPES

SEQ ID NO: 23066 - DNA, 2309 bp, Muscodor strobelii
  misc_feature: SGI EST ID NO. CUFF.54382.0
  misc_feature: Variant of the nucleotide sequence at SEQ ID NO 23064
gtttcttcggagcttcgtgagctctgatctgtcgcgccgataattacggtttgcgatcgaaccactgccagagatataaatgcttgaccttcttcctgaaatccgatcgtttattgatatctaaaatatccagagaacttgttcaaagaatcacaaacgccgaaattcggaactccatacttgcttcgcatcgtctagcaacatgtccgctaacgacacatacgacttcatagttgtggggggcggaactgcgggaaatgtagtcgcggggcgactcgctgagaatcccaacgtccgcattctaatcattgaagcaggtatcgctaaccccgaggacatagcgcagattaccacaccttcggcagctatgacattgcggaacagcgaatatgactggagatacaagacaactatggtgaagagagatgactatgaacgtatcgagaaacccaatacacgtggcaaagccctgggaggaagctcgtcgttgaactacttcacgtggaccccagggtgcaaacccacatttgataactggtcggagttcggcggcgaagaatggacttgggaacctcttgttcactacttgcgcaagtcagctacctaccatgacgagtctggccgatatccaaaagaatttgaaaagctaggcctgggcggtccactacatatctcgcacgcagatttgcttgaggatctcgcgccattccgtgagaaaatcactaaagcttggctttcgcagggccataagctcaatgataatatctatgacggcgagatgagcggattgactcgatgcgttgactcgatttatcagggtaagagatcgggttcgtatcttttcgtgaaagataaacccaatatcactattcttgccgagacacattccaagaaactcatcatcaacgaggaaagtcggactgcaagtggggtgatagttttcgacaagtctggcaatgagttgagtctctacgcgactcgcgaggtaggtgaagtcgctgtccatgttgcttgaatgtccgcgagtttaacaatgcgcgaaggtgatcgtatctcaaggagtcttcgaatctcctaagcttctcatgctttcgggtatcggaccaaaacaccatctggaccagttcggcatccccaccatcgttgattcgcctcacgtcggacaacacctaaccgatcacccgggagtgccgtttgttctacgagtcaaagacgggttcggcatggacaattttcttttccgccaaacaccagagcacatcgcagcggtagccgcatatgaaaagagcagcacaggacccgtgagctcgggtcttttggagctcgtcggctttcctagaatcgatgagtacttcgagaaggataagctctatcgcgagcgcaaagccgccaatggtgggaaagaccccttctctcccgagggtcagcctcatttcgaactagactttgtttgtgcgttcggtactgcattccagtggcactatccccagcccaaagaaggttgctacatcagtgttgttgtggatttagtccgcccggtttcagctcctggcgaggtgactctccagagtgcagacccgctcgtacaaccaaacatcaatctcaacttctttgcggacgacttagacatcatcggaatgagagagggtattcgctttagctacgatgttcttaccaaaggagatggcttcaaagatgtcgttctctcggagtatccttgggagatgcctcttgatgatgatgaggctatgcatcatgcagtacttgatcgttgccagactgccttccatccttgtggcagtgcccgtctgtcaaagaccattgaacagggcgtagtagaccctcaacttagggtccacgggatcaagaatttgcgattgattgacgcctccgtcacgccgattattcctgattgtcgcattcaaaactctatatacatgattgctgagaagggtgccgatatgttgaaagctgcacacaaggacctctatcctgagtcgtgagcatgtgcatgtttctgaatcccatttgttactctcccctccaacataggtgcaacgcgaaatagcccagattgcaagaatggaacattgatatttattgtaatgatctccaatgaatatatacaatctataagtttgattcaattaatgatttctaaaatatcggtttcccttaagcactcttcttgaagcacgccttgacaagcgcactgtcggtccaagtattcccatttttagtaggaacttcgctaagctcatctagtgtatcaagtatgttagtcatctctcttattcggtatggtatgg

SEQ ID NO: 23067 - DNA, 2124 bp, Muscodor strobelii
  misc_feature: SGI cDNA ID NO. 567844
  misc_feature: Elevated expression when VOC is produced
  misc_feature: Encodes the peptide sequence at SEQ ID NO 23068
atggacgcttcggaacacgagctggcaacagaacagcctactatcgcggccaatggctctttccaggacgaagagaacgaggccgtaggcgctattccagaatcaaagaaacagcctcgacaggggatcaagaggcaaaagaccgtaactttcgacgacagacctcgagtgcatgattcatatcccatcgatcgtgaagaaaagactatcgtcgtcgagtcgagagttgactcgaaagtcgaaccagtcacccacagacctcttccgattagaaaattccagccgggtccaataaagcgaaccttcacctcattgcttcagaagactggatatgtcagttccacgggaccaatgatgagggctttagaccgggagatccgcaagatacgtcgtaaagataccgactcgatagaagttcaaggattcgtccctctagaacagatggaccgaatcgttaatgaggaaaacgtcgtgcgcgaattaaaaagactggatactggtataatccaactcatcaaaaaatggggaggccgaggccaaagtcgtgccgtagaagacctggcgcgcatgacttgcgggacctatcatcatgataatatgaacggcgaatcaaatcgggaatgcaaaacgtaccgcaagatattcgccattctagtcctcactcaacgggtcgcttatttcgcaaggttcgtcaaagaaggaatatgcgacacggatttgccgttggttaagattcctcatgagcgagtacctaacgcgttcaccttgcgtctgcgtggtgatcgaagccgcaagctgaagtgcttctatcgctggtcccccgcgcagatcgatcggttcgaaaaggagcagtggaaattcttggtccctgtcttcattcgcgacggtggccgctacatcacggtccacagtgagtccgcaatactgcctttcattgagaaacagtcgatccggacgactaccgtgcgggaaattttcaaggtcagatttcatccggaacactacaaattcggcgacgatgacaatgatgacgacgatagtgggtataagacatggatggacagtgatacagagaaacgagcgaagcagctcttcgccttgaaatcaatcaaccttaagaacgatattcacaggacagaagtaaggatgttgaagcgagtgagccatgaccacatcataccgctacttttggcctatgaacacaagaatcgcatccactacatcttcccatgggccgattgcaacttagctgagtactgggagttgcggtaccccaaccagatccccaactacgatacgcaacaatggataatacgagagtgcctgggtattgcagagggtttgaaccagatccatcatcatccgacgacgtcagtgagctctctatttaataataccacggacaacggtgtcccaccacaaggacgccgcctttcattggccagaagtcgaccaatccaccggcccgttaacttccagggcttccatggcgacatcaagccgtcgaatatcctatggtatccgattaatggagacaaaggggaccggggcgtcctgaagatttgcgacttcggtagcggtcaattcaagagcagcatctcgaaggcagactcggcaagacctttagcttacacgccttcttaccgtccgccagacagcgacttttctgcattaatacaagcaaacgttacggcgggcgacatttggggactgggctgcgtcttcttggagttcatcacatggcacctgggtggctggacgctactgagcgcttttgagaagtctagaagcgacagcagtctcggatcggccgcgcagacaccctttttcgagaccatctcaaaagaagatggcacccaaacatggaggatcaaacctgcagtgacaaagcatttccaaagattgcggcgacacaagagctgcacacctttcatcctcagtttcctagaaatcatcgaaaaccggatgcttatagtagaagagtacatgcccattgaggagcgactggaggatgagccgccaagaccggggtatggccgccggatatcctgtggccacttcatgatttacttggggaaggccattgaaaagaccgtccccaactatgaatgggagacagggtga

SEQ ID NO: 23068 - protein, 707 aa, Muscodor strobelii
  misc_feature: SGI Peptide ID NO. 567844
  misc_feature (363)..(419): Pfam Id: PF00069 Pfam Desc: Protein kinase domain
  misc_feature (140)..(628): NCBI GI: 256722881 Blast Desc: NECHADRAFT_87138 [Nectria haematococca mpVI 77-13-4]
  misc_feature (115)..(664): NCBI GI: 170940330 Blast Desc: protein product [Podospora anserina]
  misc_feature (132)..(660): NCBI GI: 171685536 Blast Desc: protein product [Podospora anserina] gi|170942729|emb|CAP68382.1| protein product [Podospora anserina]
  misc_feature (121)..(633): NCBI GI: 169607333 Blast Desc: SNOG_06723 [Phaeosphaeria nodorum SN15] gi|111064254|gb|EAT85374.1| SNOG_06723 [Phaeosphaeria nodorum SN15]
  misc_feature (128)..(661): NCBI GI: 46110543 Blast Desc: FG02153.1 [Gibberella zeae PH-1]
  misc_feature (142)..(630): NCBI GI: 171682622 Blast Desc: protein product [Podospora anserina] gi|170941270|emb|CAP66920.1| protein product [Podospora anserina]
  misc_feature (118)..(660): NCBI GI: 169600195 Blast Desc: SNOG_02927 [Phaeosphaeria nodorum SN15] gi|111068538|gb|EAT89658.1| SNOG_02927 [Phaeosphaeria nodorum SN15]
  misc_feature (138)..(660): NCBI GI: 39941740 Blast Desc: MGG_14499 [Magnaporthe grisea 70-15] gi|145015217|gb|EDJ99764.1| MGG_14499 [Magnaporthe grisea 70-15]
  misc_feature (213)..(660): NCBI GI: 154300072 Blast Desc: BC1G_11225 [Botryotinia fuckeliana B05.10] gi|150856838|gb|EDN32030.1| BC1G_11225 [Botryotinia fuckeliana B05.10]
  misc_feature (210)..(657): NCBI GI: 116200846 Blast Desc: CHGG_10968 [Chaetomium globosum CBS 148.51] gi|88175682|gb|EAQ83150.1| CHGG_10968 [Chaetomium globosum CBS 148.51]
  misc_feature: Useful for introducing or modulating the production of volatile compounds
MDASEHELATEQPTIAANGSFQDEENEAVGAIPESKKQPRQGIKRQKTVTFDDRPRVHDSYPIDREEKTIVVESRVDSKVEPVTHRPLPIRKFQPGPIKRTFTSLLQKTGYVSSTGPMMRALDREIRKIRRKDTDSIEVQGFVPLEQMDRIVNEENVVRELKRLDTGIIQLIKKWGGRGQSRAVEDLARMTCGTYHHDNMNGESNRECKTYRKIFAILVLTQRVAYFARFVKEGICDTDLPLVKIPHERVPNAFTLRLRGDRSRKLKCFYRWSPAQIDRFEKEQWKFLVPVFIRDGGRYITVHSESAILPFIEKQSIRTTTVREIFKVRFHPEHYKFGDDDNDDDDSGYKTWMDSDTEKRAKQLFALKSINLKNDIHRTEVRMLKRVSHDHIIPLLLAYEHKNRIHYIFPWADCNLAEYWELRYPNQIPNYDTQQWIIRECLGIAEGLNQIHHHPTTSVSSLFNNTTDNGVPPQGRRLSLARSRPIHRPVNFQGFHGDIKPSNILWYPINGDKGDRGVLKICDFGSGQFKSSISKADSARPLAYTPSYRPPDSDFSALIQANVTAGDIWGLGCVFLEFITWHLGGWTLLSAFEKSRSDSSLGSAAQTPFFETISKEDGTQTWRIKPAVTKHFQRLRRHKSCTPFILSFLEIIENRMLIVEEYMPIEERLEDEPPRPGYGRRISCGHFMIYLGKAIEKTVPNYEWETG

SEQ ID NO: 23069 - DNA, 3839 bp, Muscodor strobelii
  misc_feature: SGI EST ID NO. CUFF.54372.1
  misc_feature: Variant of the nucleotide sequence at SEQ ID NO 23067
tttctgatacattgtcgtatttgcccatttctacgaatacatgtgtcgtggctgcactgcgcccgacagtcacagatcattcaacgattttgcgataaattgtgtaccctgtggctatatagctattgtgcaatttgcgctgctcactccaatcgaggacggaagtgacacatggacgcttcggaacacgagctggcaacagaacagcctactatcgcggccaatggctctttccaggacgaagagaacgaggccgtaggcgctattccagaatcaaagaaacagcctcgacaggggatcaagaggcaaaagaccgtaactttcgacgacagacctcgagtgcatgattcatatcccatcgatcgtgaagaaaagactatcgtcgtcgagtcgagagttgactcgaaagtcgaaccagtcacccacagacctcttccgattagaaaattccagccgggtccaataaagcgaaccttcacctcattgcttcagaagactggatatgtcagttccacgggaccaatgatgagggctttagaccgggagatccgcaagatacgtcgtaaagataccgactcgatagaagttcaaggattcgtccctctagaacagatggaccgaatcgttaatgaggaaaacgtcgtgcgcgaattaaaaagactggatactggtataatccaactcatcaaaaaatggggaggccgaggccaaagtcgtgccgtagaagacctggcgcgcatgacttgcgggacctatcatcatgataatatgaacggcgaatcaaatcgggaatgcaaaacgtaccgcaagatattcgccattctagtcctcactcaacgggtcgcttatttcgcaaggttcgtcaaagaaggaatatgcgacacggatttgccgttggttaagattcctcatgagcgagtacctaacgcgttcaccttgcgtctgcgtggtgatcgaagccgcaagctgaagtgcttctatcgctggtcccccgcgcagatcgatcggttcgaaaaggagcagtggaaattcttggtccctgtcttcattcgcgacggtggccgctacatcacggtccacagtgagtccgcaatactgcctttcattgagaaacagtcgatccggacgactaccgtgcgggaaattttcaaggtcagatttcatccggaacactacaaattcggcgacgatgacaatgatgacgacgatagtgggtataagacatggatggacagtgatacagagaaacgagcgaagcagctcttcgccttgaaatcaatcaaccttaagaacgatattcacaggacagaagtaaggatgttgaagcgagtgagccatgaccacatcataccgctacttttggcctatgaacacaagaatcgcatccactacatcttcccatgggccgattgcaacttagctgagtactgggagttgcggtaccccaaccagatccccaactacgatacgcaacaatggataatacgagagtgcctgggtattgcagagggtttgaaccagatccatcatcatccgacgacgtcagtgagctctctatttaataataccacggacaacggtgtcccaccacaaggacgccgcctttcattggccagaagtcgaccaatccaccggcccgttaacttccagggcttccatggcgacatcaagccgtcgaatatcctatggtatccgattaatggagacaaaggggaccggggcgtcctgaagatttgcgacttcggtagcggtcaattcaagagcagcatctcgaaggcagactcggcaagacctttagcttacacgccttcttaccgtccgccagacagcgacttttctgcattaatacaagcaaacgttacggcgggcgacatttggggactgggctgcgtcttcttggagttcatcacatggcacctgggtggctggacgctactgagcgcttttgagaagtctagaagcgacagcagtctcggatcggccgcgcagacaccctttttcgagaccatctcaaaagaagatggcacccaaacatggaggatcaaacctgcagtgacaaagcatttccaaagattgcggcgacacaagagctgcacacctttcatcctcagtttcctagaaatcatcgaaaaccggatgcttatagtagaagagtacatgcccattgaggagcgactggaggatgagccgccaagaccggggtatggccgccggatatcctgtggccacttcatgatttacttggggaaggccattgaaaagaccgtccccaactatgaatgggagacagggtgagaacgcacccggcagagattctatgacgcagccgtagcactctgattagccaagaacctgccgtaggtgccttaaagagcgactattcaagtttgtcctgtgcggaatatggcccctatagagcggaattgatgctcttatgcaaccacgcatgtggatcgagcccaagggcgcatatttcagactagcacggagatgacacgggctagaataaattcagcacctagctaaatgaggcacatgggtgttgccgccggacactatcgacaatgaaaagtaggaagcacctcagatatcgctctatagcacatgcgctcgtcttcacatcaagagtggagtcttgagttgggccaggacacaaccaaaaaagcgtcccgtatactctgctatgattaacatactgtcttgagttgaggatcctttattatcttgattggttgaggttaacaactattgaagcactcggtcgagactcaacggtcgaacatcattttctaagagatccagctaacatcagcggctatatcgccttactatcgccatcgtcttcgtctctattactggcaccatggcagaagccgctcaagtcaaggagccggcgccaatcaagaagacagaacgtaacttcaattcctagcttttatcatacagccgctagacaccctgcagggaaaaccgatacgatccacaacccagactgagccaaccgcggcaacgataagacagcaagagtcgagagatatctcagccttcttgaaatccaatacagtctgatgatggtggcatcgtacccatctgctcattcacgaacctgctctacgctattgctgcaaagcaatctgacgcagcagttgtcaagtcatcatagagctgaccacagattaatgacgcttcgtggaccacctggtccatgacattacaagcttagaacaggagcatgatttacaaagtattatctacttgcaaccgcgatgggtttccgtgaactcgtaaaaggatcaaataaccatacaatgaggcgataaaatgatatgccgtcctcgcgatgtctatagtgttattcgttccaattcattgatggatttcttgagaccgccccgggcattgatgagggtcgaaggaataaacattagcaagcagccttaaacatgcatatggcttagtagttgcatgcacttagaataattgacgatagctatctctcaatttgattgtgtgcagacctgcataactctatgagccaataggagacctgaccggagatgcgtgtctgcatctcggtatctaatgcttgacagagttgcatcccgaaagcttgtcctcgagggtctacccggcagaatgcccgtctgctcgtccattggctatatagtatttccgtctttagctaggccctctcaaaccctgttctgttgtcccagcctgccgacttgagatggtgactacttcgtgagctgtcttgccatcgaattctcgcaacatgcatggagtcatgtatgcaacctggctaggaatgccgggagaggtcctttggaagatatcgc

SEQ ID NO: 23070 - DNA, 912 bp, Muscodor strobelii
  misc_feature: SGI cDNA ID NO. 567845
  misc_feature: Elevated expression when VOC is produced
  misc_feature: Encodes the peptide sequence at SEQ ID NO 23071
atgcctgcccaaaatgaccttgcgaagacggtactagaaaatggggccactaatagaactcccgtgatgatgcgccgacccagagtattaaccactacgcggaaccgtctttatggaatgacgcgacatcggaaaccccagcagatggcgccaatagctcatgttcgtggacagcgtcggactcgagatccctatatcgaccgtgtagtacgcgctgcgaagccagatttgctaagtatagacagcgggaagagaattcttagcctggctaccttgcagcgcatgatcctgttccaacttcaagtcgagatcgttgagatggtcgggcccttggccaaaggccaagctgaaggtggcagccctctcagggacaagaagctgaggagagcggtggctgaatacactcaggcagtgcgcgactgggagttaatggctacttactccagtagatcgggaattaatacaacaagtgatccattccgcattagtagtcgggcgccgctgatggagcaagcgatggcgtcggctgacttcctgatcaaactcaaagatcagccggcggttgtgccggaatatgagcgatatgggaatggaacattggagacggaagccggaagtttccaacaaaggttcaaagttaattacaaacgcagcaaaagagctcttgtgaagaggtttggtatcgcacttgctgccggagttgcactcatcgcgcctgtcctcctcatggttttgcataaggacttaacgacggcgttggccacgacgtcagtcgctaccttcctctcagctgctttcgtcgccatattttccgatgcaaaccctgaagccatcatgggggcagtagctgcgtatacagcagtgcttgttgtgtttgttggcgctttcctggacacgctgaagccctcttga

SEQ ID NO: 23071 - protein, 303 aa, Muscodor strobelii
  misc_feature: SGI Peptide ID NO. 567845
  misc_feature (87)..(294): NCBI GI: 212528158 Blast Desc: conserved [Penicillium marneffei ATCC 18224] gi|210073634|gb|EEA27721.1| conserved [Penicillium marneffei ATCC 18224]
  misc_feature (87)..(294): NCBI GI: 116195502 Blast Desc: CHGG_04349 [Chaetomium globosum CBS 148.51] gi|88180262|gb|EAQ87730.1| CHGG_04349 [Chaetomium globosum CBS 148.51]
  misc_feature (87)..(294): NCBI GI: 116203329 Blast Desc: [Chaetomium globosum CBS 148.51] gi|88178067|gb|EAQ85535.1| [Chaetomium globosum CBS 148.51]
  misc_feature (65)..(294): NCBI GI: 85092861 Blast Desc: NCU08188 [Neurospora crassa OR74A] gi|28921023|gb|EAA30345.1| NCU08188 [Neurospora crassa OR74A]
  misc_feature (92)..(298): NCBI GI: 169772475 Blast Desc: [Aspergillus oryzae RIB40] gi|83768567|dbj|BAE58704.1| protein product [Aspergillus oryzae]
  misc_feature (136)..(297): NCBI GI: 238490390 Blast Desc: conserved [Aspergillus flavus NRRL3357] gi|220696845|gb|EED53186.1| conserved [Aspergillus flavus NRRL3357]
  misc_feature (225)..(294): NCBI GI: 156050237 Blast Desc: SS1G_07705 [Sclerotinia sclerotiorum 1980] gi|154692106|gb|EDN91844.1| SS1G_07705 [Sclerotinia sclerotiorum 1980]
  misc_feature: Useful for introducing or modulating the production of volatile compounds
MPAQNDLAKTVLENGATNRTPVMMRRPRVLTTTRNRLYGMTRHRKPQQMAPIAHVRGQRRTRDPYIDRVVRAAKPDLLSIDSGKRILSLATLQRMILFQLQVEIVEMVGPLAKGQAEGGSPLRDKKLRRAVAEYTQAVRDWELMATYSSRSGINTTSDPFRISSRAPLMEQAMASADFLIKLKDQPAVVPEYERYGNGTLETEAGSFQQRFKVNYKRSKRALVKRFGIALAAGVALIAPVLLMVLHKDLTTALATTSVATFLSAAFVAIFSDANPEAIMGAVAAYTAVLVVFVGAFLDTLKPS

SEQ ID NO: 23072 - DNA, 2169 bp, Muscodor strobelii
  misc_feature: SGI EST ID NO. CUFF.54340.0
  misc_feature: Variant of the nucleotide sequence at SEQ ID NO 23070
attcattgaaacctcaaagagagaaacgttcagagaaacatcggagactattttactaagacgatgatttttattcatgacactttatctaatttgaaatgaagaggggtcctaaaatacccgatgaggagagcgctatgagctccgacgctgcctcaacaagttctacgatgcctgcccaaaatgaccttgcgaagacggtactagaaaatggggccactaatagaactcccgtgatgatgcgccgacccagagtattaaccactacgcggaaccgtctttatggaatgacgcgacatcggaaaccccagcagatggcgccaatagctcatgttcgtggacagcgtcggactcgagatccctatatcgaccgtgtagtacgcgctgcgaagccagatttgctaagtatagacagcgggaagagaattcttagcctggctaccttgcagcgcatgatcctgttccaacttcaagtcgagatcgttgagatggtcgggcccttggccaaaggccaagctgaaggtggcagccctctcagggacaagaagctgaggagagcggtggctgaatacactcaggcagtgcgcgactgggagttaatggctacttactccagtagatcgggaattaatacaacaagtgatccattccgcattagtagtcgggcgccgctgatggagcaagcgatggcgtcggctgacttcctgatcaaactcaaagatcagccggcggttgtgccggaatatgagcgatatgggaatggaacattggagacggaagccggaagtttccaacaaaggttcaaagttaattacaaacgcagcaaaagagctcttgtgaagaggtttggtatcgcacttgctgccggagttgcactcatcgcgcctgtcctcctcatggttttgcataaggacttaacgacggcgttggccacgacgtcagtcgctaccttcctctcagctgctttcgtcgccatattttccgatgcaaaccctgaagccatcatgggggcagtagctgcgtatacagcagtgcttgttgtgtttgttggcgctttcctggacacgctgaagccctcttgaggcaacggtgtcaactaacatgcctaatggtgaacatagttagcatagaatccgctgtggcaatctatgtagctaagatgatctcgatatacgaaacccgtactttttgattatgctagaaagcccgttcttcttgaagaccataatttggaaaccttctttgccactgggtccaatcaaatacctctcgtcctttttagcttgctttagtatatctctcagtatttcatcaagttgctctgatttcattcgctctgcttccactttcagaagtaggttgtgtttgatgatagtggcaaggtcactcatccaggtattcttgcaccgactgtcatcgcgaaccaacttgatatattctttgaccttgggatgaatgttgtaggactcaattccgttcttcgttttgatcctgaagaaccgggctgcgtcatccttgttggaaggcttccttgcatcctggaatttgacaacctcgctgtagccacccaagatccagactaaaaattcgagtaaaatgcatccgaatgaccatatatcgtaaccacgcggcagcttaaaggtagactgttgatcatctggaagtgactcacgtctggactcaggcggcgcgtattgctcggtccctccagttgtggttgtaccattgattcgcttcttcgtgacttgggcgtgaaatctggccaagccagcatcggcgatacgaagcgttcccggacttttgtcatccttgaataagaggatattgcctggtttgaggtcgccatgacgacagttctcatcaggattctttttgtttctggggacatgcaattcacgtaaagcgcttgctaattcactgatctgctccagtatccagagtatggttgtcggcgaacgcacttgactatcaaattcggggtctttccagaacgatcgcaaatcaccaccgtctgcccatgggaataggaaaaagtaagtttgacctctcttgaatgatgcgatgagtcggatgagatttgaatggtccagttcgcggattcgctttagggctatgtcctcgcgtaaaaagtccttctcggagtctgagttcatctccttaagggccaag

SEQ ID NO: 23073 - DNA, 1611 bp, Muscodor strobelii
  misc_feature: SGI cDNA ID NO. 567846
  misc_feature: Elevated expression when VOC is produced
  misc_feature: Encodes the peptide sequence at SEQ ID NO 23074
atggcgattgaactctttgataacagaacggactggcttgaagatgtgatgcaacaactcagagatgcgagaaagccggagctgtgggataggggcaaatttgtaacgaacgccgacattgatacaatcatctcaagggttgcttcgagactgaatgatgccaatttggacaaggatagcgccgatcgctcaaaacgagtccttgcaacccttatttacaacaacaagttgaatgcgaaagtattgcgcaaactgtcgaaatcggatctcagggacagtcatttgccgctttactttaatgaaactactaagcgtttagaaacgtctgcgtcagattctcaatggtccagttacaagctctttgagaaagatattgaccaccttaggtttcaagatgaccagtggatgttccttgctcctgcatttagcgacgaaaagtcgagtaaagcttgccttacgttcgacgcaaaacatccgctccctgtcatcaaccgggatctcgcaggtggagggtcgaccgcaaaagtctggaaggttcagatacaccctagtcatatcgatctcgcttcttcgccgacaatgaatgaatcctcattcttggcccttaaggagatgaactcagactccgagaaggactttttacgcgaggacatagccctaaagcgaatccgcgaactggaccattcaaatctcatccgactcatcgcatcattcaagagaggtcaaacttactttttcctattcccatgggcagacggtggtgatttgcgatcgttctggaaagaccccgaatttgatagtcaagtgcgttcgccgacaaccatactctggatactggagcagatcagtgaattagcaagcgctttacgtgaattgcatgtccccagaaacaaaaagaatcctgatgagaactgtcgtcatggcgacctcaaaccaggcaatatcctcttattcaaggatgacaaaagtccgggaacgcttcgtatcgccgatgctggcttggccagatttcacgcccaagtcacgaagaagcgaatcaatggtacaaccacaactggagggaccgagcaatacgcgccgcctgagtccagacgtgagtcacttccagatgatcaacagtctacctttaagctgccgcgtggttacgatatatggtcattcggatgcattttactcgaatttttagtctggatcttgggtggctacagcgaggttgtcaaattccaggatgcaaggaagccttccaacaaggatgacgcagcccggttcttcaggatcaaaacgaagaacggaattgagtcctacaacattcatcccaaggtcaaagaatatatcaagttggttcgcgatgacagtcggtgcaagaatacctggatgagtgaccttgccactatcatcaaacacaacctacttctgaaagtggaagcagagcgaatgaaatcagagcaacttgatgaaatactgagagatatactaaagcaagctaaaaaggacgagaggtatttgattggacccagtggcaaagaaggtttccaaattatggtcttcaagaagaacgggctttctagcataatcaaaaagtacgggtttcgtatatcgagatcatcttag

SEQ ID NO: 23074 - protein, 536 aa, Muscodor strobelii
  misc_feature: SGI Peptide ID NO. 567846
  misc_feature (302)..(395): Pfam Id: PF00069 Pfam Desc: Protein kinase domain
  misc_feature (130)..(502): NCBI GI: 256730245 Blast Desc: NECHADRAFT_82545 [Nectria haematococca mpVI 77-13-4]
  misc_feature (30)..(491): NCBI GI: 256720668 Blast Desc: NECHADRAFT_85605 [Nectria haematococca mpVI 77-13-4]
  misc_feature (16)..(482): NCBI GI: 256723898 Blast Desc: NECHADRAFT_78374 [Nectria haematococca mpVI 77-13-4]
  misc_feature (41)..(502): NCBI GI: 256722402 Blast Desc: NECHADRAFT_82208 [Nectria haematococca mpVI 77-13-4]
  misc_feature (71)..(472): NCBI GI: 256721865 Blast Desc: NECHADRAFT_88069 [Nectria haematococca mpVI 77-13-4]
  misc_feature (130)..(472): NCBI GI: 256722820 Blast Desc: NECHADRAFT_87137 [Nectria haematococca mpVI 77-13-4]
  misc_feature (63)..(496): NCBI GI: 256723878 Blast Desc: [Nectria haematococca mpVI 77-13-4]
  misc_feature (122)..(476): NCBI GI: 116202873 Blast Desc: CHGG_09321 [Chaetomium globosum CBS 148.51] gi|88177839|gb|EAQ85307.1| CHGG_09321 [Chaetomium globosum CBS 148.51]
  misc_feature (65)..(514): NCBI GI: 256729997 Blast Desc: NECHADRAFT_82546 [Nectria haematococca mpVI 77-13-4]
  misc_feature (54)..(472): NCBI GI: 256722363 Blast Desc: NECHADRAFT_82209 [Nectria haematococca mpVI 77-13-4]
  misc_feature: Useful for introducing or modulating the production of volatile compounds
MAIELFDNRTDWLEDVMQQLRDARKPELWDRGKFVTNADIDTIISRVASRLNDANLDKDSADRSKRVLATLIYNNKLNAKVLRKLSKSDLRDSHLPLYFNETTKRLETSASDSQWSSYKLFEKDIDHLRFQDDQWMFLAPAFSDEKSSKACLTFDAKHPLPVINRDLAGGGSTAKVWKVQIHPSHIDLASSPTMNESSFLALKEMNSDSEKDFLREDIALKRIRELDHSNLIRLIASFKRGQTYFFLFPWADGGDLRSFWKDPEFDSQVRSPTTILWILEQISELASALRELHVPRNKKNPDENCRHGDLKPGNILLFKDDKSPGTLRIADAGLARFHAQVTKKRINGTTTTGGTEQYAPPESRRESLPDDQQSTFKLPRGYDIWSFGCILLEFLVWILGGYSEVVKFQDARKPSNKDDAARFFRIKTKNGIESYNIHPKVKEYIKLVRDDSRCKNTWMSDLATIIKHNLLLKVEAERMKSEQLDEILRDILKQAKKDERYLIGPSGKEGFQIMVFKKNGLSSIIKKYGFRISRSS

SEQ ID NO: 23075 - DNA, 2022 bp, Muscodor strobelii
  misc_feature: SGI cDNA ID NO. 567847
  misc_feature: Elevated expression when VOC is produced
  misc_feature: Encodes the peptide sequence at SEQ ID NO 23076
atgcaaaacataaatagcgacgacgaggactctgatgacctcgactatgtcccccaagctaatcttgcgtcttggttgaatggcgggtttcatacagccgactttccaaaatgggcgaggtaccatcctgatcgcgttctcgaagagcacattacggataaagccgtcagagaatactttggcgatggaggcgtttccgatcctgttattgaatacattatgaaggatgccaaaaagctctttgccatggcggttactgctccaatcgcagtacgtgagggcaaccgcttcccccttcgcaccgcgatgaaagcattcatgaagaacgggtacctagatagccacttatctgcgaagatcgcggatagtgacaccccatccggagtgcatacatatttgaaagaagaggatttgaagagaattagccgtggagtgtggaacaatccgacacacctcagggcctgcgaggatcagtggcaatggattgtgccgattctttcgactgcggaagacaattacaacttccgagctaccacaattttacctttcaaattagatcatagcgttgaggcatcaccaggtggcttcgggagagtgcacaaggttagaatcgaaccgggttatttcgaagacccagagccgccccacttacctataccggagttttttgcggttaaggagattatacccccagatgctgaagaaagaaagagggtcagggagtcatggggcaatgaagtgaaacttcttaaggaaatgaatgctcagaataaagctcatattgtccgctgtatgacggcattcacaataggggacgcccctccctctacacaatactatctggtcatggaatgggctgatggaggatgtcttgaggatctttttaaggaaaatcgaaaccctgtcttcaataccgatctcatgaagcaagttaccagacaactcctaggcatgtctacagcattgaagaaaactcacgaagcaggcattcgacacggggacttgaaacctggcaacattctacggttcggctcatcaggtcggaatttcatcggcacgctaaagataggtgattggggacttgccaagttccacagcatggcgaccatcatgaggcaagaaaaaggactagatacggttacaaggtacggtacccctctatacgagcctccacaggtgcagcttggcgaagccaaacagttgagccgcttgtatgatgtgtggtcctttggcgtcgtaatgcttgagatcatcatttggatccaatacggctacgaaggtgtcaaaaaattccgaaatgacgtcagcgacggcgcgaaatatgtaaagccgtgctacgaaagcagaaaaattggcgaggacggcgcaaaagcgagagtcagacagattgtcatcaagtggatggactaccttgccggggactgcgacgagaacactgtgattggggctctgttatctttgatcagggatcacttacttattgtaaggctacctctagaaatgggaaataccatgggacccaagggacagacagtcacgaggttcgtcgaagactgggtcagctctggtgcgcgcaagcccgctgctagtcttgctgcgccgactgcatctacgcccagcgtcacgatcacaggcccaatatccggcagcgaacccgtagctggacagaagattgagcgtgtccgatatacgtcagaggaaatgacaagtgtgctcgaacagtacgatcccgatgatgatgacgctaataccgccgacgacttctggttcaaggagaggcctcgaagagggcacccgaacttcgttcagaaagcgcagaaagatgagtccggacacttaatgatatccactcagagctcactgtcttcaatgccgcaaggaagctccgcctctagtgtttcgggtcttacgactagcatgaatggcaccagtctatcaggtatttcagttagtatagctaactcgaacctgctagctgtccaacgacagaattattccgtgagtggccaagtctcgatttga

SEQ ID NO: 23076 - protein, 673 aa, Muscodor strobelii
  misc_feature: SGI Peptide ID NO. 567847
  misc_feature (216)..(416): Pfam Id: PF00069 Pfam Desc: Protein kinase domain
  misc_feature (11)..(594): NCBI GI: 46110541 Blast Desc: FG02152.1 [Gibberella zeae PH-1]
  misc_feature (40)..(498): NCBI GI: 256722820 Blast Desc: NECHADRAFT_87137 [Nectria haematococca mpVI 77-13-4]
  misc_feature (41)..(497): NCBI GI: 164425000 Blast Desc: NCU06583 [Neurospora crassa OR74A] gi|157070747|gb|EAA32707.2| NCU06583 [Neurospora crassa OR74A]
  misc_feature (66)..(525): NCBI GI: 256729997 Blast Desc: NECHADRAFT_82546 [Nectria haematococca mpVI 77-13-4]
  misc_feature (41)..(498): NCBI GI: 256724988 Blast Desc: [Nectria haematococca mpVI 77-13-4]
  misc_feature (225)..(544): NCBI GI: 171690764 Blast Desc: protein product [Podospora anserina] gi|170945330|emb|CAP71442.1| protein product [Podospora anserina]
  misc_feature (158)..(435): NCBI GI: 256723898 Blast Desc: NECHADRAFT_78374 [Nectria haematococca mpVI 77-13-4]
  misc_feature (19)..(509): NCBI GI: 169607331 Blast Desc: SNOG_06722 [Phaeosphaeria nodorum SN15] gi|160701390|gb|EAT85373.2| SNOG_06722 [Phaeosphaeria nodorum SN15]
  misc_feature (280)..(497): NCBI GI: 170940328 Blast Desc: protein product [Podospora anserina]
  misc_feature (73)..(493): NCBI GI: 256722402 Blast Desc: NECHADRAFT_82208 [Nectria haematococca mpVI 77-13-4]
  misc_feature: Useful for introducing or modulating the production of volatile compounds
MQNINSDDEDSDDLDYVPQANLASWLNGGFHTADFPKWARYHPDRVLEEHITDKAVREYFGDGGVSDPVIEYIMKDAKKLFAMAVTAPIAVREGNRFPLRTAMKAFMKNGYLDSHLSAKIADSDTPSGVHTYLKEEDLKRISRGVWNNPTHLRACEDQWQWIVPILSTAEDNYNFRATTILPFKLDHSVEASPGGFGRVHKVRIEPGYFEDPEPPHLPIPEFFAVKEIIPPDAEERKRVRESWGNEVKLLKEMNAQNKAHIVRCMTAFTIGDAPPSTQYYLVMEWADGGCLEDLFKENRNPVFNTDLMKQVTRQLLGMSTALKKTHEAGIRHGDLKPGNILRFGSSGRNFIGTLKIGDWGLAKFHSMATIMRQEKGLDTVTRYGTPLYEPPQVQLGEAKQLSRLYDVWSFGVVMLEIIIWIQYGYEGVKKFRNDVSDGAKYVKPCYESRKIGEDGAKARVRQIVIKWMDYLAGDCDENTVIGALLSLIRDHLLIVRLPLEMGNTMGPKGQTVTRFVEDWVSSGARKPAASLAAPTASTPSVTITGPISGSEPVAGQKIERVRYTSEEMTSVLEQYDPDDDDANTADDFWFKERPRRGHPNFVQKAQKDESGHLMISTQSSLSSMPQGSSASSVSGLTTSMNGTSLSGISVSIANSNLLAVQRQNYSVSGQVSI

SEQ ID NO: 23077 - DNA, 2444 bp, Muscodor strobelii
  misc_feature: SGI EST ID NO. CUFF.54359.0
  misc_feature: Variant of the nucleotide sequence at SEQ ID NO 23075
gattgaaccgtttctggaggtgagacacaccgggctgtgctgtatagatagttcaaacgtcgattcaagagcaatagatggatacatgtaggtaagtactcagatttgttctagttgacattcctgagattatccagcttgctgcattttagcattttggctttcgccggtgaaaacattgcggaaactcttctgagaaaacttgtaacctgtcaattctcctcatccacgatgcaaaacataaatagcgacgacgaggactctgatgacctcgactatgtcccccaagctaatcttgcgtcttggttgaatggcgggtttcatacagccgactttccaaaatgggcgaggtaccatcctgatcgcgttctcgaagagcacattacggataaagccgtcagagaatactttggcgatggaggcgtttccgatcctgttattgaatacattatgaaggatgccaaaaagctctttgccatggcggttactgctccaatcgcagtacgtgagggcaaccgcttcccccttcgcaccgcgatgaaagcattcatgaagaacgggtacctagatagccacttatctgcgaagatcgcggatagtgacaccccatccggagtgcatacatatttgaaagaagaggatttgaagagaattagccgtggagtgtggaacaatccgacacacctcagggcctgcgaggatcagtggcaatggattgtgccgattctttcgactgcggaagacaattacaacttccgagctaccacaattttacctttcaaattagatcatagcgttgaggcatcaccaggtggcttcgggagagtgcacaaggttagaatcgaaccgggttatttcgaagacccagagccgccccacttacctataccggagttttttgcggttaaggagattatacccccagatgctgaagaaagaaagagggtcagggagtcatggggcaatgaagtgaaacttcttaaggaaatgaatgctcagaataaagctcatattgtccgctgtatgacggcattcacaataggggacgcccctccctctacacaatactatctggtcatggaatgggctgatggaggatgtcttgaggatctttttaaggaaaatcgaaaccctgtcttcaataccgatctcatgaagcaagttaccagacaactcctaggcatgtctacagcattgaagaaaactcacgaagcaggcattcgacacggggacttgaaacctggcaacattctacggttcggctcatcaggtcggaatttcatcggcacgctaaagataggtgattggggacttgccaagttccacagcatggcgaccatcatgaggcaagaaaaaggactagatacggttacaaggtacggtacccctctatacgagcctccacaggtgcagcttggcgaagccaaacagttgagccgcttgtatgatgtgtggtcctttggcgtcgtaatgcttgagatcatcatttggatccaatacggctacgaaggtgtcaaaaaattccgaaatgacgtcagcgacggcgcgaaatatgtaaagccgtgctacgaaagcagaaaaattggcgaggacggcgcaaaagcgagagtcagacagattgtcatcaagtggatggactaccttgccggggactgcgacgagaacactgtgattggggctctgttatctttgatcagggatcacttacttattgtaaggctacctctagaaatgggaaataccatgggacccaagggacagacagtcacgaggttcgtcgaagactgggtcagctctggtgcgcgcaagcccgctgctagtcttgctgcgccgactgcatctacgcccagcgtcacgatcacaggcccaatatccggcagcgaacccgtagctggacagaagattgagcgtgtccgatatacgtcagaggaaatgacaagtgtgctcgaacagtacgatcccgatgatgatgacgctaataccgccgacgacttctggttcaaggagaggcctcgaagagggcacccgaacttcgttcagaaagcgcagaaagatgagtccggacacttaatgatatccactcagagctcactgtcttcaatgccgcaaggaagctccgcctctagtgtttcgggtcttacgactagcatgaatggcaccagtctatcaggtatttcagttagtatagctaactcgaacctgctagctgtccaacgacagaattattccgtgagtggccaagtctcgatttgatgaaatggtactaaagtgaggtttagcaagtgagtcgataactgcagatgaaatgatgcagttgctgataggaggaaatagtatgtaagtgacagaatccgaaatgctacttagcatgaagttaacctagcatgatgcatcttgacagaaagtaagttttcgggttttccctgcactggccatgatagcag

SEQ ID NO: 23078 - DNA, 1746 bp, Muscodor strobelii
  misc_feature: SGI cDNA ID NO. 567848
  misc_feature: Elevated expression when VOC is produced
  misc_feature: Encodes the peptide sequence at SEQ ID NO 23079
atgccactttcaatcaaatacttagtacgagatctacgtactcggtcgaagtattgcgagctctgcgctttatttctcaaggttgccgaccaccgcggtgacattcactcaagctcaaacatcatcagattagataaagtacagtcatcgcttattttgaacaacgccgggaggccagtgttaacgatctgtcgaacactcgagaaccatgggtctcaagtcccttacggtctgccaacactgcctcagccgggcaccgcggcacatttcgacgtcatgcgacaatggctccatcactgtgacaacatcgataaacatcccaaatgccactcacataatgatggctctagtagatgcatgccgacaagagtgctggacgtaggagtagagggagacgatatgatccgcctttacgagccgagcgcgaacgaaggcggacaatatatcgcgctatcacatccctggggtcacggtccccatctcaccacggatcagggtaacttagagcgattcaagaactgcggaattaagatgagtattcttccggggaccttccgtgacgctgtgatcacaacccgggcactaggcaaacggtatttatggatcgattccctttgcatagtgcaaggtccgggcggcgatttccaggcacaagctggaagaatggagacagtttttagctctgcttattgtgtacttgcagccacgcaggcgcataaccaggttgacgggtttctacattcgcgcagcagggagagagcatacgtcacattgcggacaaggaacaacacgggcactttctatgtgtgtgaaaatatagacgatttcaacggcgatgtccttgagggtcatctcaaccagcgcggctgggttctgcaggagcacgcgctcgcgaggcggaccatcttctttgcggagaagcagacttattatgagtgcggcgatggagtgcgctgtgagacactgacgaaagtgactaacaatttagcatccttcctaggtgacccaagcttccctcatattatcatgtccgcaacacaaggcgaaaaaatagtgcggtttcagaatctctatcagacgtactctggccttggtttcaccaatgacgaggaccgagccgtggccatgagtgggatccaaagccggttgctaaaagccttcggcacactcggcggctatggaatatttgatgaggtccagaaggatacctcaggaggcggtcttctacgtcggagtctgttatggcattgtcctcgtggagaagagctctcgcggatacgcttcacgagagatccgacgctgtcttatatgccttcctggtcgtggatgacgtacaaaggggcgatcgactatctcaagccagaatttggcaacattgactgggcagacatccagtcgccctggtcgagcgataagggttcgggacagttcacaatactatccgacagcagtagagagttgccgctgatcagtggtatggtccgtgacatgcgcataagcgacgattttgagggtaaattattctacgacataccgagcgaaaccgacactgatcacgtgagatgtatcgttcttggtgtttcgaagggaaagcggccatccaaggagaggcggaactatgtaattctcgtgcagcgcagtaagctccgaggtctcgatacaagtgagctgtatcagagggttggtgttggatatctattgggcagatacctctccaaggaaagagagaggatattcatgcattga

SEQ ID NO: 23079 - protein, 581 aa, Muscodor strobelii
  misc_feature: SGI Peptide ID NO. 567848
  misc_feature (148)..(294): Pfam Id: PF06985 Pfam Desc: Heterokaryon incompatibility protein (HET)
  misc_feature (148)..(235): Pfam Id: PF06985 Pfam Desc: Heterokaryon incompatibility protein (HET)
  misc_feature (3)..(573): NCBI GI: 46110541 Blast Desc: FG02152.1 [Gibberella zeae PH-1]
  misc_feature (3)..(575): NCBI GI: 169607331 Blast Desc: SNOG_06722 [Phaeosphaeria nodorum SN15] gi|160701390|gb|EAT85373.2| SNOG_06722 [Phaeosphaeria nodorum SN15]
  misc_feature (12)..(576): NCBI GI: 171694810 Blast Desc: protein product [Podospora anserina] gi|170947647|emb|CAP59809.1| protein product [Podospora anserina]
  misc_feature (67)..(574): NCBI GI: 170940327 Blast Desc: protein product [Podospora anserina]
  misc_feature (9)..(544): NCBI GI: 256722820 Blast Desc: NECHADRAFT_87137 [Nectria haematococca mpVI 77-13-4]
  misc_feature (21)..(571): NCBI GI: 164425000 Blast Desc: NCU06583 [Neurospora crassa OR74A] gi|157070747|gb|EAA32707.2| NCU06583 [Neurospora crassa OR74A]
  misc_feature (17)..(566): NCBI GI: 256729997 Blast Desc: NECHADRAFT_82546 [Nectria haematococca mpVI 77-13-4]
  misc_feature (8)..(549): NCBI GI: 256721865 Blast Desc: NECHADRAFT_88069 [Nectria haematococca mpVI 77-13-4]
  misc_feature (11)..(568): NCBI GI: 256722363 Blast Desc: NECHADRAFT_82209 [Nectria haematococca mpVI 77-13-4]
  misc_feature (11)..(571): NCBI GI: 256723790 Blast Desc: NECHADRAFT_78344 [Nectria haematococca mpVI 77-13-4]
  misc_feature: Useful for introducing or modulating the production of volatile compounds
MPLSIKYLVRDLRTRSKYCELCALFLKVADHRGDIHSSSNIIRLDKVQSSLILNNAGRPVLTICRTLENHGSQVPYGLPTLPQPGTAAHFDVMRQWLHHCDNIDKHPKCHSHNDGSSRCMPTRVLDVGVEGDDMIRLYEPSANEGGQYIALSHPWGHGPHLTTDQGNLERFKNCGIKMSILPGTFRDAVITTRALGKRYLWIDSLCIVQGPGGDFQAQAGRMETVFSSAYCVLAATQAHNQVDGFLHSRSRERAYVTLRTRNNTGTFYVCENIDDFNGDVLEGHLNQRGWVLQEHALARRTIFFAEKQTYYECGDGVRCETLTKVTNNLASFLGDPSFPHIIMSATQGEKIVRFQNLYQTYSGLGFTNDEDRAVAMSGIQSRLLKAFGTLGGYGIFDEVQKDTSGGGLLRRSLLWHCPRGEELSRIRFTRDPTLSYMPSWSWMTYKGAIDYLKPEFGNIDWADIQSPWSSDKGSGQFTILSDSSRELPLISGMVRDMRISDDFEGKLFYDIPSETDTDHVRCIVLGVSKGKRPSKERRNYVILVQRSKLRGLDTSELYQRVGVGYLLGRYLSKERERIFMH

SEQ ID NO: 23080 - DNA, 2113 bp, Muscodor strobelii
  misc_feature: SGI EST ID NO. CUFF.54362.0
  misc_feature: Variant of the nucleotide sequence at SEQ ID NO 23078
gttaacagtagtagaaagtacgttcctgccagttgcctatccagcccacctattgacagcagggtacacaaagctcgatagtgaatgggagatgcatgacgatacggcattcgcctcgcgagttttaacgcagcttgaggctaccaggtcacccggactgatgggacctcgcaaactggccaacctctgttcggcatgcgaacagttggacttctttagtatcatgccactttcaatcaaatacttagtacgagatctacgtactcggtcgaagtattgcgagctctgcgctttatttctcaaggttgccgaccaccgcggtgacattcactcaagctcaaacatcatcagattagataaagtacagtcatcgcttattttgaacaacgccgggaggccagtgttaacgatctgtcgaacactcgagaaccatgggtctcaagtcccttacggtctgccaacactgcctcagccgggcaccgcggcacatttcgacgtcatgcgacaatggctccatcactgtgacaacatcgataaacatcccaaatgccactcacataatgatggctctagtagatgcatgccgacaagagtgctggacgtaggagtagagggagacgatatgatccgcctttacgagccgagcgcgaacgaaggcggacaatatatcgcgctatcacatccctggggtcacggtccccatctcaccacggatcagggtaacttagagcgattcaagaactgcggaattaagatgagtattcttccggggaccttccgtgacgctgtgatcacaacccgggcactaggcaaacggtatttatggatcgattccctttgcatagtgcaaggtccgggcggcgatttccaggcacaagctggaagaatggagacagtttttagctctgcttattgtgtacttgcagccacgcaggcgcataaccaggttgacgggtttctacattcgcgcagcagggagagagcatacgtcacattgcggacaaggaacaacacgggcactttctatgtgtgtgaaaatatagacgatttcaacggcgatgtccttgagggtcatctcaaccagcgcggctgggttctgcaggagcacgcgctcgcgaggcggaccatcttctttgcggagaagcagacttattatgagtgcggcgatggagtgcgctgtgagacactgacgaaagtgactaacaatttagcatccttcctaggtgacccaagcttccctcatattatcatgtccgcaacacaaggcgaaaaaatagtgcggtttcagaatctctatcagacgtactctggccttggtttcaccaatgacgaggaccgagccgtggccatgagtgggatccaaagccggttgctaaaagccttcggcacactcggcggctatggaatatttgatgaggtccagaaggatacctcaggaggcggtcttctacgtcggagtctgttatggcattgtcctcgtggagaagagctctcgcggatacgcttcacgagagatccgacgctgtcttatatgccttcctggtcgtggatgacgtacaaaggggcgatcgactatctcaagccagaatttggcaacattgactgggcagacatccagtcgccctggtcgagcgataagggttcgggacagttcacaatactatccgacagcagtagagagttgccgctgatcagtggtatggtccgtgacatgcgcataagcgacgattttgagggtaaattattctacgacataccgagcgaaaccgacactgatcacgtgagatgtatcgttcttggtgtttcgaagggaaagcggccatccaaggagaggcggaactatgtaattctcgtgcagcgcagtaagctccgaggtctcgatacaagtgagctgtatcagagggttggtgttggatatctattgggcagatacctctccaaggaaagagagaggatattcatgcattgaacagagcagcgtagcggcgtttcaacgcgatttgcttgcaatctaggaagcttagaatttgttgtgatcaacttttattcttcggtttatgtttattgtcagattccagtccttgtggtatatgcatcaatacaatgcaattgg

SEQ ID NO: 23081 - DNA, 2379 bp, Muscodor strobelii
  misc_feature: SGI cDNA ID NO. 567849
  misc_feature: Elevated expression when VOC is produced
  misc_feature: Encodes the peptide sequence at SEQ ID NO 23082
atgtctattcggtcgttgatatttggctcgatggcagctgcgttatttcaactgtcactcgctgccataaattcaaccaatggctacaaatatgttaatcccctaattggctctataaatggcgggcatgtgtttgcgggagcaacgctaccgtttggtatggccaaaggagtagcggatgttacatccgacaatcaaggtggctacgctgatgatgacagcggaaccggcggcgcttcatctctcgccaacttcccgatcttcgcatatccggggtgtaaaaatgacactatcgacggttgcgttttccctaagaccagacgacaggtcaacgtagtagacggaagcgtttctgctcgcccaggatacttcacaattggtctcgagagtggaatcaaggccgaagtcacagcgtctaatcatacaacattatggagattcaccttctccggtaatgcgactggtgatgccgccgttgacggacctctcagccctctttttattgtcgatctaaccgatctacctgatagtaggaggaatggtagcgcggccgtcaacgcggacacgggacgtatgaccggaacgggtgtattcggaccaagctttggaattggaagttatgcgttacatttctgtgccgacttccaaggagcaaacatccgcgatacaggtgttttcatgaacactcgtgcgggcagcgacccaaagaacatcactgtccaagaagacgccaacagtccgcctctcccagctggaacttatacatggttcgagaccgtcgattcaggcacggagtttctggcacgggtcggcctctcgttcatcagctccgagcaagcttgcaagaatgctgagacggaggttccagacttcagtttcgaagacacccttgcaacagctgagcaagcttggcaagacaagttcagtgtcattaatatcgacaccaccactgcttcaaactctagtagcagcagtagcaccagcttggacgacttccagactatcttctggtccggagtctatagagcaatgatctcgcctcaggattacaccggggagaacccattatgggagagcgatgagccgtattacgactcatactactgcatctgggattcattcaggagcattcacccctttatcacgcttgttgatccatactcgcaatctctcatgattcgttcgctgatcgatatctatcgtcacgagggttggcttcccgactgccgcatgtcgctgtgcaagggttggacacagggcggctctaatgctgacattgtcctggccgatgcgtacctcaagaatatcacgcaaggaatcgattgggaagccggctatgaggctgtggtgaaggatgcggaagtggagccccaggtctgggatgttgagggccgaggaggcttgactagctggaaaaatctcgggtacattcccgccgatgattttgatcctattggcaatggattgcagactcgcagtgtttcacgaaccgttgaatatgcttacaacgatttctgtattgctgagatggcacagaaaatgggcaaaggtgacgattacgaaaagtacgcaaagagatctgaaaactggaagaatctctataaggatgatcagacatcgacgctcaacggtgccacattgaactatactggcttcttgcaaccaaagttcccgaatggtacttggggtttccaagatccaacattctgttcgccattgaataacttcgactcgtgttatctaaatcctagtggccatgagacttacgagggtagcacgtggctctacactttctttgctcctcacgacatggcagccctgatcactacccttggtggccccgacgctttcgttgatcgtctcgacttcttccacacaagcggactcctgtacgtcggagacgaacaagggtttctccctgtataccaataccactacgcgggtcgacctggaaagtccgcagagcgcattcactactacattcccagccaattcaatacatcgacaaacggcatacctggcaatgatgactccggagcaatgggatcgttcgtcgccctttccatgctgggtatcttcccaaatccgggccaagacgtctatttcattacaccgccattcttcccttcagtctctatcaccaacagtcttagtgggaagacagcaacaatcaagaacgtgaatttcgatgcctcttacagcaacatctacatacagagtgctaagctcaatggcgaggactacaccaggaactacctgacgcatgactttttctacaatggaggtactctagagcttacacttgggtcaaaagagagtacaacgtggggcacagggaatgatgatctgccgccaagtttgagcacaacaagtagctag

SEQ ID NO: 23082 - protein, 792 aa, Muscodor strobelii
  misc_feature: SGI Peptide ID NO. 567849
  misc_feature (246)..(772): Pfam Id: PF07971 Pfam Desc: Glycosyl hydrolase family 92
  misc_feature (31)..(788): NCBI GI: 119473165 Blast Desc: alpha-1,2-mannosidase, subfamily [Neosartorya fischeri NRRL 181] gi|119406672|gb|EAW16623.1| alpha-1,2-mannosidase, subfamily [Neosartorya fischeri NRRL 181]
  misc_feature (31)..(787): NCBI GI: 70992807 Blast Desc: alpha-1,2-mannosidase subfamily [Aspergillus fumigatus Af293] gi|66848885|gb|EAL89214.1| alpha-1,2-mannosidase, subfamily [Aspergillus fumigatus Af293]
  misc_feature (31)..(787): NCBI GI: 159130294 Blast Desc: alpha-1,2-mannosidase, subfamily [Aspergillus fumigatus A1163]
  misc_feature (1)..(789): NCBI GI: 212531401 Blast Desc: alpha-1,2-mannosidase, subfamily [Penicillium marneffei ATCC 18224] gi|210071221|gb|EEA25310.1| alpha-1,2-mannosidase, subfamily [Penicillium marneffei ATCC
  misc_feature (31)..(788): NCBI GI: 145240607 Blast Desc: An08g08370 [Aspergillus niger] gi|134077473|emb|CAK40038.1| protein product [Aspergillus niger]
  misc_feature (31)..(788): NCBI GI: 121700336 Blast Desc: alpha-1,2-mannosidase, subfamily [Aspergillus clavatus NRRL 1] gi|119396575|gb|EAW07007.1| alpha-1,2-mannosidase, subfamily [Aspergillus clavatus NRRL 1]
  misc_feature (1)..(789): NCBI GI: 242772843 Blast Desc: alpha-1,2-mannosidase, subfamily [Talaromyces stipitatus ATCC 10500] gi|218721739|gb|EED21157.1| alpha-1,2-mannosidase, subfamily [Talaromyces stipitatus ATCC
  misc_feature (24)..(787): NCBI GI: 189209872 Blast Desc: conserved [Pyrenophora tritici-repentis Pt-1C-BFP] gi|187977361|gb|EDU43987.1| conserved [Pyrenophora tritici-repentis Pt-1C-BFP]
  misc_feature (5)..(788): NCBI GI: 255946688 Blast Desc: Pc22g00660 [Penicillium chrysogenum Wisconsin 54-1255] gi|211591128|emb|CAP97354.1| Pc22g00660 [Penicillium chrysogenum Wisconsin 54-1255]
  misc_feature (31)..(789): NCBI GI: 145613024 Blast Desc: MGG_08274 [Magnaporthe grisea 70-15] gi|145020087|gb|EDK04315.1| MGG_08274 [Magnaporthe grisea 70-15]
  misc_feature: Useful for introducing or modulating the production of volatile compounds
MSIRSLIFGSMAAALFQLSLAAINSTNGYKYVNPLIGSINGGHVFAGATLPFGMAKGVADVTSDNQGGYADDDSGTGGASSLANFPIFAYPGCKNDTIDGCVFPKTRRQVNVVDGSVSARPGYFTIGLESGIKAEVTASNHTTLWRFTFSGNATGDAAVDGPLSPLFIVDLTDLPDSRRNGSAAVNADTGRMTGTGVFGPSFGIGSYALHFCADFQGANIRDTGVFMNTRAGSDPKNITVQEDANSPPLPAGTYTWFETVDSGTEFLARVGLSFISSEQACKNAETEVPDFSFEDTLATAEQAWQDKFSVINIDTTTASNSSSSSSTSLDDFQTIFWSGVYRAMISPQDYTGENPLWESDEPYYDSYYCIWDSFRSIHPFITLVDPYSQSLMIRSLIDIYRHEGWLPDCRMSLCKGWTQGGSNADIVLADAYLKNITQGIDWEAGYEAVVKDAEVEPQVWDVEGRGGLTSWKNLGYIPADDFDPIGNGLQTRSVSRTVEYAYNDFCIAEMAQKMGKGDDYEKYAKRSENWKNLYKDDQTSTLNGATLNYTGFLQPKFPNGTWGFQDPTFCSPLNNFDSCYLNPSGHETYEGSTWLYTFFAPHDMAALITTLGGPDAFVDRLDFFHTSGLLYVGDEQGFLPVYQYHYAGRPGKSAERIHYYIPSQFNTSTNGIPGNDDSGAMGSFVALSMLGIFPNPGQDVYFITPPFFPSVSITNSLSGKTATIKNVNFDASYSNIYIQSAKLNGEDYTRNYLTHDFFYNGGTLELTLGSKESTTWGTGNDDLPPSLSTTSS

SEQ ID NO: 23083 - DNA, 2303 bp, Muscodor strobelii
  misc_feature: SGI EST ID NO. CUFF.54353.0
  misc_feature: Variant of the nucleotide sequence at SEQ ID NO 23081
ccggcggcgcttcatctctcgccaacttcccgatcttcgcatatccggggtgtaaaaatgacactatcgacggttgcgttttccctaagaccagacgacaggtcaacgtagtagacggaagcgtttctgctcgcccaggatacttcacaattggtctcgagagtggaatcaaggccgaagtcacagcgtctaatcatacaacattatggagattcaccttctccggtaatgcgactggtgatgccgccgttgacggacctctcagccctctttttattgtcgatctaaccgatctacctgatagtaggaggaatggtagcgcggccgtcaacgcggacacgggacgtatgaccggaacgggtgtattcggaccaagctttggaattggaagttatgcgttacatttctgtgccgacttccaaggagcaaacatccgcgatacaggtgttttcatgaacactcgtgcgggcagcgacccaaagaacatcactgtccaagaagacgccaacagtccgcctctcccagctggaacttatacatggttcgagaccgtcgattcaggcacggagtttctggcacgggtcggcctctcgttcatcagctccgagcaagcttgcaagaatgctgagacggaggttccagacttcagtttcgaagacacccttgcaacagctgagcaagcttggcaagacaagttcagtgtcattaatatcgacaccaccactgcttcaaactctagtagcagcagtagcaccagcttggacgacttccagactatcttctggtccggagtctatagagcaatgatctcgcctcaggattacaccggggagaacccattatgggagagcgatgagccgtattacgactcatactactgcatctgggattcattcaggagcattcacccctttatcacgcttgttgatccatactcgcaatctctcatgattcgttcgctgatcgatatctatcgtcacgagggttggcttcccgactgccgcatgtcgctgtgcaagggttggacacagggcggctctaatgctgacattgtcctggccgatgcgtacctcaagaatatcacgcaaggaatcgattgggaagccggctatgaggctgtggtgaaggatgcggaagtggagccccaggtctgggatgttgagggccgaggaggcttgactagctggaaaaatctcgggtacattcccgccgatgattttgatcctattggcaatggattgcagactcgcagtgtttcacgaaccgttgaatatgcttacaacgatttctgtattgctgagatggcacagaaaatgggcaaaggtgacgattacgaaaagtacgcaaagagatctgaaaactggaagaatctctataaggatgatcagacatcgacgctcaacggtgccacattgaactatactggcttcttgcaaccaaagttcccgaatggtacttggggtttccaagatccaacattctgttcgccattgaataacttcgactcgtgttatctaaatcctagtggccatgagacttacgagggtagcacgtggctctacactttctttgctcctcacgacatggcagccctgatcactacccttggtggccccgacgctttcgttgatcgtctcgacttcttccacacaagcggactcctgtacgtcggagacgaacaagggtttctccctgtataccaataccactacgcgggtcgacctggaaagtccgcagagcgcattcactactacattcccagccaattcaatacatcgacaaacggcatacctggcaatgatgactccggagcaatgggatcgttcgtcgccctttccatgctgggtatcttcccaaatccgggccaagacgtctatttcattacaccgccattcttcccttcagtctctatcaccaacagtcttagtgggaagacagcaacaatcaagaacgtgaatttcgatgcctcttacagcaacatctacatacagagtgctaagctcaatggcgaggactacaccaggaactacctgacgcatgactttttctacaatggaggtactctagagcttacacttgggtcaaaagagagtacaacgtggggcacagggaatgatgatctgccgccaagtttgagcacaacaagtagctagagtttgatatgagaggaaatgcgtgcaagaggatcttttgggagaaataatgaaataatcatatccactcttgaccagcagattaattgtctagaatggcacagtattcgaacatataatctgttcgtaacgtggcttgttttacccggc

SEQ ID NO: 23084 - DNA, 747 bp, Muscodor strobelii
  misc_feature: SGI cDNA ID NO. 567850
  misc_feature: Elevated expression when VOC is produced
  misc_feature: Encodes the peptide sequence at SEQ ID NO 23085
atggggtctcaagatgacccccgtgtcaaattcggtctttcatgtcctgacggtggcgacttctacgtttgtcaagattctaaaacgcagttcatcggctgttgcggcgaagacccgtgcacatctacacaagacggtagctgtcctgataacgagctgtacaacgccactttcagcgcttcaagtggcgtgaacttcctcgaacagagctgcgttgacgcttcagacaatgcgttgtggtatacctgctctgatgcaaagccgccttttctaggctgttgcaagaacaacccatgtaacaacggatgcgaagacggcaatctggttgccgcaaaattgagtgatgatcccaagaacgcaagccaattcctgcttccggaaacaacgacaacgacaagcagcagtagcacttcaccgacgaccatcaacacatcgagcgcgagtccgacgaattcagatacaacagataccgggagttcgaagtcgtcggctggattgatcgttggtgtctcgctggcgggcgtggtcattttacttattgtgattgggatttacttatggtcgaggcgaagagaacaagcccgcctggaacgcgaacgagaagaacggctggaggaggaacagtcaaaaagactgaatgagcctcaaggtttatttactgctcaattcaaacgtcgcaagatcccgagccaagtcctggtctctccgaaagcaccaatcctcatcattcaaatgtatcagagttag

SEQ ID NO: 23085 - protein, 248 aa, Muscodor strobelii
  misc_feature: SGI Peptide ID NO. 567850
  misc_feature (8)..(195): NCBI GI: 46116768 Blast Desc: FG04226.1 [Gibberella zeae PH-1]
  misc_feature (7)..(215): NCBI GI: 256725983 Blast Desc: NECHADRAFT_94268 [Nectria haematococca mpVI 77-13-4]
  misc_feature (6)..(222): NCBI GI: 256729600 Blast Desc: [Nectria haematococca mpVI 77-13-4]
  misc_feature (11)..(187): NCBI GI: 85110938 Blast Desc: NCU00835 [Neurospora crassa OR74A] gi|28925414|gb|EAA34465.1| [Neurospora crassa OR74A]
  misc_feature (11)..(132): NCBI GI: 171679705 Blast Desc: protein product [Podospora anserina] gi|170939478|emb|CAP64706.1| protein product [Podospora anserina]
  misc_feature (5)..(213): NCBI GI: 46121253 Blast Desc: FG05005.1 [Gibberella zeae PH-1]
  misc_feature (9)..(124): NCBI GI: 39976427 Blast Desc: MGG_05860 [Magnaporthe grisea 70-15] gi|145011895|gb|EDJ96551.1| MGG_05860 [Magnaporthe grisea 70-15]
  misc_feature (13)..(191): NCBI GI: 67526631 Blast Desc: AN3773.2 [Aspergillus nidulans FGSC A4] gi|40740791|gb|EAA59981.1| AN3773.2 [Aspergillus nidulans FGSC A4] gi|259481675|tpe|CBF75417.1| TPA: conserved [Aspergillus FGSC
  misc_feature (13)..(217): NCBI GI: 67525663 Blast Desc: AN3289.2 [Aspergillus nidulans FGSC A4] gi|40744077|gb|EAA63257.1| AN3289.2 [Aspergillus nidulans FGSC A4]
  misc_feature (13)..(201): NCBI GI: 169772071 Blast Desc: [Aspergillus oryzae RIB40] gi|83768364|dbj|BAE58503.1| protein product [Aspergillus oryzae]
  misc_feature: Useful for introducing or modulating the production of volatile compounds
MGSQDDPRVKFGLSCPDGGDFYVCQDSKTQFIGCCGEDPCTSTQDGSCPDNELYNATFSASSGVNFLEQSCVDASDNALWYTCSDAKPPFLGCCKNNPCNNGCEDGNLVAAKLSDDPKNASQFLLPETTTTTSSSSTSPTTINTSSASPTNSDTTDTGSSKSSAGLIVGVSLAGVVILLIVIGIYLWSRRREQARLEREREERLEEEQSKRLNEPQGLFTAQFKRRKIPSQVLVSPKAPILIIQMYQS

SEQ ID NO: 23086 - DNA, 1965 bp, Muscodor strobelii
  misc_feature: SGI EST ID NO. CUFF.54356.0
  misc_feature: Variant of the nucleotide sequence at SEQ ID NO 23084
ccagatccaaatatgaacaacggacttgcgaagccacttgccactcctcttcaataccatgacgttgatcacgtcgcaaagatgcagttgcgatccatatgcaggagcatccgggctttctcgtttctctatctcatccgatctccctgcgttcgtctcctaaacacgcctcactttacttgatgcacaggcattcattcaataaacagtgaatcagtaggacaatcgatattcattctagataatttgttgcgagtcattgatgccgccggagcaacacttacaagacactctgcttcattagttaaatcgcctctacttctctcacggatcacttgcactctacacgtatcagcatggggtctcaagatgacccccgtgtcaaattcggtctttcatgtcctgacggtggcgacttctacgtttgtcaagattctaaaacgcagttcatcggctgttgcggcgaagacccgtgcacatctacacaagacggtagctgtcctgataacgagctgtacaacgccactttcagcgcttcaagtggcgtgaacttcctcgaacagagctgcgttgacgcttcagacaatgcgttgtggtatacctgctctgatgcaaagccgccttttctaggctgttgcaagaacaacccatgtaacaacggatgcgaagacggcaatctggttgccgcaaaattgagtgatgatcccaagaacgcaagccaattcctgcttccggaaacaacgacaacgacaagcagcagtagcacttcaccgacgaccatcaacacatcgagcgcgagtccgacgaattcagatacaacagataccgggagttcgaagtcgtcggctggattgatcgttggtgtctcgctggcgggcgtggtcattttacttattgtgattgggatttacttatggtcgaggcgaagagaacaagcccgcctggaacgcgaacgagaagaacggctggaggaggaacagtcaaaaagactgaatgagcctcaaggtttatttactgaagacgttaccaagtcaccgatgaattcaaacacctcgccgcctgtagatcatggcatatttctggccaatagctcaattcaaacgtcgcaagatcccgagccaagtcctggtctctccgaaagcaccaatcctcatcattcaaatgtatcagagttagaaggcagtgcaattatgagagggtttcaccccagcgcgctttacccgagttcatcggaggcttatcgcgggttcaatggacgggaatcgggtcaccattggcgttgaggcacaatttctatagtacgatacccaatacaatacttgctagaccgacatcaacgacccgtgccatcaactaagtgcgatcgtactgtggtaagggactttaagttgtgtgttatccacacaagttgcttggcgactcaagcaaaaagttgttatagtgatttgggtcatctcgaagacctcgctggcgtgccaacttgctgcaacggtaatattacgcacatgcgtcgccgacacataggttcaccattacctgcttgtaagattgcttgtcacagtattgaagggacgatgacccgatggaaaatcattggtcgccgaatagggtacagaatctactctggtccgaagcaagatacccatacaagacttgagcaagctagcagggccaggaaactaacggcaactaaggtggtgctcaagatggatggcaacgacagtctcctcgacatttggtatttgccatttgctgagggataatgtgaattcatgcggctcaatggtaatgtgaaggtagaatgtccgaaacgatttgcgtcctgcgcttggaattggccgatcggcttttgagatgcaataactactctagaattcatggatcatcccacagttagagttgttccgcgtcagaagcagctgagaacaacgggccttggcgtcactagcagagactacgtcaagg

SEQ ID NO: 23087 - DNA, 450 bp, Muscodor strobelii
  misc_feature: SGI cDNA ID NO. 567851
  misc_feature: Reduced expression when VOC is produced
  misc_feature: Encodes the peptide sequence at SEQ ID NO 23088
atgtcttcgtcggaccagtccccaggacctcaacccgagatgcagcgagaggaagagcaaccccaaacgcagcagcgcgagcagtccgtggcccgcagcgaggcttcagtttcccaatctcgctcgcgacctgctcgacagcgacgtcgcaaccgcagacgccaggacttccagcctgattccgaggcggaacagggccaacagttagcgccccgccagcaacaacaggctcagcaataccctcagcaacagcaacagatgcctcccaacaaccaacagcaaatgatgcagcagcagcaattccaacagcagcaacagatgcaacagcaacaacaagatggcggaaagagcgacacattgaagttgagactggatctgaacctcgaggtcgaggtcacgctaaaagcgcgtatccatggtgacttgacattggctctgttggacacttaa

SEQ ID NO: 23088 - protein, 149 aa, Muscodor strobelii
  misc_feature: SGI Peptide ID NO. 567851
  misc_feature (114)..(147): NCBI GI: 256730496 Blast Desc: NECHADRAFT_98506 [Nectria haematococca mpVI 77-13-4]
  misc_feature (113)..(148): NCBI GI: 145605790 Blast Desc: [Magnaporthe grisea 70-15] gi|145013574|gb|EDJ98215.1| [Magnaporthe grisea 70-15]
  misc_feature (113)..(149): NCBI GI: 116196838 Blast Desc: [Chaetomium globosum CBS 148.51] gi|88180930|gb|EAQ88398.1| [Chaetomium globosum CBS 148.51]
  misc_feature (91)..(148): NCBI GI: 119497507 Blast Desc: NFIA_023260 [Neosartorya fischeri NRRL 181] gi|119413674|gb|EAW23615.1| conserved [Neosartorya fischeri NRRL 181]
  misc_feature (114)..(147): NCBI GI: 46109630 Blast Desc: FG01697.1 [Gibberella zeae PH-1]
  misc_feature (102)..(147): NCBI GI: 121703461 Blast Desc: conserved [Aspergillus clavatus NRRL 1] gi|119398138|gb|EAW08569.1| conserved [Aspergillus clavatus NRRL 1]
  misc_feature (116)..(148): NCBI GI: 46136619 Blast Desc: FG09825.1 [Gibberella zeae PH-1]
  misc_feature (120)..(147): NCBI GI: 171688334 Blast Desc: protein product [Podospora anserina] gi|170944129|emb|CAP70239.1| protein product [Podospora anserina]
  misc_feature (120)..(147): NCBI GI: 156065505 Blast Desc: [Sclerotinia sclerotiorum 1980] gi|154691622|gb|EDN91360.1| [Sclerotinia sclerotiorum 1980]
  misc_feature (120)..(147): NCBI GI: 85108856 Blast Desc: NCU07976 [Neurospora crassa OR74A] gi|28924257|gb|EAA33410.1| [Neurospora crassa OR74A]
  misc_feature: Useful for introducing or modulating the production of volatile compounds
MSSSDQSPGPQPEMQREEEQPQTQQREQSVARSEASVSQSRSRPARQRRRNRRRQDFQPDSEAEQGQQLAPRQQQQAQQYPQQQQQMPPNNQQQMMQQQQFQQQQQMQQQQQDGGKSDTLKLRLDLNLEVEVTLKARIHGDLTLALLDT

SEQ ID NO: 23089 - DNA, 1091 bp, Muscodor strobelii
  misc_feature: SGI EST ID NO. CUFF.54670.0
  misc_feature: Variant of the nucleotide sequence at SEQ ID NO 23087
cagcagtccgctaaggatggggaaacttggaatgcaagaagggtcctttaacaggatttgtacgaagagtagcccgataaaagggcctcgaatccctcgatctatatacgccacaattttctcgataaatatacctgaacttttgactttcatatctgtcaaacgtgtattcgcagcccaaccaaagtccacataatccaagaacaaacgcctgtgtctatcaataagccagcatcatgtcttcgtcggaccagtccccaggacctcaacccgagatgcagcgagaggaagagcaaccccaaacgcagcagcgcgagcagtccgtggcccgcagcgaggcttcagtttcccaatctcgctcgcgacctgctcgacagcgacgtcgcaaccgcagacgccaggacttccagcctgattccgaggcggaacagggccaacagttagcgccccgccagcaacaacaggctcagcaataccctcagcaacagcaacagatgcctcccaacaaccaacagcaaatgatgcagcagcagcaattccaacagcagcaacagatgcaacagcaacaacaagatggcggaaagagcgacacattgaagttgagactggatctgaacctcgaggtcgaggtcacgctaaaagcgcgtatccatggtgacttgacattggctctgttggacacttaattcgaataccaggacgatacgacaaattgaagatttgggagtatgaattgatggtgagattacgatgattacgacgaagttatttgagttacatatacagccttttttttacaactgcagaagctggagaatattttcttttgtccaaaaggctagctggtggtacatcagttgtacctgtactaatactgtacctataattcatcccaatttgaaaaaagatatgaaataaaatttctcccttggaaatggtaaacatcaaaacagaagaatgtaagcaatacataattgttagtaaatgtcatgccgcgtgccgagctgccaggcgaagacattgttgatcatgggcttcaaacttgttacgcagggatacaggcggaatatgacgtcactgcatccaggttc

SEQ ID NO: 23090 - DNA, 450 bp, Muscodor strobelii
  misc_feature: SGI cDNA ID NO. 567852
  misc_feature: Reduced expression when VOC is produced
  misc_feature: Encodes the peptide sequence at SEQ ID NO 23091
atgtcttcgtcggaccagtccccaggacctcaacccgagatgcagcgagaggaagagcaaccccaaacgcagcagcgcgagcagtccgtggcccgcagcgaggcttcagtttcccaatctcgctcgcgacctgctcgacagcgacgtcgcaaccgcagacgccaggacttccagcctgattccgaggcggaacagggccaacagttagcgccccgccagcaacaacaggctcagcaataccctcagcaacagcaacagatgcctcccaacaaccaacagcaaatgatgcagcagcagcaattccaacagcagcaacagatgcaacagcaacaacaagatggcggaaagagcgacacattgaagttgagactggatctgaacctcgaggtcgaggtcacgctaaaagcgcgtatccatggtgacttgacattggctctgttggatggttga

SEQ ID NO: 23091 - protein, 149 aa, Muscodor strobelii
  misc_feature: SGI Peptide ID NO. 567852
  misc_feature (114)..(147): NCBI GI: 256730496 Blast Desc: NECHADRAFT_98506 [Nectria haematococca mpVI 77-13-4]
  misc_feature (113)..(148): NCBI GI: 116196838 Blast Desc: [Chaetomium globosum CBS 148.51] gi|88180930|gb|EAQ88398.1| [Chaetomium globosum CBS 148.51]
  misc_feature (91)..(148): NCBI GI: 119497507 Blast Desc: NFIA_023260 [Neosartorya fischeri NRRL 181] gi|119413674|gb|EAW23615.1| conserved [Neosartorya fischeri NRRL 181]
  misc_feature (114)..(147): NCBI GI: 46109630 Blast Desc: FG01697.1 [Gibberella zeae PH-1]
  misc_feature (102)..(147): NCBI GI: 121703461 Blast Desc: conserved [Aspergillus clavatus NRRL 1] gi|119398138|gb|EAW08569.1| conserved [Aspergillus clavatus NRRL 1]
  misc_feature (120)..(149): NCBI GI: 156065505 Blast Desc: [Sclerotinia sclerotiorum 1980] gi|154691622|gb|EDN91360.1| [Sclerotinia sclerotiorum 1980]
  misc_feature (120)..(149): NCBI GI: 154320145 Blast Desc: [Botryotinia fuckeliana B05.10] gi|150854792|gb|EDN29984.1| [Botryotinia fuckeliana B05.10]
  misc_feature (116)..(148): NCBI GI: 46136619 Blast Desc: FG09825.1 [Gibberella zeae PH-1]
  misc_feature (120)..(147): NCBI GI: 85108856 Blast Desc: NCU07976 [Neurospora crassa OR74A] gi|28924257|gb|EAA33410.1| [Neurospora crassa OR74A]
  misc_feature (120)..(147): NCBI GI: 171688334 Blast Desc: protein product [Podospora anserina] gi|170944129|emb|CAP70239.1| protein product [Podospora anserina]
  misc_feature: Useful for introducing or modulating the production of volatile compounds
MSSSDQSPGPQPEMQREEEQPQTQQREQSVARSEASVSQSRSRPARQRRRNRRRQDFQPDSEAEQGQQLAPRQQQQAQQYPQQQQQMPPNNQQQMMQQQQFQQQQQMQQQQQDGGKSDTLKLRLDLNLEVEVTLKARIHGDLTLALLDG

SEQ ID NO: 23092 - DNA, 1091 bp, Muscodor strobelii; identical to SEQ ID NO: 23089
  misc_feature: SGI EST ID NO. CUFF.54670.0
  misc_feature: Variant of the nucleotide sequence at SEQ ID NO 23090

SEQ ID NO: 23093 - DNA, 588 bp, Muscodor strobelii
  misc_feature: SGI cDNA ID NO. 567853
  misc_feature: Reduced expression when VOC is produced
  misc_feature: Encodes the peptide sequence at SEQ ID NO 23094
atggctatcctgtcaagaataaaagctaagagaagcaaaagtagcgacagcaactttcaaccggtgcactacttcgcatcatcagagagctctttcaccacaatgtcggtgacctccaatagcacaggagatagtcgcccaacaagccagcatgaccacactgggtttcccgactcattcgccaagcacaccacatcgttacgacatccagacgctatagtcgatccggatttcgccatatgtgccgaggaaattgatccctcaaaattactacacaagtcaagacattcattgctccgcaaacacagacggactatctcatccggtaaaattacacaggagctgccaaaactcgagacacagcaatcttccgccagacgatcgacgacggatagtgccatcgcaatggaggagaagaaacccacgaacgcggagataacaccgccgccatccaggggccgtgccgagagcacaaaatcagcgcgaccaggaacgccagtatccccgggattccagtacacggccgacagtcgacaagaagcacggaaaagcaggattttcgggaaatggaagaccccgaaagactag

SEQ ID NO: 23094 - protein, 195 aa, Muscodor strobelii
  misc_feature: SGI Peptide ID NO. 567853
  misc_feature (35)..(112): NCBI GI: 46136747 Blast Desc: FG09889.1 [Gibberella zeae PH-1]
  misc_feature (54)..(112): NCBI GI: 39961477 Blast Desc: [Magnaporthe grisea 70-15] gi|145011036|gb|EDJ95692.1| [Magnaporthe grisea 70-15]
  misc_feature: Useful for introducing or modulating the production of volatile compounds
MAILSRIKAKRSKSSDSNFQPVHYFASSESSFTTMSVTSNSTGDSRPTSQHDHTGFPDSFAKHTTSLRHPDAIVDPDFAICAEEIDPSKLLHKSRHSLLRKHRRTISSGKITQELPKLETQQSSARRSTTDSAIAMEEKKPTNAEITPPPSRGRAESTKSARPGTPVSPGFQYTADSRQEARKSRIFGKWKTPKD

SEQ ID NO: 23095 - DNA, 3546 bp, Muscodor strobelii
  misc_feature: SGI EST ID NO. CUFF.54475.0
  misc_feature: Variant of the nucleotide sequence at SEQ ID NO 23093
gtttcgagtatattcatacctctatttattctgtctaagtgttgatactatgcaaccacttcaaacaacgtggaggcgaagtagcctttgctctctcacataagacttagtttatcaagggagtatatcgcttctcgataataaggacggattctccctaacgttcgaaatcatgtgtctatgctgccctgggagacatgtgttgggtaataacgaatgggatcttgtgaaaaatacacgaagttgcttaattggatcggctggcccacgtcaacccggcagaaggcctctaatcattgcagaactgccccatatactacgcggcatcactataattttattggcagcagtagatgtgtcattccatatacctcttgcatgtaagacatggcactgactcgctggctttacgtgataggctaagagagttcgtcgtgatgtttacctaggtaggaatggtcagaatcaagagtcgcaggtgatagcaggtgaacggattcgcttcagctatgtctttgctgactatttctcccaccattccggatgtgtttcagagctcctctcgacgcactctcgacgtgacttggagctttctgattcctcatcgacgactatcttgctgggtgattcgcggtttgaaagtgaattatcttggagaaatttgaaatatatgtagttgatcacgacgcttgacgtcccactgctgataggtagtgctagtagaatttgtgcctcaatttgcttgctgtggcctcgctaagattctaagagtgggagaatacagggtagacctattcactgtcagttggaggttctcagtggacgggcagccacctacgttcaatcttgtgccgctattccgagacaatgcaatgcacttaattaatcacaatgcgatagataatcacattttcctcatctagtacttatcatgtgagttgatgattagcttagtctaccttagcttcttctgacactggcggatccgagtttaagtaggtacatatgtatgtatgtaaggaggtaggtatcgctaggtttcgatgctgacaatttgctccttcggtcaagaacacggatgtgcggctcgaaagaatgtaccgctttttgactacagcacaggattgcaggtcgtaagccctacagcacatacctatccttatgcatgcatacagatgactagactgcctgtagattcggcctcgtttactgtcaatttaattctcgctcttcgttttcattatcctcgattttcgacacgcgcaactctcttcttgcagccaagctccgaacgatctgagagccggaggcaacctcttctctacctaggctccggatttacggcacctctaggctccagctttccagcggtcctgcccctaccaagcgcctagcgccactcctgttcgccgccaaacagccctacgctccccatttttgctgcgcttcctgggcgcaagtaatcgtccgactcgggttgaacccagtcaatctatcttggcatcgaaccgcgtaccgaatagctgggccacgacacgtacgtacatctttgctagcgatagcaggcaatcatataagatattcttgtcactgagctgtccgattcggttcgagattctatcgaattcggactcgtcatcacctcctggtctaggactggacttgggcggctatgcttccttgcggcataacctcgctatgcgctcgctctcgcaccccccgcaaagttgccgtttccataggacactcctgtcaaatcatgctgacatgacgagagaaccctggcaaattccggttctatcggccacgatgataagctgatgagccgggtgggatagacgcggtttgattctttaacgacgactgagtttgagtaaacttgccgaattctttctcaacaaattgacatccctgtcgtcttcttttttgaccttcttgttctacctattaaatctagacccacgggaaacattggattaagtgaaaccaagcaattattcgcattgatactttgagctctttgttgtaactttaaaccgctagcacccaacaatatctttgtccaatcgtggtaaaaagtttccactagcgacagcaactttcaaccggtgcactacttcgcatcatcagagagctctttcaccacaatgtcggtgacctccaatagcacaggagatagtcgcccaacaagccagcatgaccacactgggtttcccgactcattcgccaagcacaccacatcgttacgacatccagacgctatagtcgatccggatttcgccatatgtgccgaggaaattgatccctcaaaattactacacaagtcaagacattcattgctccgcaaacacagacggactatctcatccggtaaaattacacaggagctgccaaaactcgagacacagcaatcttccgccagacgatcgacgacggatagtgccatcgcaatggaggagaagaaacccacgaacgcggagataacaccgccgccatccaggggccgtgccgagagcacaaaatcagcgcgaccaggaacgccagtatccccgggattccagtacacggccgacagtcgacaagaagcacggaaaagcaggattttcgggaaatggaagaccccgaaagactagagtgcggcactagataattatgttacgagacacgattggcaaagcatcatccaggcacagtaccggataggtgcgggtgggctttcttgggttctgtttgattttcagcgtggagtttgcaccaaaatcgatcagtgtgtgctgatatgatggatatggataaccgggaatattaaatctcgtttggctttggtcagcctcgaccaatatacttatacgaggtttaatgaacatggctagcgtatcatggatacagaagtcctaaactattttgacatcgctgtctatcaatgtagtgatgtgactttgcatttgttaacgatgcgtgtagttagatcaagaacccggcttgtatagacattgcgttcttccacgtctcgtcatcagctctcgtgaagtgtttcgttccctctacatctcctgcaccgaagttgctgtataagtgcggacagccgggtacatcccagttggtcgcgccgtgccactcgggcttgaagcgtagtttgattacccagagtgaggttgcgtatttgaagaagaggcctgctgttgttgggatctatttttcttgtcagtatctatcgtagcacataaggctatacgtggaattttgctatgccagagatccgtagtactcacctgtgtagcagtgctaaggtgcacgaatccatcttgctgatcaagttccgagagcgggtactcggccgggatcggcgacggaggcgggctcggtacaatcttgtatacgaagtccgggagaggcgttggtggtgccattgtgtgttattcaacagtactctgagttttctagtcacgagattatagctatggtcactttggccgcgtgtcgtaagtttacgattgagataggctggtcgcagaggcgcttacaaatttactgggtctggagcgg

SEQ ID NO: 23096 - DNA, 366 bp, Muscodor strobelii
  misc_feature: SGI cDNA ID NO. 567854
  misc_feature: Encodes the peptide sequence at SEQ ID NO 23097
atggcaccaccaacgcctctcccggacttcgtatacaagattgtaccgagcccgcctccgtcgccgatcccggccgagtacccgctctcggaacttgatcagcaagatggattcgtgcaccttagcactgctacacagatcccaacaacagcaggcctcttcttcaaatacgcaacctcactctgggtaatcaaactacgcttcaagcccgagtggcacggcgcgaccaactgggatgtacccggctgtccgcacttatacagcaacttcggtgcaggagatgtagagggaacgaaacacttcacgagagctgatgacgagacgtggaagaacgcaatgtctatacaagccgggttcttgatctaa

SEQ ID NO: 23097 - protein, 121 aa, Muscodor strobelii
  misc_feature: SGI Peptide ID NO. 567854
  misc_feature (2)..(114): NCBI GI: 39976127 Blast Desc: MGG_06010 [Magnaporthe grisea 70-15] gi|145011715|gb|EDJ96371.1| MGG_06010 [Magnaporthe grisea 70-15]
  misc_feature (4)..(113): NCBI GI: 261352057 Blast Desc: [Verticillium albo-atrum VaMs.102]
  misc_feature (9)..(109): NCBI GI: 85098986 Blast Desc: NCU06653 [Neurospora crassa OR74A] gi|28922215|gb|EAA31462.1| conserved [Neurospora crassa OR74A]
  misc_feature (11)..(120): NCBI GI: 116180186 Blast Desc: CHGG_00721 [Chaetomium globosum CBS 148.51] gi|88185018|gb|EAQ92486.1| CHGG_00721 [Chaetomium globosum CBS 148.51]
  misc_feature (10)..(121): NCBI GI: 212543501 Blast Desc: conserved [Penicillium marneffei ATCC 18224] gi|210066812|gb|EEA20905.1| conserved [Penicillium marneffei ATCC 18224]
  misc_feature (8)..(121): NCBI GI: 238499587 Blast Desc: conserved [Aspergillus flavus NRRL3357] gi|220692781|gb|EED49127.1| conserved [Aspergillus flavus NRRL3357]
  misc_feature (1)..(116): NCBI GI: 189188676 Blast Desc: PTRG_00344 [Pyrenophora tritici-repentis Pt-1C-BFP] gi|187972283|gb|EDU39782.1| PTRG_00344 [Pyrenophora tritici-repentis Pt-1C-BFP]
  misc_feature (3)..(114): NCBI GI: 169861323 Blast Desc: CC1G_00432 [Coprinopsis cinerea okayama7#130] gi|116502018|gb|EAU84913.1| CC1G_00432 [Coprinopsis cinerea okayama7#130]
  misc_feature (7)..(114): NCBI GI: 119498333 Blast Desc: NFIA_035990 [Neosartorya fischeri NRRL 181] gi|119414088|gb|EAW24027.1| conserved [Neosartorya fischeri NRRL 181]
  misc_feature (10)..(121): NCBI GI: 242786849 Blast Desc: conserved [Talaromyces stipitatus ATCC 10500] gi|218721032|gb|EED20451.1| conserved [Talaromyces stipitatus ATCC 10500]
MAPPTPLPDFVYKIVPSPPPSPIPAEYPLSELDQQDGFVHLSTATQIPTTAGLFFKYATSLWVIKLRFKPEWHGATNWDVPGCPHLYSNFGAGDVEGTKHFTRADDETWKNAMSIQAGFLI

SEQ ID NO: 23098 - DNA, 3647 bp, Muscodor strobelii
  misc_feature: SGI EST ID NO. CUFF.54476.1
  misc_feature: Variant of the nucleotide sequence at SEQ ID NO 23096
ccgctccagacccagtaaatttgtaagcgcctctgcgaccagcctatctcaatcgtaaacttacgacacgcggccaaagtgaccatagctataatctcgtgactagaaaactcagagtactgttgaataacacacaatggcaccaccaacgcctctcccggacttcgtatacaagattgtaccgagcccgcctccgtcgccgatcccggccgagtacccgctctcggaacttgatcagcaagatggattcgtgcaccttagcactgctacacagatcccaacaacagcaggcctcttcttcaaatacgcaacctcactctgggtaatcaaactacgcttcaagcccgagtggcacggcgcgaccaactgggatgtacccggctgtccgcacttatacagcaacttcggtgcaggagatgtagagggaacgaaacacttcacgagagctgatgacgagacgtggaagaacgcaatgtctatacaagccgggttcttgatctaactacacgcatcgttaacaaatgcaaagtcacatcactacattgatagacagcgatgtcaaaatagtttaggacttctgtatccatgatacgctagccatgttcattaaacctcgtataagtatattggtcgaggctgaccaaagccaaacgagatttaatattcccggttatccatatccatcatatcagcacacactgatcgattttggtgcaaactccacgctgaaaatcaaacagaacccaagaaagcccacccgcacctatccggtactgtgcctggatgatgctttgccaatcgtgtctcgtaacataattatctagtgccgcactctagtctttcggggtcttccatttcccgaaaatcctgcttttccgtgcttcttgtcgactgtcggccgtgtactggaatcccggggatactggcgttcctggtcgcgctgattttgtgctctcggcacggcccctggatggcggcggtgttatctccgcgttcgtgggtttcttctcctccattgcgatggcactatccgtcgtcgatcgtctggcggaagattgctgtgtctcgagttttggcagctcctgtgtaattttaccggatgagatagtccgtctgtgtttgcggagcaatgaatgtcttgacttgtgtagtaattttgagggatcaatttcctcggcacatatggcgaaatccggatcgactatagcgtctggatgtcgtaacgatgtggtgtgcttggcgaatgagtcgggaaacccagtgtggtcatgctggcttgttgggcgactatctcctgtgctattggaggtcaccgacattgtggtgaaagagctctctgatgatgcgaagtagtgcaccggttgaaagttgctgtcgctacttttgcttctcttagcttttattcttgacaggatagccatgttgtgatgtgggaacgcaaaagcgcggggatgagtgtggcgatagtggatgatgagagtagggcgaaggagatgtaaatggacacgattggtgagaaaggaaacgtgaagattaaggaagagtgccggtgagcgactctgcagccaggcaggtgtagacggactcggagaaagagctcgaatggataaggttgaaggaaggtggtgttagtcggtacctacgtggaaactttttaccacgattggacaaagatattgttgggtgctagcggtttaaagttacaacaaagagctcaaagtatcaatgcgaataattgcttggtttcacttaatccaatgtttcccgtgggtctagatttaataggtagaacaagaaggtcaaaaaagaagacgacagggatgtcaatttgttgagaaagaattcggcaagtttactcaaactcagtcgtcgttaaagaatcaaaccgcgtctatcccacccggctcatcagcttatcatcgtggccgatagaaccggaatttgccagggttctctcgtcatgtcagcatgatttgacaggagtgtcctatggaaacggcaactttgcggggggtgcgagagcgagcgcatagcgaggttatgccgcaaggaagcatagccgcccaagtccagtcctagaccaggaggtgatgacgagtccgaattcgatagaatctcgaaccgaatcggacagctcagtgacaagaatatcttatatgattgcctgctatcgctagcaaagatgtacgtacgtgtcgtggcccagctattcggtacgcggttcgatgccaagatagattgactgggttcaacccgagtcggacgattacttgcgcccaggaagcgcagcaaaaatggggagcgtagggctgtttggcggcgaacaggagtggcgctaggcgcttggtaggggcaggaccgctggaaagctggagcctagaggtgccgtaaatccggagcctaggtagagaagaggttgcctccggctctcagatcgttcggagcttggctgcaagaagagagttgcgcgtgtcgaaaatcgaggataatgaaaacgaagagcgagaattaaattgacagtaaacgaggccgaatctacaggcagtctagtcatctgtatgcatgcataaggataggtatgtgctgtagggcttacgacctgcaatcctgtgctgtagtcaaaaagcggtacattctttcgagccgcacatccgtgttcttgaccgaaggagcaaattgtcagcatcgaaacctagcgatacctacctccttacatacatacatatgtacctacttaaactcggatccgccagtgtcagaagaagctaaggtagactaagctaatcatcaactcacatgataagtactagatgaggaaaatgtgattatctatcgcattgtgattaattaagtgcattgcattgtctcggaatagcggcacaagattgaacgtctaccctgtattctcccactcttagaatcttagcgaggccacagcaagcaaattgaggcacaaattctactagcactacctatcagcagtgggacgtcaagcgtcgtgatcaactacatatatttcaaatttctccaagataattcactttcaaaccgcgaatcacccagcaagatagtcgtcgatgaggaatcagaaagctccaagtcacgtcgagagtgcgtcgagaggagctctgaaacacatccggaatggtgggagaaatagtcagcaaagacatagctgaagcgaatccgttcacctgctatcacctgcgactcttgattctgaccattcctacctaggtaaacatcacgacgaactctcttagcctatcacgtaaagccagcgagtcagtgccatgtcttacatgcaagaggtatatggaatgacacatctactgctgccaataaaattatagtgatgccgcgtagtatatggggcagttctgcaatgattagaggccttctgccgggttgacgtgggccagccgatccaattaagcaacttcgtgtatttttcacaagatcccattcgttattacccaacacatgtctcccagggcagcatagacacatgatttcgaacgttagggagaatccgtccttattatcgagaagcgatatactcccttgataaactaagtcttatgtgagagagcaaaggctacttcgcctccacgttgtttgaagtggttgcatagtatcaacactta

SEQ ID NO: 23099 - DNA, 1185 bp, Muscodor strobelii
  misc_feature: SGI cDNA ID NO. 567855
  misc_feature: Reduced expression when VOC is produced
  misc_feature: Encodes the peptide sequence at SEQ ID NO 23100
atgcctcgcgatcccctcatcggtctcgtcggcaagccatctgctggcaagagcacgactctaaacagtctgaccgatgcaacgtccaaagttgggaactttccatttacaacgatagacccccaacgcgcaataggctacctacaaatcgaatgcgcctgcgcccgcttcaacgtctccgacaaatgccgccccaactacggctcctgcatcgacggccgccgctccgtgcccatcgagctgctcgacgtcgccggactagtgccaggcgcacacgaaggtaaaggactcggcaacaaattcctcgacgacttacggcacgccgacgccctcatccacgtcgtcgacgcatccggacggacaaacgcagaaggcgaaaacacacgaggctacgacccctcgcaagacatagcatggctgcgctccgagatcgtccagtggataaaaggcaacctatgggaaagatggggggtctataaaacggcggcacgtagccgtaaaagccaccgccgtcgaaaccctgcagaaccaattctctgggcatggtccgaacaaacagtcgacagggtagtctcagccttcacagacgagaaattcccgacggtcattgcgttaaacaagatcgatgattccgactcagagaaaaacatgatgaagataacgaagcaacaagaccccaacctcgtcgtgccctgctccgcgaaagcagagctgttccttagaaaaatggctgaacaggggtatatccgctatacagagggcacggaattcgtagatacgcgggaagacctcatagaaatgggggaggccgatggtggggggctcaaagaattagatgagaagaataaggcgacgattgaggagtacaaggacatgatattgtatagatacggctctacgggcgtggtccaggtcttgtcgaaggctgctgagatattgggtctgacgcctgtgttccccgttaggaatacgacgagttttagctcggggagcgatacgaaggtcgcgtttagggactgtgttctggtgaagaagaatatgactgtgggggatgtggcgaggaaggtcatgggtgatgcgcctattgcttatgttgagggcgtaggtggtgttagggtgagcgaggatgcgctggttagtcccgggaagaatgatgttttgtcatttaaagtgggtagagcgtaa

SEQ ID NO: 23100 - protein, 394 aa, Muscodor strobelii
  misc_feature: SGI Peptide ID NO. 567855
  misc_feature (5)..(209): Pfam Id: PF01926 Pfam Desc: GTPase of function
  misc_feature (213)..(316): Pfam Id: PF08438 Pfam Desc: GTPase of function C-terminal
  misc_feature (5)..(118): Pfam Id: PF01926 Pfam Desc: GTPase of function
  misc_feature (1)..(394): NCBI GI: 28950108 Blast Desc: conserved [Neurospora crassa]
  misc_feature (1)..(393): NCBI GI: 39944190 Blast Desc: conserved [Magnaporthe grisea 70-15] gi|145014836|gb|EDJ99404.1| conserved [Magnaporthe grisea 70-15]
  misc_feature (1)..(393): NCBI GI: 116180204 Blast Desc: conserved [Chaetomium globosum CBS 148.51] gi|88185027|gb|EAQ92495.1| conserved [Chaetomium globosum CBS 148.51]
  misc_feature (1)..(393): NCBI GI: 121701273 Blast Desc: GTP-binding protein [Aspergillus clavatus NRRL 1] gi|119397044|gb|EAW07475.1| GTP-binding protein [Aspergillus clavatus NRRL 1]
  misc_feature (1)..(393): NCBI GI: 145240259 Blast Desc: An08g06610 [Aspergillus niger] gi|134077291|emb|CAK45631.1| protein product [Aspergillus niger]
  misc_feature (1)..(393): NCBI GI: 242774548 Blast Desc: GTP-binding protein [Talaromyces stipitatus ATCC 10500] gi|218722081|gb|EED21499.1| GTP-binding protein [Talaromyces stipitatus ATCC 10500]
  misc_feature (1)..(393): NCBI GI: 261189285 Blast Desc: GTP-binding protein [Ajellomyces dermatitidis SLH14081] gi|239591839|gb|EEQ74420.1| GTP-binding protein [Ajellomyces dermatitidis SLH14081]
  misc_feature (1)..(393): NCBI GI: 212532023 Blast Desc: GTP-binding protein [Penicillium marneffei ATCC 18224] gi|210071532|gb|EEA25621.1| GTP-binding protein [Penicillium marneffei ATCC 18224]
  misc_feature (1)..(393): NCBI GI: 119175565 Blast Desc: CIMG_09606 [Coccidioides immitis RS]
  misc_feature (1)..(386): NCBI GI: 238489139 Blast Desc: GTP-binding protein [Aspergillus flavus NRRL3357] gi|220698195|gb|EED54535.1| GTP-binding protein [Aspergillus flavus NRRL3357]
  misc_feature: Useful for introducing or modulating the production of volatile compounds
MPRDPLIGLVGKPSAGKSTTLNSLTDATSKVGNFPFTTIDPQRAIGYLQIECACARFNVSDKCRPNYGSCIDGRRSVPIELLDVAGLVPGAHEGKGLGNKFLDDLRHADALIHVVDASGRTNAEGENTRGYDPSQDIAWLRSEIVQWIKGNLWERWGVYKTAARSRKSHRRRNPAEPILWAWSEQTVDRVVSAFTDEKFPTVIALNKIDDSDSEKNMMKITKQQDPNLVVPCSAKAELFLRKMAEQGYIRYTEGTEFVDTREDLIEMGEADGGGLKELDEKNKATIEEYKDMILYRYGSTGVVQVLSKAAEILGLTPVFPVRNTTSFSSGSDTKVAFRDCVLVKKNMTVGDVARKVMGDAPIAYVEGVGGVRVSEDALVSPGKNDVLSFKVGRA

SEQ ID NO: 23101 - DNA, 2118 bp, Muscodor strobelii
  misc_feature: SGI EST ID NO. CUFF.54496.4
  misc_feature: Variant of the nucleotide sequence at SEQ ID NO 23099
cttacttggtggccagcgacagtgaggagttggctgaagtctttgctctggctcgcatactctttcacactactagcagacaggactagatcattgctgaccgagagcaaaggggttcggatattgtcgttgtcacccgctagctccaggtcttcattggcaatcaaaccgaggcctcggccattgatttccgcaacgctgaccttattgaaagtcacgccatttaaagagctccaggacggcaaaaggtgtaaaggaaaatgccccctttccattttcccaaggcttcggtatttataagtcttggaataattcgagagtcatacgacgtcaaagcgactatgagttggctggaatcatttttggctcggaaagatgccgtgatgatgtaaagcaaccgtccacatggatacctatacagtatctcccaaaaccgggacgctgaagcctgccgagctaataggtaggtaccatttacaatggaccatgcccgctgtgacaggaacatcttggctgtcccagcgctacagtggagctccgggtactgctcagcgcgcgcccaggtgtgacaagcatcatgtcccgcataggaaatttattcgatggaccccaccatcaacatcagattccagacatcccactttgcgcctattgcgataccgcaacacgccgtcgttttgctcagtggccgtgcagacgccgcgatagcgagccacaatgcctcgcgatcccctcatcggtctcgtcggcaagccatctgctggcaagagcacgactctaaacagtctgaccgatgcaacgtccaaagttgggaactttccatttacaacgatagacccccaacgcgcaataggctacctacaaatcgaatgcgcctgcgcccgcttcaacgtctccgacaaatgccgccccaactacggctcctgcatcgacggccgccgctccgtgcccatcgagctgctcgacgtcgccggactagtgccaggcgcacacgaaggtaaaggactcggcaacaaattcctcgacgacttacggcacgccgacgccctcatccacgtcgtcgacgcatccggacggacaaacgcagaaggcgaaaacacacgaggctacgacccctcgcaagacatagcatggctgcgctccgagatcgtccagtggataaaaggcaacctatgggaaagatggggggtctataaaacggcggcacgtagccgtaaaagccaccgccgtcgaaaccctgcagaaccaattctctgggtacggcagcacatccgcagtcgtcgccagaacactagataaactcgcgctgaaagaaccgctcgaggcatggtccgaacaaacagtcgacagggtagtctcagccttcacagacgagaaattcccgacggtcattgcgttaaacaagatcgatgattccgactcagagaaaaacatgatgaagataacgaagcaacaagaccccaacctcgtcgtgccctgctccgcgaaagcagagctgttccttagaaaaatggctgaacaggggtatatccgctatacagagggcacggaattcgtagatacgcgggaagacctcatagaaatgggggaggccgatggtggggggctcaaagaattagatgagaagaataaggcgacgattgaggagtacaaggacatgatattgtatagatacggctctacgggcgtggtccaggtcttgtcgaaggctgctgagatattgggtctgacgcctgtgttccccgttaggaatacgacgagttttagctcggggagcgatacgaaggtcgcgtttagggactgtgttctggtgaagaagaatatgactgtgggggatgtggcgaggaaggtcatgggtgatgcgcctattgcttatgttgagggcgtaggtggtgttagggtgagcgaggatgcgctggttagtcccgggaagaatgatgttttgtcatttaaagtgggtagagcgtaatgacattcatcgaagaatcatgtcttgatgttgaatgcaatctgtgtagttagaatctgatgtgtaacctctggatcgagaatgaggcctgggctgccgttaacttgagtgcagttaagctgtgggtgtgagctttggttgctcttcgg

SEQ ID NO: 23102 - DNA, 1422 bp, Muscodor strobelii
  misc_feature: SGI cDNA ID NO. 567856
  misc_feature: Reduced expression when VOC is produced
  misc_feature: Encodes the peptide sequence at SEQ ID NO 23103
atggaaagggggcattttcctttacaccttttgccgtcctggagctctttaaatggcgtgactttcaataaggtcagcgttgcggaaatcaatggccgaggcctcggtttgattgccaatgaagacctggagctagcgggtgacaacgacaatatccgaacccctttgctctcggtcagcaatgatctagtcctgtctgctagtagtgtgaaagagtatgcgagccagagcaaagacttcagccaactcctcactgtcgctggccaccaatcacacagggttgatgttcttctatttttacttgcccaatatgtgctttcttcaaagaattattccacacgtcctggagttaagggcccttggactcaatactttaacctgttaccccagacagtcccagttccgactttgtggtctgaagcagagcgagatttgctaagaggcacttcgcttgagtcggccgttgccgcaaagctcaacgccttgagaattgaattcgatgcaattcgggaaaagacggaggcactggaaacatggaacgaactgctggatcaaaatggacctatcaacatatatgattggatatacctcgatgcggtatatcggtctcgttcactgggattgccccagtctggggagtccatggtcccctgtcttgacctcgtgaaccattctagcccagctaccgcctacttcgaacaagataccaatgacgaagttattcttgtcctgaagaaggactctaagcttaaaaaaggagatgaagtcaccatagactatggcgccgacaagtcagctggggagatgctgtttagctacggtttcattgaccccaatgccacgactcagagtgtcgtattgccagtcgagtccatggacgatgatccactgtcgaaagcaaaactccatgtctttggaagtccgccaaccctaaagatcaccgttgatgagtctgggattccccagtggagttcaccctttatctatctcatgtgcctgaatcaagaggatggtctaacatttcaaatcttgcaagagactgatggctcacaacatctgcgaatgttttggcaggacagcgatgtaacggatgaagctgaacatatggaaaatcttatcgaaggatatgaactgcagcagattatccgtctgcgtgctatcaccatcgttctagagactgtgcaacacaaattagaaatgctgacaagtcacagtgtagaagaggtgagttcgaggactgtgagggtggagatcttcgaaacagcgtcgcacctacgaggcgtcgagcggactttgtttgaagctattttgcaaatacttgacgacgagaggtcgcgactatttgaagacaagtcagtattggcgtatctcggatcaatggaagctggacaagatgaggagatcgacaaggaccttagttga

SEQ ID NO: 23103 - protein, 473 aa, Muscodor strobelii
  misc_feature: SGI Peptide ID NO. 567856
  misc_feature (9)..(268): Pfam Id: PF00856 Pfam Desc: SET domain
  misc_feature (120)..(268): Pfam Id: PF00856 Pfam Desc: SET domain
  misc_feature (1)..(473): NCBI GI: 85099007 Blast Desc: NCU06658 [Neurospora crassa OR74A] gi|28922220|gb|EAA31467.1| [Neurospora crassa OR74A] gi|28950107|emb|CAD70887.1| conserved [Neurospora crassa]
  misc_feature (1)..(462): NCBI GI: 116180202 Blast Desc: CHGG_00729 [Chaetomium globosum CBS 148.51] gi|88185026|gb|EAQ92494.1| CHGG_00729 [Chaetomium globosum CBS 148.51]
  misc_feature (11)..(464): NCBI GI: 256732088 Blast Desc: NECHADRAFT_106131 [Nectria haematococca mpVI 77-13-4]
  misc_feature (6)..(473): NCBI GI: 171692069 Blast Desc: protein product [Podospora anserina] gi|170945983|emb|CAP72784.1| protein product [Podospora anserina]
  misc_feature (11)..(473): NCBI GI: 261352152 Blast Desc: SET domain-containing protein [Verticillium albo-atrum VaMs.102]
  misc_feature (6)..(446): NCBI GI: 46136815 Blast Desc: FG09923.1 [Gibberella zeae PH-1]
  misc_feature (1)..(469): NCBI GI: 145607245 Blast Desc: MGG_04107 [Magnaporthe grisea 70-15] gi|145014837|gb|EDJ99405.1| MGG_04107 [Magnaporthe grisea 70-15]
  misc_feature (1)..(473): NCBI GI: 119495234 Blast Desc: SET domain protein [Neosartorya fischeri NRRL 181] gi|119412568|gb|EAW22509.1| SET domain protein [Neosartorya fischeri NRRL 181]
  misc_feature (1)..(467): NCBI GI: 238489143 Blast Desc: SET domain protein [Aspergillus flavus NRRL3357] gi|220698197|gb|EED54537.1| SET domain protein [Aspergillus flavus NRRL3357]
  misc_feature (1)..(473): NCBI GI: 121701277 Blast Desc: SET domain protein [Aspergillus clavatus NRRL 1] gi|119397046|gb|EAW07477.1| SET domain protein [Aspergillus clavatus NRRL 1]
  misc_feature (14)..(355): SWISSPROT Homolog: EC 2.1.1.127 [Ribulose-bisphosphate carboxylase]-lysine N-methyltransferase
  misc_feature: Useful for introducing or modulating the production of volatile compounds
MERGHFPLHLLPSWSSLNGVTFNKVSVAEINGRGLGLIANEDLELAGDNDNIRTPLLSVSNDLVLSASSVKEYASQSKDFSQLLTVAGHQSHRVDVLLFLLAQYVLSSKNYSTRPGVKGPWTQYFNLLPQTVPVPTLWSEAERDLLRGTSLESAVAAKLNALRIEFDAIREKTEALETWNELLDQNGPINIYDWIYLDAVYRSRSLGLPQSGESMVPCLDLVNHSSPATAYFEQDTNDEVILVLKKDSKLKKGDEVTIDYGADKSAGEMLFSYGFIDPNATTQSVVLPVESMDDDPLSKAKLHVFGSPPTLKITVDESGIPQWSSPFIYLMCLNQEDGLTFQILQETDGSQHLRMFWQDSDVTDEAEHMENLIEGYELQQIIRLRAITIVLETVQHKLEMLTSHSVEEVSSRTVRVEIFETASHLRGVERTLFEAILQILDDERSRLFEDKSVLAYLGSMEAGQDEEIDKDLS

SEQ ID NO: 23104 - DNA, 4178 bp, Muscodor strobelii
  misc_feature: SGI EST ID NO. CUFF.54495.1
  misc_feature: Variant of the nucleotide sequence at SEQ ID NO 23102
ccgaagagcaaccaaagctcacacccacagcttaactgcactcaagttaacggcagcccaggcctcattctcgatccagaggttacacatcagattctaactacacagattgcattcaacatcaagacatgattcttcgatgaatgtcattacgctctacccactttaaatgacaaaacatcattcttcccgggactaaccagcgcatcctcgctcaccctaacaccacctacgccctcaacataagcaataggcgcatcacccatgaccttcctcgccacatcccccacagtcatattcttcttcaccagaacacagtccctaaacgcgaccttcgtatcgctccccgagctaaaactcgtcgtattcctaacggggaacacaggcgtcagacccaatatctcagcagccttcgacaagacctggaccacgcccgtagagccgtatctatacaatatcatgtccttgtactcctcaatcgtcgccttattcttctcatctaattctttgagccccccaccatcggcctcccccatttctatgaggtcttcccgcgtatctacgaattccgtgccctctgtatagcggatatacccctgttcagccatttttctaaggaacagctctgctttcgcggagcagggcacgacgaggttggggtcttgttgcttcgttatcttcatcatgtttttctctgagtcggaatcatcgatcttgtttaacgcaatgaccgtcgggaatttctcgtctgtgaaggctgagactaccctgtcgactgtttgttcggaccatgcctcgagcggttctttcagcgcgagtttatctagtgttctggcgacgactgcggatgtgctgccgtacccagagaattggttctgcagggtttcgacggcggtggcttttacggctacgtgccgccgttttatagaccccccatctttcccataggttgccttttatccactggacgatctcggagcgcagccatgctatgtcttgcgaggggtcgtagcctcgtgtgttttcgccttctgcgtttgtccgtccggatgcgtcgacgacgtggatgagggcgtcggcgtgccgtaagtcgtcgaggaatttgttgccgagtcctttaccttcgtgtgcgcctggcactagtccggcgacgtcgagcagctcgatgggcacggagcggcggccgtcgatgcaggagccgtagttggggcggcatttgtcggagacgttgaagcgggcgcaggcgcattcgatttgtaggtagcctattgcgcgttgggggtctatcgttgtaaatctggaaagcttggtcagtatgctaaggggctcagcaagtaagtatgtttcgtacggaaagttccctgtcgttgacgtatcggatcagcgatgtttgtcgcagcggctgagttggtggggacatcttcacacaccaactttggacgttgcatcggtcagactgtttagagtcgtgctcttgccagcagatggcttgccgacgagaccgatgaggggatcgcgaggcattgtggctcgctatcgcggcgtctgcacggccactgagcaaaacgacggcgtgttgcggtatcgcaataggcgcaaagtgggatgtctggaatctgatgttgatggtggggtccatcgaataaatttcctatgcgggacatgatgcttgtcacacctgggcgcgcgctgagcagtacccggagctccactgtagcgctgggacagccaagatgttcctgtcacagcgggcatggtccattgtaaatggtacctacctattagctcggcaggcttcagcgtcccggttttgggagatactgtataggtatccatgtggacggttgctttacatcatcacggcatctttccgagccaaaaatgattccagccaactcatagtcgctttgacgtcgtatgactctcgaattattccaagacttataaataccgaagccttgggaaaatggaaagggggcattttcctttacaccttttgccgtcctggagctctttaaatggcgtgactttcaataaggtcagcgttgcggaaatcaatggccgaggcctcggtttgattgccaatgaagacctggagctagcgggtgacaacgacaatatccgaacccctttgctctcggtcagcaatgatctagtcctgtctgctagtagtgtgaaagagtatgcgagccagagcaaagacttcagccaactcctcactgtcgctggccaccaatcacacagggttgatgttcttctatttttacttgcccaatatgtgctttcttcaaagaattattccacacgtcctggagttaagggcccttggactcaatactttaacctgttaccccagacagtcccagttccgactttgtggtctgaagcagagcgagatttgctaagaggcacttcgcttgagtcggccgttgccgcaaagctcaacgccttgagaattgaattcgatgcaattcgggaaaagacggaggcactggaaacatggaacgaactgctggatcaaaatggacctatcaacatatatgattggatatacctcgatgcggtatatcggtctcgttcactgggattgccccagtctggggagtccatggtcccctgtcttgacctcgtgaaccattctagcccagctaccgcctacttcgaacaagataccaatgacgaagttattcttgtcctgaagaaggactctaagcttaaaaaaggagatgaagtcaccatagactatggcgccgacaagtcagctggggagatgctgtttagctacggtttcattgaccccaatgccacgactcagagtgtcgtattgccagtcgagtccatggacgatgatccactgtcgaaagcaaaactccatgtctttggaagtccgccaaccctaaagatcaccgttgatgagtctgggattccccagtggagttcaccctttatctatctcatgtgcctgaatcaagaggatggtctaacatttcaaatcttgcaagagactgatggctcacaacatctgcgaatgttttggcaggacagcgatgtaacggatgaagctgaacatatggaaaatcttatcgaaggatatgaactgcagcagattatccgtctgcgtgctatcaccatcgttctagagactgtgcaacacaaattagaaatgctgacaagtcacagtgtagaagaggtgagttcgaggactgtgagggtggagatcttcgaaacagcgtcgcacctacgaggcgtcgagcggactttgtttgaagctattttgcaaatacttgacgacgagaggtcgcgactatttgaagacaagtcagtattggcgtatctcggatcaatggaagctggacaagatgaggagatcgacaaggaccttagttgagcaaggttgtacggtgactcgtgtcgcggtcactacgccacaatcttacattaggaaaacagcaaaaggtcaattgatgggcaattttaatgtcaattgaagactgcagtgcggaaaatcaaatcattcgcgttttcaatctaaatatcagaaaatccgagtggtattgaggtgtgcagttgggtctgtcagccctcgtcagcacaccgcagttggagacaagagacaaatgatgtgccgacgcgcggaatacaaacaatcatcaccagtgatccccagatctctcatccgggccgacaaccctggtacagataatccaatctcaattctttgatagcgggccatcacgaagcttaattctcgcccactgcaaggcttcggtttccactgccctgtctggtatttacccggtgatattaaccggagccctgcggcgccagctgactgcccaactttatgattctctatttattacgagtattacgaggaccttgtatatgatatataattgcctttgacacacgccagactcggagcgacccgatcctgtcacttggatgaaagaccttgtcagccacgttgcgaattaagaagtgataccaacttcggtgtctcggtcaacagaccatacaaacgaagccctttatagcacccgaagatcagaataaacgagcttattcttcagacatattgtccgaccctgcctatttagttgcatagatatatgctagaagatctactgctgatcaaagtcgtacacatagctttgcgaaacacgtctacgtattcg

SEQ ID NO: 23105 - DNA, 2718 bp, Muscodor strobelii
  misc_feature: SGI cDNA ID NO. 567857
  misc_feature: Encodes the peptide sequence at SEQ ID NO 23106
atgccgggaatattaccgatgaaggtgatcaaggtgggcacgagctcacagagtaggattgcccaggcttgcgaccgctgccggtcgaagaagatacgttgcgatgggatcaggccgacatgcacgcaatgcgcgaacgtgggtttcgaatgcaagaccagcgataagcttagcagacgcgcgtttcctcgcggttatacggagtcgttggaggagcgagttaggcaattggaatcggaagtcagagatctgaaggacctgctagatgagaaggatgagaagattgatatgctctcgaggatgcacagtcataatcagaatcaccgtcggccatcggtcgggtcgggtgtgagcccgaagtcgccgaccgatgtcagaagagatgccagcccggtggcgaggcaagatgtgttccgtgtccaggcgacacctcttctgctcggcgttgagaactcagactcgtacttcatgggcccatcaagcggacgtgccttcatcgaaaccttcaaacgcaagattcaagaagcaggcaagccatgcggagacttcaatcccgaggcgtttctacacattcaaggatgctatcccttggtcaccaaacaaccttcacaatcacttagagtgccaccgcggatgttctctgatagatgtgtgaacatctacttccaagaatgggcacccctcttccccgtccttcacaggcccactttcttagaaatctataatgagttctccgcagactccgataaggtcaagaataactacaagattgcacagctttatctagtgttcagtattgccgctttatcaagccgacaccctgattatgaacaaattgctgcttgcgagatacaatggcagaaggcacttgacagcatcacgatggacaacactatgcacactttgcaatgtctagtgctggctatcatgtattgtaccataagagcggactataagcgtctgcaacactacaaagctgttgctgtggggttatctcttcgccttggcttgcatcagagccagaaacgtttcaccttcggagcattaactattgagacgcgcaagaaggtcttctggacactttactctctcgactgcttctcggctgccatgcttggccttcctaaactgttgaacgaggatgacatccacgcagaatacccatcagataccgatgatgaatacgttaccgaaaagggcttcaagcccactcttcctggagagtataccagaatatcaagtgctttagcattattcaggttgtcacggatcttggcccgggtcttagagaagaactaccctgctgccacaactcatgaactctccttacaacagatttccatattggatgcggaactgcaagagtggagtaacagccttccgactcacttgaaactcaattttgcccaagacaaaccatcaacagatatcactggcagcaggtctccgatattagctctcgcatactaccacattaggactctcatccatcggccagctattggctcatctctcggtgccaaggactcaccagctctacttgcaactgcagactcaagcaaacacatcatacagatcatcgaactacttgaagagagaaacatgtccttctccttctgcctcaacaagacgaacgttctcgtcctctgcgcaatgtctcttctctatcagagtctagggctcaagaccgacagcaaactcatgaaagataccgaacgacttgtcaacgtcgttctcaaattcctgcaaagctctagagctgcaggcttaccggaactaaaacgtgttgctaaaacgctggttttggtggatgaaccatcagcgccaaagcagacacaaaggagccccggcaccatgggcgcaccattaccgagaacatcaccgactctcagcagctttagaaagaactcaccctacggcatgagccggtcaagtcctgcaacaatgagcgagaccgatctgctatctcaacaagagaaactccgtcgcatgacaatgccgagttccactgcaagaccagaggtctaccgcaccccgtcgcgcgcatcattcgaccatcaccacgtcgagcaaccgccctctcgacgtgaccatagattttcaatctcccaaatccaacaaacgatgatgcgaatgacgcaaggcaacagtaataagaacaaaccgagtctagactacctctccttccccgaacaacccatccctgcctcaacctccccattacataaccacaataccatcccctccccatcccaacgacaccattccctctcttcctcccaacatacccaatcccacattcccaacacaaattccaaatcaacaatggacgaagtatccctcagcgaatgggaagctatcctaggcgccatggacggaaacggcgtgggcaatctgcacgacgcgatctacggcgggcctgcgctatctctcgagacacccacaactaccacgaccgctctatccaattacggagattggagcccggactcgtgggatttgtcaattctgaatattggggaattgggaaatcagggagccggcccacagagtgtactgagtttgagtgatgagagtttgagtagtgccgacgagaggacgagtggggatttctttttgagtatgggggaagagtttgcgcttggtgtgaataatggggggagggggaatgggaatggagagtttttgggggatgttgatttggggattgggttgtga

SEQ ID NO: 23106 - protein, 905 aa, Muscodor strobelii
  misc_feature: SGI Peptide ID NO. 567857
  misc_feature (22)..(60): Pfam Id: PF00172 Pfam Desc: Fungal Zn(2)-Cys(6) binuclear cluster domain
  misc_feature (298)..(394): Pfam Id: PF04082 Pfam Desc: Fungal specific transcription factor domain
  misc_feature (1)..(875): NCBI GI: 46136811 Blast Desc: FG09921.1 [Gibberella zeae PH-1]
  misc_feature (1)..(848): NCBI GI: 116180200 Blast Desc: CHGG_00728 [Chaetomium globosum CBS 148.51] gi|88185025|gb|EAQ92493.1| CHGG_00728 [Chaetomium globosum CBS 148.51]
  misc_feature (1)..(847): NCBI GI: 261352150 Blast Desc: transcriptional activator protein acu-15 [Verticillium albo-atrum VaMs.102]
  misc_feature (1)..(905): NCBI GI: 50403759 Blast Desc: ACU15_NEUCR RecName: Full=Transcriptional activator protein acu-15 gi|18307443|emb|CAD21506.1| transcription activator protein acu-15 [Neurospora crassa]
  misc_feature (1)..(734): NCBI GI: 164424759 Blast Desc: NCU06656 [Neurospora crassa OR74A] gi|157070648|gb|EAA31465.2| conserved [Neurospora crassa OR74A]
  misc_feature (1)..(842): NCBI GI: 1922895 Blast Desc: transcriptional activator protein [Neurospora crassa]
  misc_feature (1)..(874): NCBI GI: 156044472 Blast Desc: SS1G_10339 [Sclerotinia sclerotiorum 1980] gi|154694728|gb|EDN94466.1| SS1G_10339 [Sclerotinia sclerotiorum 1980]
  misc_feature (1)..(512): NCBI GI: 171692071 Blast Desc: protein product [Podospora anserina] gi|170945984|emb|CAP72785.1| protein product [Podospora anserina]
  misc_feature (1)..(905): NCBI GI: 169615230 Blast Desc: SNOG_10771 [Phaeosphaeria nodorum SN15] gi|160702914|gb|EAT82165.2| SNOG_10771 [Phaeosphaeria nodorum SN15]
  misc_feature (1)..(892): NCBI GI: 189207851 Blast Desc: C6 transcription factor FacB [Pyrenophora tritici-repentis Pt-1C-BFP] gi|187976352|gb|EDU42978.1| C6 transcription factor FacB [Pyrenophora tritici-repentis
MPGILPMKVIKVGTSSQSRIAQACDRCRSKKIRCDGIRPTCTQCANVGFECKTSDKLSRRAFPRGYTESLEERVRQLESEVRDLKDLLDEKDEKIDMLSRMHSHNQNHRRPSVGSGVSPKSPTDVRRDASPVARQDVFRVQATPLLLGVENSDSYFMGPSSGRAFIETFKRKIQEAGKPCGDFNPEAFLHIQGCYPLVTKQPSQSLRVPPRMFSDRCVNIYFQEWAPLFPVLHRPTFLEIYNEFSADSDKVKNNYKIAQLYLVFSIAALSSRHPDYEQIAACEIQWQKALDSITMDNTMHTLQCLVLAIMYCTIRADYKRLQHYKAVAVGLSLRLGLHQSQKRFTFGALTIETRKKVFWTLYSLDCFSAAMLGLPKLLNEDDIHAEYPSDTDDEYVTEKGFKPTLPGEYTRISSALALFRLSRILARVLEKNYPAATTHELSLQQISILDAELQEWSNSLPTHLKLNFAQDKPSTDITGSRSPILALAYYHIRTLIHRPAIGSSLGAKDSPALLATADSSKHIIQIIELLEERNMSFSFCLNKTNVLVLCAMSLLYQSLGLKTDSKLMKDTERLVNVVLKFLQSSRAAGLPELKRVAKTLVLVDEPSAPKQTQRSPGTMGAPLPRTSPTLSSFRKNSPYGMSRSSPATMSETDLLSQQEKLRRMTMPSSTARPEVYRTPSRASFDHHHVEQPPSRRDHRFSISQIQQTMMRMTQGNSNKNKPSLDYLSFPEQPIPASTSPLHNHNTIPSPSQRHHSLSSSQHTQSHIPNTNSKSTMDEVSLSEWEAILGAMDGNGVGNLHDAIYGGPALSLETPTTTTTALSNYGDWSPDSWDLSILNIGELGNQGAGPQSVLSLSDESLSSADERTSGDFFLSMGEEFALGVNNGGRGNGNGEFLGDVDLGIGL

SEQ ID NO: 23107 - DNA, 3547 bp, Muscodor strobelii
  misc_feature: SGI EST ID NO. CUFF.54393.0
  misc_feature: Variant of the nucleotide sequence at SEQ ID NO 23105
ggcacacaccaacgggcgcagctggttccgtttttttctctttcccaccatctccgatcgaggtggctatctttccaatccactcgctgactccttcgaacttccccgactattcccctgtcccccattcgaaacaccacgcgctcatgtgcgttttcgttcatttcgtcgaaatattcaacgttcaaccggagaggccgaatctgtacaacttcaaaatcgaaatcgacacgtaagccaacatctccgttgcgcctcgtgtaccgtaccacgaaaccgttaccgtgctgttggatcgagagttggaacccgaaccgaagacgggcacgcacatggaccgagagggcttgtgaagaaatctacgcattccgcgactactacaacgaacgtgcgcgcatttccaagcaacaaaacgcctgcatctgcggggttcagacatcgccaagatgccgggaatattaccgatgaaggtgatcaaggtgggcacgagctcacagagtaggattgcccaggcttgcgaccgctgccggtcgaagaagatacgttgcgatgggatcaggccgacatgcacgcaatgcgcgaacgtgggtttcgaatgcaagaccagcgataagcttagcagacgcgcgtttcctcgcggttatacggagtcgttggaggagcgagttaggcaattggaatcggaagtcagagatctgaaggacctgctagatgagaaggatgagaagattgatatgctctcgaggatgcacagtcataatcagaatcaccgtcggccatcggtcgggtcgggtgtgagcccgaagtcgccgaccgatgtcagaagagatgccagcccggtggcgaggcaagatgtgttccgtgtccaggcgacacctcttctgctcggcgttgagaactcagactcgtacttcatgggcccatcaagcggacgtgccttcatcgaaaccttcaaacgcaagattcaagaagcaggcaagccatgcggagacttcaatcccgaggcgtttctacacattcaaggatgctatcccttggtcaccaaacaaccttcacaatcacttagagtgccaccgcggatgttctctgatagatgtgtgaacatctacttccaagaatgggcacccctcttccccgtccttcacaggcccactttcttagaaatctataatgagttctccgcagactccgataaggtcaagaataactacaagattgcacagctttatctagtgttcagtattgccgctttatcaagccgacaccctgattatgaacaaattgctgcttgcgagatacaatggcagaaggcacttgacagcatcacgatggacaacactatgcacactttgcaatgtctagtgctggctatcatgtattgtaccataagagcggactataagcgtctgcaacactacaaagctgttgctgtggggttatctcttcgccttggcttgcatcagagccagaaacgtttcaccttcggagcattaactattgagacgcgcaagaaggtcttctggacactttactctctcgactgcttctcggctgccatgcttggccttcctaaactgttgaacgaggatgacatccacgcagaatacccatcagataccgatgatgaatacgttaccgaaaagggcttcaagcccactcttcctggagagtataccagaatatcaagtgctttagcattattcaggttgtcacggatcttggcccgggtcttagagaagaactaccctgctgccacaactcatgaactctccttacaacagatttccatattggatgcggaactgcaagagtggagtaacagccttccgactcacttgaaactcaattttgcccaagacaaaccatcaacagatatcactggcagcaggtctccgatattagctctcgcatactaccacattaggactctcatccatcggccagctattggctcatctctcggtgccaaggactcaccagctctacttgcaactgcagactcaagcaaacacatcatacagatcatcgaactacttgaagagagaaacatgtccttctccttctgcctcaacaagacgaacgttctcgtcctctgcgcaatgtctcttctctatcagagtctagggctcaagaccgacagcaaactcatgaaagataccgaacgacttgtcaacgtcgttctcaaattcctgcaaagctctagagctgcaggcttaccggaactaaaacgtgttgctaaaacgctggttttggtggatgaaccatcagcgccaaagcagacacaaaggagccccggcaccatgggcgcaccattaccgagaacatcaccgactctcagcagctttagaaagaactcaccctacggcatgagccggtcaagtcctgcaacaatgagcgagaccgatctgctatctcaacaagagaaactccgtcgcatgacaatgccgagttccactgcaagaccagaggtctaccgcaccccgtcgcgcgcatcattcgaccatcaccacgtcgagcaaccgccctctcgacgtgaccatagattttcaatctcccaaatccaacaaacgatgatgcgaatgacgcaaggcaacagtaataagaacaaaccgagtctagactacctctccttccccgaacaacccatccctgcctcaacctccccattacataaccacaataccatcccctccccatcccaacgacaccattccctctcttcctcccaacatacccaatcccacattcccaacacaaattccaaatcaacaatggacgaagtatccctcagcgaatgggaagctatcctaggcgccatggacggaaacggcgtgggcaatctgcacgacgcgatctacggcgggcctgcgctatctctcgagacacccacaactaccacgaccgctctatccaattacggagattggagcccggactcgtgggatttgtcaattctgaatattggggaattgggaaatcagggagccggcccacagagtgtactgagtttgagtgatgagagtttgagtagtgccgacgagaggacgagtggggatttctttttgagtatgggggaagagtttgcgcttggtgtgaataatggggggagggggaatgggaatggagagtttttgggggatgttgatttggggattgggttgtgaaaaggtatcccactactggattacgttcttgagaagcggttgaaagttaaattcgcactgcgcttgtgagcattgcaggtgtgatttatattgggaaatcgagcgacggtaacgattgactgcggccgtggctttttggtctgatatccctgtgtttttttggacttctgaatatcagcggcaggaggaattcggctgatagtgttgcgtatatggtggctttcacgggcttttggaatttattggtttattggattttgtttgtgttggaactgtgttgaagtcgggatgtaaagtaggcggattcaagaattgaaggctacctaggaaagcaaagcatgtcacaacttacgagtaacaaaattcaaaaagtttatttgaga

SEQ ID NO: 23108 - DNA, 1089 bp, Muscodor strobelii
  misc_feature: SGI cDNA ID NO. 567858
  misc_feature: Encodes the peptide sequence at SEQ ID NO 23109
atggtctcaacaacagctcctccgccgaaaagatggagtgagatcaccaaagtcagcgagatgagtgaacggagtccactgctgagcgccgacattgaaacacccgaaccacaaatcgttcctgtaagaaggagctcaccagtgatttctgagcggaaaggcacgccccaagcgattgctcaccgcggcttcaatgcttcagttccagaaaatacaatgatggctttcaaagccgccgtcgaagtcggtgtagatgctctagaaacagatcttcacttgtctcgcgacggtgttgtcgtactatgtcacgacggttcacttaagcgaacttttggtagagatgccaaagtaaaagatctagactgggcggagttgagccagctgcggactgtgcgggagcctcatctgcctatgccccgactttccgacctcttagcatatttgaatgagcctgggctcgaagatatttggcttatgctcgatatcaaacgagacgacgatccggaagaaatgatgcggaatattgcactcacaatggattcgactcctggaagacgaccctggagtgagagagtcacaccctgctgctgggatgcgaactatatcagtttaagcatgaaatacttacccgcattccgcattacgtttcttggtttctccatcaagtacgcgcgccaattgacgaacattcccaatatctcgttcagtatcgtgaaatgggcgctcgcctcacctgcaggagcatgcttcatacgcgatatgaagaagctaggtcttccagtctacgtatggacattgaatgacgaatactggatggaatgggctattcgaaagcagctcgctggtgtgattacggatcaagtcgccaaatacaatgacgtatgcgatcgagttgacgataaggaagagaacgaacgacctcggatacggaatgaaaaacgacgttcgatttcttcgagtgtatcccttcggcttcggtttttggccgagatgatcttggttcacactctcatgacggttttcatgacgataaatcagcttaagcatggttctttcaaaagtcagattagaaaagcgcttgggaattag

SEQ ID NO: 23109 - protein, 362 aa, Muscodor strobelii
  misc_feature: SGI Peptide ID NO. 567858
  misc_feature (61)..(290): Pfam Id: PF03009 Pfam Desc: Glycerophosphoryl diester phosphodiesterase family
  misc_feature (9)..(294): NCBI GI: 169615152 Blast Desc: SNOG_10730 [Phaeosphaeria nodorum SN15] gi|111061004|gb|EAT82124.1| SNOG_10730 [Phaeosphaeria nodorum SN15]
  misc_feature (21)..(303): NCBI GI: 242821812 Blast Desc: glycerophosphoryl diester phosphodiesterase, [Talaromyces stipitatus ATCC 10500] gi|218712678|gb|EED12103.1| glycerophosphoryl diester phosphodiesterase, [Talaromyces ATCC
  misc_feature (56)..(298): NCBI GI: 116180198 Blast Desc: CHGG_00727 [Chaetomium globosum CBS 148.51] gi|88185024|gb|EAQ92492.1| CHGG_00727 [Chaetomium globosum CBS 148.51]
  misc_feature (73)..(286): NCBI GI: 18307441 Blast Desc: conserved [Neurospora crassa]
  misc_feature (35)..(352): NCBI GI: 240273412 Blast Desc: glycerophosphoryl diester phosphodiesterase [Ajellomyces capsulatus H143]
  misc_feature (35)..(300): NCBI GI: 225558170 Blast Desc: glycerophosphoryl diester phosphodiesterase [Ajellomyces capsulatus G186AR]
  misc_feature (56)..(295): NCBI GI: 154280829 Blast Desc: [Ajellomyces capsulatus NAm1] gi|150411406|gb|EDN06794.1| [Ajellomyces capsulatus NAm1]
  misc_feature (73)..(314): NCBI GI: 119191626 Blast Desc: CIMG_00190 [Coccidioides immitis RS] gi|240106403|gb|EER24596.1| glycerophosphoryl diester phosphodiesterase, [Coccidioides posadasii C735 delta SOWgp]
  misc_feature (53)..(360): NCBI GI: 261192645 Blast Desc: glycerophosphoryl diester phosphodiesterase [Ajellomyces dermatitidis SLH14081] gi|239589211|gb|EEQ71854.1| glycerophosphoryl diester phosphodiesterase [Ajellomyces diester
  misc_feature (23)..(352): NCBI GI: 256732086 Blast Desc: NECHADRAFT_41798 [Nectria haematococca mpVI 77-13-4]
  misc_feature (57)..(296): SWISSPROT Homolog: EC 3.1.4.46 Glycerophosphodiester phosphodiesterase
MVSTTAPPPKRWSEITKVSEMSERSPLLSADIETPEPQIVPVRRSSPVISERKGTPQAIAHRGFNASVPENTMMAFKAAVEVGVDALETDLHLSRDGVVVLCHDGSLKRTFGRDAKVKDLDWAELSQLRTVREPHLPMPRLSDLLAYLNEPGLEDIWLMLDIKRDDDPEEMMRNIALTMDSTPGRRPWSERVTPCCWDANYISLSMKYLPAFRITFLGFSIKYARQLTNIPNISFSIVKWALASPAGACFIRDMKKLGLPVYVWTLNDEYWMEWAIRKQLAGVITDQVAKYNDVCDRVDDKEENERPRIRNEKRRSISSSVSLRLRFLAEMILVHTLMTVFMTINQLKHGSFKSQIRKALGN

SEQ ID NO: 23110 - DNA, 3475 bp, Muscodor strobelii
  misc_feature: SGI EST ID NO. CUFF.54402.1
  misc_feature: Variant of the nucleotide sequence at SEQ ID NO 23108
gagacaatgacgtggtttgaagtagttcatgcaagccaaagagatgtgatatgtcatgttatacttgaacaatggctgcaggatctgcctcggcttgtattgaactcgactatgttatctttggtgtttctgcaataggtctcaatgttcggatgcatgtggcaagaccggctagacgactagcttataagagttatgagggtttcaatgatgcaacatcaaaagatattggactgctggagatacctctaaatcgcatataacactcctctgtttggattcgccttaccacttgcccgccgagccagcaatctaatcccccacgctcctctctccacacatcggaatgctctattgcgtcaggcatcacctcactcaccacgatgtacaacaacacctctcaaacccccatctcgaaaaccttcaaataagcaaagtgacgtgatcccacccaccgagtttttcacaacactcacttcttccattccacgtgtctcccactcttggttctcactcaccgtcttcgccgatcggcccacaatacaatggatacatacaggctttctaggcacctgttcggatgaattctacggggaccctatttgtccgctgcatccggacggtaacacgcaaaaacctttgtcacggcatgcctcacacgcattatatcgagatctagtgaatcttaagaatgacttttcgctttttatagatttacatacttgaattagatcagatttcgttttccttggcttcgaaacagtcagccttcttccactttgagatctttcgccaattttagacgtagggcggaactagcggggaccccttggactatccgaacacccttgctggagactttcacctcgcaacttttgacccggcagcattcttcctctttaggattgaagcatatgcacattgagggtcaccttactaagacccgctcagtctgctttctgttgttcaagtgaccttaataaatgtccgtgatttttcgcgacttgatttgatacataactgagtttgagacgctcacattactcgaacagagacccaactacccagccttaaaactacgacctgggcggtcacggacacgggatatcaacgacccccgctatctccgggtgctacccgcctcagaggactaaacacagcggaagagagtagatgacatcagctatttcttaccggttgaatatctgagaatcgaacaactcgcttaattttgctgtttgcatacttcgtgactagctacagcattttcggaagcgcgtaaacgacttggctgctcggcagaactggaagcacagagatcatcgacgaggcgtcattttcactacgatctagatcttttcgcctattggcaatcctgcagtcaacttcgtcttcaatcaaccagcttcctcggactacaagtatacgaaaatcgggagccacggcgtcgttgcgcgtatccatgcgatctagaatcgcgatggcatcatcggggaagaaacaatctcgggctgtctccgttagtgagcacatggtctcaacaacagctcctccgccgaaaagatggagtgagatcaccaaagtcagcgagatgagtgaacggagtccactgctgagcgccgacattgaaacacccgaaccacaaatcgttcctgtaagaaggagctcaccagtgatttctgagcggaaaggcacgccccaagcgattgctcaccgcggcttcaatgcttcagttccagaaaatacaatgatggctttcaaagccgccgtcgaagtcggtgtagatgctctagaaacagatcttcacttgtctcgcgacggtgttgtcgtactatgtcacgacggttcacttaagcgaacttttggtagagatgccaaagtaaaagatctagactgggcggagttgagccagctgcggactgtgcgggagcctcatctgcctatgccccgactttccgacctcttagcatatttgaatgagcctgggctcgaagatatttggcttatgctcgatatcaaacgagacgacgatccggaagaaatgatgcggaatattgcactcacaatggattcgactcctggaagacgaccctggagtgagagagtcacaccctgctgctgggatgcgaactatatcagtttaagcatgaaatacttacccgcattccgcattacgtttcttggtttctccatcaagtacgcgcgccaattgacgaacattcccaatatctcgttcagtatcgtgaaatgggcgctcgcctcacctgcaggagcatgcttcatacgcgatatgaagaagctaggtcttccagtctacgtatggacattgaatgacgaatactggatggaatgggctattcgaaagcagctcgctggtgtgattacggatcaagtcgccaaatacaatgacgtatgcgatcgagttgacgataaggaagagaacgaacgacctcggatacggaatgaaaaacgacgttcgatttcttcgagtgtatcccttcggcttcggtttttggccgagatgatcttggttcacactctcatgacggttttcatgacgataaatcagcttaagcatggttctttcaaaagtcagattagaaaagcgcttgggaattagagttcttatgccttgataggcattgatgaagttatttagaagatgtggttatacttgagaagccacgtacgcctcaatcttttaacagccatcatagagcacaaagctggcatgcgtgcaaatatcagagcatgaaatcctgatcttccaacagaagcaggatctaatcaacaatggccatacaagtatctgaatgagataccgggttaggcgagaatagatcagagcatggtgattggcaacgtctcgaagatgcatctctcccagtttggagtttcactctccgcggtgttaagagcagatttcaaatatggataagctaatactgtgcgcgacaacacacgaaggagacgccagtggccctactgcgagcagggtatcggtactattggaacgaggtcataaaagcatgaagcttcaacatcagcttaatcaaaactctgcaagatctctaagagacacatgtcttatactcgaacttacgatcgggtctacatagggacatgcgtatagacgacgtagatgcgtcgggacaagcacaacttgcaatatagcacacaaccgcagtgtcgagataactaacacgcttgtggataacacggcagcaatatatcaatccttttcttcccagtgggacaaagaaagtaaagagagcacacaacgagaagaatgactgaacgaggctaaaatatacctatcagctgaaagatgaggttactttgagtatcatacaacctgataaatcgcatgaaggtgactttctcattgtctgctttatcgcacagcaagagaagatcacaggttagtgagcaatcgaaaatatcatgcctttgctgtgagacttgtagtatgtcg

SEQ ID NO: 23111 - DNA, 1140 bp, Muscodor strobelii
  misc_feature: SGI cDNA ID NO. 567859
  misc_feature: Encodes the peptide sequence at SEQ ID NO 23112
atggcatcatcggggaagaaacaatctcgggctgtctccgttagtgagcacatggtctcaacaacagctcctccgccgaaaagatggagtgagatcaccaaagtcagcgagatgagtgaacggagtccactgctgagcgccgacattgaaacacccgaaccacaaatcgttcctgtaagaaggagctcaccagtgatttctgagcggaaaggcacgccccaagcgattgctcaccgcggcttcaatgcttcagttccagaaaatacaatgatggctttcaaagccgccgtcgaagtcggtgtagatgctctagaaacagatcttcacttgtctcgcgacggtgttgtcgtactatgtcacgacggttcacttaagcgaacttttggtagagatgccaaagtaaaagatctagactgggcggagttgagccagctgcggactgtgcgggagcctcatctgcctatgccccgactttccgacctcttagcatatttgaatgagcctgggctcgaagatatttggcttatgctcgatatcaaacgagacgacgatccggaagaaatgatgcggaatattgcactcacaatggattcgactcctggaagacgaccctggagtgagagagtcacaccctgctgctgggatgcgaactatatcagtttaagcatgaaatacttacccgcattccgcattacgtttcttggtttctccatcaagtacgcgcgccaattgacgaacattcccaatatctcgttcagtatcgtgaaatgggcgctcgcctcacctgcaggagcatgcttcatacgcgatatgaagaagctaggtcttccagtctacgtatggacattgaatgacgaatactggatggaatgggctattcgaaagcagctcgctggtgtgattacggatcaagtcgccaaatacaatgacgtatgcgatcgagttgacgataaggaagagaacgaacgacctcggatacggaatgaaaaacgacgttcgatttcttcgagtgtatcccttcggcttcggtttttggccgagatgatcttggttcacactctcatgacggttttcatgacgataaatcagcttaagcatggttctttcaaaagtcagattagaaaagcgcttgggaattag

SEQ ID NO: 23112 - protein, 379 aa, Muscodor strobelii
  misc_feature: SGI Peptide ID NO. 567859
  misc_feature (78)..(307): Pfam Id: PF03009 Pfam Desc: Glycerophosphoryl diester phosphodiesterase family
  misc_feature (14)..(311): NCBI GI: 169615152 Blast Desc: SNOG_10730 [Phaeosphaeria nodorum SN15] gi|111061004|gb|EAT82124.1| SNOG_10730 [Phaeosphaeria nodorum SN15]
  misc_feature (38)..(320): NCBI GI: 242821812 Blast Desc: glycerophosphoryl diester phosphodiesterase, [Talaromyces stipitatus ATCC 10500] gi|218712678|gb|EED12103.1| glycerophosphoryl diester phosphodiesterase, [Talaromyces ATCC
  misc_feature (73)..(315): NCBI GI: 116180198 Blast Desc: CHGG_00727 [Chaetomium globosum CBS 148.51] gi|88185024|gb|EAQ92492.1| CHGG_00727 [Chaetomium globosum CBS 148.51]
  misc_feature (90)..(303): NCBI GI: 18307441 Blast Desc: conserved [Neurospora crassa]
  misc_feature (52)..(369): NCBI GI: 240273412 Blast Desc: glycerophosphoryl diester phosphodiesterase [Ajellomyces capsulatus H143]
  misc_feature (52)..(317): NCBI GI: 225558170 Blast Desc: glycerophosphoryl diester phosphodiesterase [Ajellomyces capsulatus G186AR]
  misc_feature (73)..(312): NCBI GI: 154280829 Blast Desc: [Ajellomyces capsulatus NAm1] gi|150411406|gb|EDN06794.1| [Ajellomyces capsulatus NAm1]
  misc_feature (90)..(331): NCBI GI: 119191626 Blast Desc: CIMG_00190 [Coccidioides immitis RS] gi|240106403|gb|EER24596.1| glycerophosphoryl diester phosphodiesterase, [Coccidioides posadasii C735 delta SOWgp]
  misc_feature (70)..(377): NCBI GI: 261192645 Blast Desc: glycerophosphoryl diester phosphodiesterase [Ajellomyces dermatitidis SLH14081] gi|239589211|gb|EEQ71854.1| glycerophosphoryl diester phosphodiesterase [Ajellomyces diester
  misc_feature (40)..(369): NCBI GI: 256732086 Blast Desc: NECHADRAFT_41798 [Nectria haematococca mpVI 77-13-4]
  misc_feature (74)..(313): SWISSPROT Homolog: EC 3.1.4.46 Glycerophosphodiester phosphodiesterase
MASSGKKQSRAVSVSEHMVSTTAPPPKRWSEITKVSEMSERSPLLSADIETPEPQIVPVRRSSPVISERKGTPQAIAHRGFNASVPENTMMAFKAAVEVGVDALETDLHLSRDGVVVLCHDGSLKRTFGRDAKVKDLDWAELSQLRTVREPHLPMPRLSDLLAYLNEPGLEDIWLMLDIKRDDDPEEMMRNIALTMDSTPGRRPWSERVTPCCWDANYISLSMKYLPAFRITFLGFSIKYARQLTNIPNISFSIVKWALASPAGACFIRDMKKLGLPVYVWTLNDEYWMEWAIRKQLAGVITDQVAKYNDVCDRVDDKEENERPRIRNEKRRSISSSVSLRLRFLAEMILVHTLMTVFMTINQLKHGSFKSQIRKALGN

SEQ ID NO: 23113 - DNA, 3475 bp, Muscodor strobelii; identical to SEQ ID NO: 23110
  misc_feature: SGI EST ID NO. CUFF.54402.1
  misc_feature: Variant of the nucleotide sequence at SEQ ID NO 23111

SEQ ID NO: 23114 - DNA, 2547 bp, Muscodor strobelii
  misc_feature: SGI cDNA ID NO. 567860
  misc_feature: Encodes the peptide sequence at SEQ ID NO 23115
atggcctcgcctcagcttctaccattcttaaggcctgggacgtcccattccattgctgatcatgtggcgcaatgttttatagccttccgaggcttaacggtggacctagacaaggttcgatcggaaggtcgcttagccaaggacctttcacttgtaaagatcgagaatcaacgagctcgtttcaagctctggtctggaaacattggcgctcaccgtacgggtcgaagttctttggactatcgtctaagagattcttcgcatctacagcagcaagtgttgaagcttcttcaagggctgaaaaagtccgtcgaggaagcgacctcgattcttgacggggaaaatgaggacaatgtcgcaccagacgaggacgattccgacttagactcagaagatatgctcgagctacgagagctaagctctgaaccaccattggaacgggttgcttccagtatgtggactattgtcgattgtctgctcagactgtccatgtcgattcgcaatcctgctccccatgatcgtttcatctcctcgaaactgactgatacatcctatttcgaaccccatgacatcaacttcgtccgcgacaagtttggagaggccgagaactatttgattgagcgccttggaaaggcaatttccaggagacgtcaatactttaagtatcggcaatcccatcgggagaagttgtctgcaggacttgatgttgatgaaagccgaactgaagtgcagagtaccgttgcatcatctgtccccctagccttcaaagattcgacaaaattgcagtctcacataagagatctagatgacgatgaacactcggatgctggcttctctcagacttcgtttgcaactactgcgcccgggtccggcaagcctataatcccttcgctgccaaaacagcatgccgatggcccctttgaatgtccgctgtgttgtatgatgatctcagtcaaaacaaaaatcgagtggaatcatgcgccgcctgaccaagtcagtatggtcctcgatgcatgcgaggcaagccgatcgcaagccacgagaatagaatgtccgctctgcaaagtaaatttggcgtcattgaagcaatacggacaacatgtcgggcgtcatcaaacagaacttgcactttttgctctcccctcgactgcagaccaggatgagatcgataacaacgacgccagtactctgagcagttgggacattgagtctcagaatgatgacaacgagaaggcttccaaacaagatgcagctgaagtcattatcataggcacgaccatgcaggcaagtcaaagcgaatcagaccttgaacagcacccaatggataattcacctatcgcttcccgtccccagcttctcgactcccctcgcatggaaaacacagaccaagttgcagagcagcatattgcagagatcgatggtgcgatcactatagctcggcagtggctccgtgaggcgaagacggataaggagaaagcggagcggcatgcagaactgtcgcaaatcgaactcgacaaagctgcgtatcttagtttgcttcgaaaaccctttttctctgtagccgacaacgccacgcgtgcgaatgctctcaaaatgtatggtaataagtattcgtcatacatacctcccagcttattagtggccgagagttcactggttgagttgaactctccttcgacagactccaagcatttttccaatccctgggatgaaccgcgacaaggtagttcaacaccaatcacggaaatcagcaagctagctattaatgcgccagaaaaagaagatcaagtgcgaccttcgatatccctctcatatgcgtcagacgcagatagcgttgatagagtcaatagcttcgacgccgaacctgccaccactcaaaagaatgctggtaaatatccagcaactttccaatgtatgctctgtccaaagcgatttactacaacatacgacttacgctcgcatctccgcacccacgccgacgaacgaccgttcgtttgcaccgtctgtggaaaggcattcgcccagaaccatgatcgaaagcgccacgaagatcttcatacgggcgaaaagaagtttatctgcaagggatatctcaaaaccgggggttcatggggctgcggaagaagattcgcacgagtagatgctcttggtcgacattttcgttccgatgctggccgtatttgcattagccctcttcaggatgaggaattgatggaaatacgacgtgaaatgatgtcaccgaatatggtgcaagaaccagcagtgagcctgccaaaggcatatggcttacctaccgtcctacttgcgcagtatcctgtccttgctacgatgaccctcccgcagagtgatgctacagatgagcaagatgatttggagactggctacgagccttcttccgatagtgagaggtattcagacgaagatgagggcagctacatcaccccacacgaactttataagcatgtaagacaagggcgaccacgtaccccacagcaacgtgatgagcatgtcaagatctatactggagtcaatgaggaagaactaccttag

SEQ ID NO: 23115 - protein, 848 aa, Muscodor strobelii
  misc_feature: SGI Peptide ID NO. 567860
  misc_feature (635)..(657): Pfam Id: PF00096 Pfam Desc: Zinc finger, C2H2 type
  misc_feature (663)..(685): Pfam Id: PF00096 Pfam Desc: Zinc finger, C2H2 type
  misc_feature (626)..(841): NCBI GI: 156057889 Blast Desc: SS1G_04676 [Sclerotinia sclerotiorum 1980] gi|154702461|gb|EDO02200.1| SS1G_04676 [Sclerotinia sclerotiorum 1980]
  misc_feature (626)..(813): NCBI GI: 154323388 Blast Desc: BC1G_00093 [Botryotinia fuckeliana B05.10] gi|150842322|gb|EDN17515.1| BC1G_00093 [Botryotinia fuckeliana B05.10]
  misc_feature (626)..(813): NCBI GI: 256734306 Blast Desc: NECHADRAFT_65383 [Nectria haematococca mpVI 77-13-4]
  misc_feature (17)..(323): NCBI GI: 46139093 Blast Desc: FG11061.1 [Gibberella zeae PH-1]
  misc_feature (626)..(811): NCBI GI: 46108918 Blast Desc: FG01341.1 [Gibberella zeae PH-1]
  misc_feature (626)..(813): NCBI GI: 171676980 Blast Desc: protein product [Podospora anserina] gi|170936557|emb|CAP61217.1| protein product [Podospora anserina]
  misc_feature (618)..(813): NCBI GI: 261357511 Blast Desc: oocyte zinc finger protein XlCOF20 [Verticillium albo-atrum VaMs.102]
  misc_feature (626)..(818): NCBI GI: 145255677 Blast Desc: An18g05920 [Aspergillus niger] gi|134084636|emb|CAK43315.1| protein product [Aspergillus niger]
  misc_feature (626)..(813): NCBI GI: 116196870 Blast Desc: CHGG_05033 [Chaetomium globosum CBS 148.51] gi|88180946|gb|EAQ88414.1| CHGG_05033 [Chaetomium globosum CBS 148.51]
  misc_feature (626)..(777): NCBI GI: 39940214 Blast Desc: MGG_05133 [Magnaporthe grisea 70-15] gi|145010611|gb|EDJ95267.1| MGG_05133 [Magnaporthe grisea 70-15]
MASPQLLPFLRPGTSHSIADHVAQCFIAFRGLTVDLDKVRSEGRLAKDLSLVKIENQRARFKLWSGNIGAHRTGRSSLDYRLRDSSHLQQQVLKLLQGLKKSVEEATSILDGENEDNVAPDEDDSDLDSEDMLELRELSSEPPLERVASSMWTIVDCLLRLSMSIRNPAPHDRFISSKLTDTSYFEPHDINFVRDKFGEAENYLIERLGKAISRRRQYFKYRQSHREKLSAGLDVDESRTEVQSTVASSVPLAFKDSTKLQSHIRDLDDDEHSDAGFSQTSFATTAPGSGKPIIPSLPKQHADGPFECPLCCMMISVKTKIEWNHAPPDQVSMVLDACEASRSQATRIECPLCKVNLASLKQYGQHVGRHQTELALFALPSTADQDEIDNNDASTLSSWDIESQNDDNEKASKQDAAEVIIIGTTMQASQSESDLEQHPMDNSPIASRPQLLDSPRMENTDQVAEQHIAEIDGAITIARQWLREAKTDKEKAERHAELSQIELDKAAYLSLLRKPFFSVADNATRANALKMYGNKYSSYIPPSLLVAESSLVELNSPSTDSKHFSNPWDEPRQGSSTPITEISKLAINAPEKEDQVRPSISLSYASDADSVDRVNSFDAEPATTQKNAGKYPATFQCMLCPKRFTTTYDLRSHLRTHADERPFVCTVCGKAFAQNHDRKRHEDLHTGEKKFICKGYLKTGGSWGCGRRFARVDALGRHFRSDAGRICISPLQDEELMEIRREMMSPNMVQEPAVSLPKAYGLPTVLLAQYPVLATMTLPQSDATDEQDDLETGYEPSSDSERYSDEDEGSYITPHELYKHVRQGRPRTPQQRDEHVKIYTGVNEEELP

SEQ ID NO: 23116 - DNA, 2966 bp, Muscodor strobelii
  misc_feature: SGI EST ID NO. CUFF.54418.0
  misc_feature: Variant of the nucleotide sequence at SEQ ID NO 23114
gcacatcacacgatttgatctgttaagctccacgactatacctggatcatgtggccttgactacaaacaaatcaagatacttcgaagtgtaccctaactcccgatggcctcgcctcagcttctaccattcttaaggcctgggacgtcccattccattgctgatcatgtggcgcaatgttttatagccttccgaggcttaacggtggacctagacaaggttcgatcggaaggtcgcttagccaaggacctttcacttgtaaagatcgagaatcaacgagctcgtttcaagctctggtctggaaacattggcgctcaccgtacgggtcgaagttctttggactatcgtctaagagattcttcgcatctacagcagcaagtgttgaagcttcttcaagggctgaaaaagtccgtcgaggaagcgacctcgattcttgacggggaaaatgaggacaatgtcgcaccagacgaggacgattccgacttagactcagaagatatgctcgagctacgagagctaagctctgaaccaccattggaacgggttgcttccagtatgtggactattgtcgattgtctgctcagactgtccatgtcgattcgcaatcctgctccccatgatcgtttcatctcctcgaaactgactgatacatcctatttcgaaccccatgacatcaacttcgtccgcgacaagtttggagaggccgagaactatttgattgagcgccttggaaaggcaatttccaggagacgtcaatactttaagtatcggcaatcccatcgggagaagttgtctgcaggacttgatgttgatgaaagccgaactgaagtgcagagtaccgttgcatcatctgtccccctagccttcaaagattcgacaaaattgcagtctcacataagagatctagatgacgatgaacactcggatgctggcttctctcagacttcgtttgcaactactgcgcccgggtccggcaagcctataatcccttcgctgccaaaacagcatgccgatggcccctttgaatgtccgctgtgttgtatgatgatctcagtcaaaacaaaaatcgagtggaagtaagtcttatgctgctcctttagtattaacacagacttatggtaataaccattccaggaggcatgtaatgtcagatctgaagccatatatttgcattcaccaagattgcatcacgaccaatgtggagttcgtgcggcgacacgattggatggaacatatgttccaaaagcactggaaattgtggcactgcccattctcatgtactgaaacgttcacctcacctggagagcttgagaaacacttggccgacagtcatgcgccgcctgaccaagtcagtatggtcctcgatgcatgcgaggcaagccgatcgcaagccacgagaatagaatgtccgctctgcaaagtaaatttggcgtcattgaagcaatacggacaacatgtcgggcgtcatcaaacagaacttgcactttttgctctcccctcgactgcagaccaggatgagatcgataacaacgacgccagtactctgagcagttgggacattgagtctcagaatgatgacaacgagaaggcttccaaacaagatgcagctgaagtcattatcataggcacgaccatgcaggcaagtcaaagcgaatcagaccttgaacagcacccaatggataattcacctatcgcttcccgtccccagcttctcgactcccctcgcatggaaaacacagaccaagttgcagagcagcatattgcagagatcgatggtgcgatcactatagctcggcagtggctccgtgaggcgaagacggataaggagaaagcggagcggcatgcagaactgtcgcaaatcgaactcgacaaagctgcgtatcttagtttgcttcgaaaaccctttttctctgtagccgacaacgccacgcgtgcgaatgctctcaaaatactccaagcatttttccaatccctgggatgaaccgcgacaaggtagttcaacaccaatcacggaaatcagcaagctagctattaatgcgccagaaaaagaagatcaagtgcgaccttcgatatccctctcatatgcgtcagacgcagatagcgttgatagagtcaatagcttcgacgccgaacctgccaccactcaaaagaatgctggtaaatatccagcaactttccaatgtatgctctgtccaaagcgatttactacaacatacgacttacgctcgcatctccgcacccacgccgacgaacgaccgttcgtttgcaccgtctgtggaaaggcattcgcccagaaccatgatcgaaagcgccacgaagatcttcatacgggcgaaaagaagtttatctgcaagggatatctcaaaaccgggggttcatggggctgcggaagaagattcgcacgagtagatgctcttggtcgacattttcgttccgatgctggccgtatttgcattagccctcttcaggatgaggaattgatggaaatacgacgtgaaatgatgtcaccgaatatggtgcaagaaccagcagtgagcctgccaaaggcatatggcttacctaccgtcctacttgcgcagtatcctgtccttgctacgatgaccctcccgcagagtgatgctacagatgagcaagatgatttggagactggctacgagccttcttccgatagtgagaggtattcagacgaagatgagggcagctacatcaccccacacgaactttataagcatgtaagacaagggcgaccacgtaccccacagcaacgtgatgagcatgtcaagatctatactggagtcaatgaggaagaactaccttaggatgttaaatttggcatgtattttgagctgccaatgtcactataatgtcgtatgaacgaagagtaaatatatacagtctacgcaggtggtcaatcgttacacgacagtaatgtaatgcgttgcaattaaaatctattatctacttgatg

SEQ ID NO: 23117 - DNA, 1770 bp, Muscodor strobelii
  misc_feature: SGI cDNA ID NO. 567861
  misc_feature: Encodes the peptide sequence at SEQ ID NO 23118
atgtctggacttgaagtagttggaatcgtgctaggaagcattcctttgatcatctcggcgctcgagcattaccaaactagcgccgataagatagcgatattcagaaatcataaagaggtcctccagagatacgccatccagcttgagacccagcaatgcctacttcagaatacttgcgagtcgcttctgagcgacattgtcagcgttaacagcgtcgaacagatgatcgccgccccgtttggaccattgtggaaggatgacaagattagaaaccaactatactggaagttggatacttcgcttgacatattcgaaaagaatgtaaagcagctgcactcagcaactgaagaattgatgaaagaggtagtaatgtcgccggaagaaacggctggcaatgttccagagaaaaagcgccttaagctagagctgaaacgaattctgcttgcaatgaaattccgaaagtacgaagagacaatgagggagctttcggacgcgaactcaaccatagcaacccttcttgagtcgcattccaagattgccaagagtcggcgagcgcgcacccaagggaaaattttcagcgtcctgcgcagcgtggctcggaacattttcaatgcccttagactcagtttcccctgtggttgccgctccttgcacaaggtgaatcttcagttacttgcgccatttatagtaccattccaaaacagcgaagctctgcttaggcaacaggaattccggattgccctatcgtacgatccgcagaataagaagggtaagggatatagtagctgggcatggaacgaaattgcactacgcgtggctgaaccgcaccaacggccgaatccttgtttatatttacctagcgacatgaaatccaagggcagcatgcagaagctgaagaagagcgtattattcctagagaacaagtgggagtcgctcagttcacaaaagtcctcttcgtctacctcgacggtactactgccaccacagaccgttatacctctgatgtcccagccggccccgttagatctagttaatctctgtcaagagcttgcaaccaaaaatcgcgctgggggtgaatgttatggttatgttaccagcaacacaaatgccgattcgcacaaattcggcgtgtatagtatcgattcgtgcgaagatagcagcggttggtctacattctcgctcaaacagctcctagagactggaatatttgacacaggtggccctcaattgcctaagcaactcgacatagctgccacagtcgcctcaagcgtacttcagcttcatgacacgccctggatgccccagatccttaccagcgaccatatctattttctagagcgcaatggccaagtggactacgaccgaatttacgtggccaaaacgctatctcaaccaggccccgaagtcgaagaggacttccgattgccgatgacgagggctattaagaaccgaactatcttctccctggcggcattgttgatggaaatcatcttatgcaagtcgctcgaccgtctgtgtgccgagtcaagacaacctggccaaagggtgcatagtcatccgctgcttgacaagccgacaatccagagtctgcttgtcgacattgagcactatgcgtccgacaagtaccgggatgcagtgatgagctgctggaaatgcaattttcattgctcaacacatagtctagatgacgaaatgtttcgtgaagaggtctatagccatatcgtcggccctttgcaggagatgtcgaattgcatgcggagagactggtga

SEQ ID NO: 23118 - protein, 589 aa, Muscodor strobelii
  misc_feature: SGI Peptide ID NO. 567861
  misc_feature (1)..(579): NCBI GI: 169615082 Blast Desc: SNOG_10696 [Phaeosphaeria nodorum SN15] gi|111060970|gb|EAT82090.1| SNOG_10696 [Phaeosphaeria nodorum SN15]
  misc_feature (1)..(582): NCBI GI: 256734980 Blast Desc: NECHADRAFT_90584 [Nectria haematococca mpVI 77-13-4]
  misc_feature (1)..(579): NCBI GI: 240274341 Blast Desc: conserved [Ajellomyces capsulatus H143]
  misc_feature (1)..(579): NCBI GI: 154270750 Blast Desc: [Ajellomyces capsulatus NAm1] gi|150409803|gb|EDN05243.1| [Ajellomyces capsulatus NAm1]
  misc_feature (85)..(580): NCBI GI: 164422634 Blast Desc: NCU09957 [Neurospora crassa OR74A] gi|157069754|gb|EAA29228.2| [Neurospora crassa OR74A]
  misc_feature (1)..(221): NCBI GI: 256724298 Blast Desc: NECHADRAFT_53534 [Nectria haematococca mpVI 77-13-4]
  misc_feature (75)..(580): NCBI GI: 46139091 Blast Desc: FG11060.1 [Gibberella zeae PH-1]
  misc_feature (1)..(579): NCBI GI: 239614508 Blast Desc: conserved [Ajellomyces dermatitidis ER-3]
  misc_feature (1)..(578): NCBI GI: 242795329 Blast Desc: conserved [Talaromyces stipitatus ATCC 10500] gi|218719151|gb|EED18571.1| conserved [Talaromyces stipitatus ATCC 10500]
  misc_feature (1)..(580): NCBI GI: 212535818 Blast Desc: conserved [Penicillium marneffei ATCC 18224] gi|210070464|gb|EEA24554.1| conserved [Penicillium marneffei ATCC 18224]
MSGLEVVGIVLGSIPLIISALEHYQTSADKIAIFRNHKEVLQRYAIQLETQQCLLQNTCESLLSDIVSVNSVEQMIAAPFGPLWKDDKIRNQLYWKLDTSLDIFEKNVKQLHSATEELMKEVVMSPEETAGNVPEKKRLKLELKRILLAMKFRKYEETMRELSDANSTIATLLESHSKIAKSRRARTQGKIFSVLRSVARNIFNALRLSFPCGCRSLHKVNLQLLAPFIVPFQNSEALLRQQEFRIALSYDPQNKKGKGYSSWAWNEIALRVAEPHQRPNPCLYLPSDMKSKGSMQKLKKSVLFLENKWESLSSQKSSSSTSTVLLPPQTVIPLMSQPAPLDLVNLCQELATKNRAGGECYGYVTSNTNADSHKFGVYSIDSCEDSSGWSTFSLKQLLETGIFDTGGPQLPKQLDIAATVASSVLQLHDTPWMPQILTSDHIYFLERNGQVDYDRIYVAKTLSQPGPEVEEDFRLPMTRAIKNRTIFSLAALLMEIILCKSLDRLCAESRQPGQRVHSHPLLDKPTIQSLLVDIEHYASDKYRDAVMSCWKCNFHCSTHSLDDEMFREEVYSHIVGPLQEMSNCMRRDW

SEQ ID NO: 23119 - DNA, 2500 bp, Muscodor strobelii
  misc_feature: SGI EST ID NO. CUFF.54421.0
  misc_feature: Variant of the nucleotide sequence at SEQ ID NO 23117
tgcagctttgcccctcacaacagcgcgacttcatcccaaattgcggccccaagaggcttcaaccgctcaaccacctctcttggacctcgttgtggtgcgcgcaagcatgtctggacttgaagtagttggaatcgtgctaggaagcattcctttgatcatctcggcgctcgagcattaccaaactagcgccgataagatagcgatattcagaaatcataaagaggtcctccagagatacgccatccagcttgagacccagcaatgcctacttcagaatacttgcgagtcgcttctgagcgacattgtcagcgttaacagcgtcgaacagatgatcgccgccccgtttggaccattgtggaaggatgacaagattagaaaccaactatactggaagttggatacttcgcttgacatattcgaaaagaatgtaaagcagctgcactcagcaactgaagaattgatgaaagaggtagtaatgtcgccggaagaaacggctggcaatgttccagagaaaaagcgccttaagctagagctgaaacgaattctgcttgcaatgaaattccgaaagtacgaagagacaatgagggagctttcggacgcgaactcaaccatagcaacccttcttgagtcgcattccaagattgccaagagtcggcgagcgcgcacccaagggaaaattttcagcgtcctgcgcagcgtggctcggaacattttcaatgcccttagactcagtttcccctgtggttgccgctccttgcacaaggtgaatcttcagttacttgcgccatttatagtaccattccaaaacagcgaagctctgcttaggcaacaggaattccggattgccctatcgtacgatccgcagaataagaagggtaagggatatagtagctgggcatggaacgaaattgcactacgcgtggctgaaccgcaccaacggccgaatccttgtttatatttacctagcgacatgaaatccaagggcagcatgcagaagctgaagaagagcgtattattcctagagaacaagtgggagtcgctcagttcacaaaagtcctcttcgtctacctcgacggtactactgccaccacagaccgttatacctctgatgtcccagccggccccgttagatctagttaatctctgtcaagagcttgcaaccaaaaatcgcgctgggggtgaatgttatggttatgttaccagcaacacaaatgccgattcgcacaaattcggcgtgtatagtatcgattcgtgcgaagatagcagcggttggtctacattctcgctcaaacagctcctagagactggaatatttgacacaggtggccctcaattgcctaagcaactcgacatagctgccacagtcgcctcaagcgtacttcagcttcatgacacgccctggatgccccagatccttaccagcgaccatatctattttctagagcgcaatggccaagtggactacgaccgaatttacgtggccaaaacgctatctcaaccaggccccgaagtcgaagaggacttccgattgccgatgacgagggctattaagaaccgaactatcttctccctggcggcattgttgatggaaatcatcttatgcaagtcgctcgaccgtctgtgtgccgagtcaagacaacctggccaaagggtgcatagtcatccgctgcttgacaagccgacaatccagagtctgcttgtcgacattgagcactatgcgtccgacaagtaccgggatgcagtgatgagctgctggaaatgcaattttcattgctcaacacatagtctagatgacgaaatgtttcgtgaagaggtctatagccatatcgtcggccctttgcaggagatgtcgaattgcatgcggagagactggtgatatcggtgctcagccatgcacccagggaagggtattcttggagttcgtgaatctggctagaaaatggaccgctgtcacaaggcgaccgtcgaaaatgatgccaccgtgccgaccgagacctatccggcgacccaacgaggctcaggacaaaagtcaacgatatgggcttagaatgctggacgagaagatgcatgactttaatgaatttgccttgttatccgatatcacgcgcgcacaagcccattcgccatgcttcagattttgctgaacacgtcagaggctgttacgcgcggtcatgtaaggtgtctcaccacggaggaggcgagggcgacctgacgcttattgaagaggccgtcgaaagatttatgaggtattggagaatacagcttaggaagaaatcgcacaaattggacaactcagtatacgatctgtatgaggtgcctcagatgctggcctatatgactatccatatgcaactggcatacttggtagtggcctcagccgcattttcatagcgaatcaccggatagaagtggtgaaaacaatgaaatcttggttccgttactaggctatgtctcctccgcttcattgctcatgtagatgtgtcatcattctacagtttac

SEQ ID NO: 23120 - DNA, 741 bp, Muscodor strobelii
  misc_feature: SGI cDNA ID NO. 567862
  misc_feature: Encodes the peptide sequence at SEQ ID NO 23121
atgtcgggcgacgatcactcaatcatttctcctgccatcttgtacttcggcacccctgtagttcttctctcatctcaaaatgaggatggaacatgtaacattgctccaatgtcatcagcatggtggctcggccattcatgcgtgctcggtctagatgcatcgtcaaaaacaacacagaacatgctccgcacaaaacaatgtgtgatgaaccttcctgatgacacaatggttgatcatgtcgacaaacttgcatgcacaaccggaaccaatcccatcactctttcgaaggaaatgaggaactacagatacgtcccaaacaaatgggcggaagctgggctctcacctcagcgctcagacttcgtcgggcctgatcggatatacgaatgccccgtgcaaatggagtgtgaggtcgtgcagagcacaaagctcagaccagatctgcctgatcgggtcggtcttatcttggccatcgaagtccgagtgctacggattcatatcagagacacactacgcatgaaaggctaccctaaccgtattgatccagacaagtggcgccctctcatcatgtcgttccagcatttctacagcctacgggatggaaaagtcgcgccgagtgtactaggtggggtcgaagaggagctctaccggcctctgaccaaaagcgacgtggtcgctctaccaggagacgaggatcacgaggctgttcttgaagctatcccgcagcgtggaattactgcgtag

SEQ ID NO: 23121 - protein, 246 aa, Muscodor strobelii
  misc_feature: SGI Peptide ID NO. 567862
  misc_feature (6)..(216): NCBI GI: 225684501 Blast Desc: conserved [Paracoccidioides brasiliensis Pb03]
  misc_feature (6)..(216): NCBI GI: 226294159 Blast Desc: conserved [Paracoccidioides brasiliensis Pb18]
  misc_feature (6)..(216): NCBI GI: 33316722 Blast Desc: AF443183_2 Jcg001w [Paracoccidioides brasiliensis]
  misc_feature (6)..(224): NCBI GI: 261189583 Blast Desc: conserved [Ajellomyces dermatitidis SLH14081] gi|239591438|gb|EEQ74019.1| conserved [Ajellomyces dermatitidis SLH14081] gi|239613031|gb|EEQ90018.1| conserved [Ajellomyces
  misc_feature (6)..(216): NCBI GI: 119473681 Blast Desc: NFIA_001680 [Neosartorya fischeri NRRL 181] gi|119406869|gb|EAW16819.1| conserved [Neosartorya fischeri NRRL 181]
  misc_feature (6)..(216): NCBI GI: 167590119 Blast Desc: BuboB_32585 [Burkholderia ubonensis Bu]
  misc_feature (6)..(216): NCBI GI: 256669744 Blast Desc: StAA4_21439 [Streptomyces sp. AA4]
  misc_feature (6)..(216): NCBI GI: 107027144 Blast Desc: Bcen_4803 [Burkholderia cenocepacia AU 1054] gi|116691464|ref|YP_836997.1| Bcen2424_3365 [Burkholderia cenocepacia HI2424] gi|105896518|gb|ABF79682.1| conserved AU
  misc_feature (6)..(216): NCBI GI: 170736532 Blast Desc: Bcenmc03_4151 [Burkholderia cenocepacia MC0-3] gi|169818720|gb|ACA93302.1| conserved [Burkholderia cenocepacia MC0-3]
  misc_feature (6)..(229): NCBI GI: 221197454 Blast Desc: conserved [Burkholderia multivorans CGD2M] gi|221204127|ref|ZP_03577145.1| conserved [Burkholderia multivorans CGD2] gi|221176293|gb|EEE08722.1| conserved CGD2]
MSGDDHSIISPAILYFGTPVVLLSSQNEDGTCNIAPMSSAWWLGHSCVLGLDASSKTTQNMLRTKQCVMNLPDDTMVDHVDKLACTTGTNPITLSKEMRNYRYVPNKWAEAGLSPQRSDFVGPDRIYECPVQMECEVVQSTKLRPDLPDRVGLILAIEVRVLRIHIRDTLRMKGYPNRIDPDKWRPLIMSFQHFYSLRDGKVAPSVLGGVEEELYRPLTKSDVVALPGDEDHEAVLEAIPQRGITA

SEQ ID NO: 23122 - DNA, 1972 bp, Muscodor strobelii
  misc_feature: SGI EST ID NO. CUFF.54427.0
  misc_feature: Variant of the nucleotide sequence at SEQ ID NO 23120
ttttgattctctctacgccagccagtgtatgatctccttgccgcacattgggtcatctgtcgttgatgttcgttccacgtggaaaatacatgcatgcgcacaacaaaatgtggaaactcgtcccaaactaggacgatcatctaagcgtacagcgggagcctacatatgtaagaatgtgatagcctatctcctatcccgaaagtagactcgaaagcgaaatacatcttatacatgtctactacgggagacagcttagtcagcgttacccttgtcccatgcaattgtcggacctcctcggagcatgccagagaaacaaataaactataaaacatttctcccttccctttttctgctgcaaaatggaaatagagagagcttctgtcttttgactctgaatacatcgttataaggtttccatcccaggttgctgttgatatgtgtgctaataaatgtgtagatgcaaccctccgccgctcggcctcacggctgggcctcacgagtcccgatctcgacgaacctcccgccaatcgaatattgtagggattgatagttttcgcacgacaccgacggagacagatgggcatactggagatttgcagtaaatgggtgtcctcggagatgttgaactaatcgttacccccatgatcccatgatcgagtcaagaaccaacaaatggtggtgatcagtgaagataagcggatggcatttcatcctggtccggccggccgtggtcgcagcggtccagctgtggcatataggatcaacctgcagcaatgcatcactattactacctttggaatttctgcccaatatataaggagagaaccgcacccagcaagattctttcagttctctcgatcacagcagccgctcgtctcaagcactttaccaagctctgagacaaaatcaaaagattagtttttgaaatactcaacttcaaaatgtcgggcgacgatcactcaatcatttctcctgccatcttgtacttcggcacccctgtagttcttctctcatctcaaaatgaggatggaacatgtaacattgctccaatgtcatcagcatggtggctcggccattcatgcgtgctcggtctagatgcatcgtcaaaaacaacacagaacatgctccgcacaaaacaatgtgtgatgaaccttcctgatgacacaatggttgatcatgtcgacaaacttgcatgcacaaccggaaccaatcccatcactctttcgaaggaaatgaggaactacagatacgtcccaaacaaatgggcggaagctgggctctcacctcagcgctcagacttcgtcgggcctgatcggatatacgaatgccccgtgcaaatggagtgtgaggtcgtgcagagcacaaagctcagaccagatctgcctgatcgggtcggtcttatcttggccatcgaagtccgagtgctacggattcatatcagagacacactacgcatgaaaggctaccctaaccgtattgatccagacaagtggcgccctctcatcatgtcgttccagcatttctacagcctacgggatggaaaagtcgcgccgagtgtactaggtggggtcgaagaggagctctaccggcctctgaccaaaagcgacgtggtcgctctaccaggagacgaggatcacgaggctgttcttgaagctatcccgcagcgtggaattactgcgtaggactatgcaataagcaagacgaatatggaggcaatacttggaacacgaaaaatagcaatcgccgccttctacaaatttaattcacgggggttaaatatgtcggtttataggaatgtacggtcgtttctaggtcactcaatagaagcactatattctctaacatcttccgtcttgtaacgccttagaccacacatcggtgtactagtgatgtcagtaaagtgattccacttgtattgctaaagatcacttgttccgattcgaatattaagcaagtgctgtttcgcaatttt

SEQ ID NO: 23123 - DNA, 1113 bp, Muscodor strobelii
  misc_feature: SGI cDNA ID NO. 567863
  misc_feature: Reduced expression when VOC is produced
  misc_feature: Encodes the peptide sequence at SEQ ID NO 23124
atggcgaccgaggagaccaaagcgcgcagccgcgtcttcttcgacattagcatcggcgacaagccggccggccgcgtgaccttcgagctgtacagcgacgtcgtgcccaagacggcggagaactttcgcgcgctctgcaccggcgagaagggcattggcaagggcggcaagcccctccactacaagggcagcatcttccaccgcgtcatcaagcagttcatgatccagggtggtgacttcaccgctggcgacggaaccggtggcgagtctatctacggcgccaagttcgaggatgagaacttcgagctcaagcatgagaagccctttttgctctctatggctaatgccgggcctggaaccaacggctcccaattcttcgtaaccacagtcgcaacaccccacctggacgggaaacacgtagtattcggcgaagtaaaaacgggtaaatccataatccgtcaaatcgagaacctcaagacgcaaggatccgacaaacccgtgcacgacgcttgcatcacggactgcggcgagctatccggccccatagaggacgaagtcaagaaagcagacgattacggcgacgtctacgaagacttccccgaagacgcctctaccgactcccctctcgacgccgccaaagtcctggagatcgccaccgcctgcaaggaatacggtaattcggctttcaaaaaggcggatttctacatggcgttggagaaatacgaaaagggtctgcgctaccttaatgaagaacccgataccgattcctcacccgatctaaagtctaaactggataccctccgcataacgctgaactccaactcctccctaatgtctctcaagctatcccaatggtcagaagctgagcgtttcgcgtctcaagctctcctcgtgtccacaatcacccccgccgaaaagggaaaagctctctatcgccgcggcacagcctacatcaagctaaaagacgaagataaagccatcgagtgtctgaccgaggcccagaagctcgtccccggcgacgcagggataaagaagagtttagatgatgtgaaggccgcggctgcggcacgaaagaagaaggaacaggctgcttacagcaagttcttccagtga

SEQ ID NO: 23124 - protein, 370 aa, Muscodor strobelii
  misc_feature: SGI Peptide ID NO. 567863
  misc_feature (307)..(340): Pfam Id: PF00515 Pfam Desc: Tetratricopeptide repeat
  misc_feature (307)..(340): Pfam Id: PF07719 Pfam Desc: Tetratricopeptide repeat
  misc_feature (11)..(178): Pfam Id: PF00160 Pfam Desc: Cyclophilin type peptidyl-prolyl cis-trans isomerase/CLD
  misc_feature (7)..(369): NCBI GI: 85075989 Blast Desc: 40 kDa peptidyl-prolyl cis-trans isomerase [Neurospora crassa OR74A] gi|46397046|sp|Q9P3X9.1|PPID_NEUCR RecName: Full=41 kDa peptidyl-prolyl cis-trans isomerase; Short=PPIase; AltName:
  misc_feature (2)..(369): NCBI GI: 171678007 Blast Desc: protein product [Podospora anserina] gi|170937072|emb|CAP61731.1| protein product [Podospora anserina]
  misc_feature (1)..(369): NCBI GI: 116201625 Blast Desc: CHGG_08697 [Chaetomium globosum CBS 148.51] gi|88177215|gb|EAQ84683.1| CHGG_08697 [Chaetomium globosum CBS 148.51]
  misc_feature (1)..(369): NCBI GI: 156055274 Blast Desc: peptidyl-prolyl cis-trans isomerase [Sclerotinia sclerotiorum 1980] gi|154702773|gb|EDO02512.1| peptidyl-prolyl cis-trans isomerase [Sclerotinia sclerotiorum 1980]
  misc_feature (1)..(350): NCBI GI: 39945968 Blast Desc: MGG_08104 [Magnaporthe grisea 70-15] gi|145019348|gb|EDK03576.1| MGG_08104 [Magnaporthe grisea 70-15]
  misc_feature (1)..(369): NCBI GI: 154294784 Blast Desc: peptidyl-prolyl cis-trans isomerase [Botryotinia fuckeliana B05.10] gi|150844565|gb|EDN19758.1| peptidyl-prolyl cis-trans isomerase [Botryotinia fuckeliana B05.10]
  misc_feature (1)..(369): NCBI GI: 212276064 Blast Desc: LOC100191803 [Zea mays] gi|194689872|gb|ACF79020.1| [Zea mays]
  misc_feature (1)..(369): NCBI GI: 256731870 Blast Desc: [Nectria haematococca mpVI 77-13-4]
  misc_feature (1)..(369): NCBI GI: 46137673 Blast Desc: FG10352.1 [Gibberella zeae PH-1] gi|93140587|sp|Q4HXF6.1|PPID_GIBZE RecName: Full=Peptidyl-prolyl cis-trans isomerase D; Short=PPIase D; Short=Rotamase D
  misc_feature (5)..(369): NCBI GI: 121710780 Blast Desc: peptidyl-prolyl cis-trans isomerase Cpr7, [Aspergillus clavatus NRRL 1] gi|119401156|gb|EAW11580.1| peptidyl-prolyl cis-trans isomerase Cpr7, [Aspergillus clavatus NRRL 1]
  misc_feature (7)..(369): SWISSPROT Homolog: EC 5.2.1.8 Peptidylprolyl isomerase
  misc_feature: Useful for introducing or modulating the production of volatile compounds
MATEETKARSRVFFDISIGDKPAGRVTFELYSDVVPKTAENFRALCTGEKGIGKGGKPLHYKGSIFHRVIKQFMIQGGDFTAGDGTGGESIYGAKFEDENFELKHEKPFLLSMANAGPGTNGSQFFVTTVATPHLDGKHVVFGEVKTGKSIIRQIENLKTQGSDKPVHDACITDCGELSGPIEDEVKKADDYGDVYEDFPEDASTDSPLDAAKVLEIATACKEYGNSAFKKADFYMALEKYEKGLRYLNEEPDTDSSPDLKSKLDTLRITLNSNSSLMSLKLSQWSEAERFASQALLVSTITPAEKGKALYRRGTAYIKLKDEDKAIECLTEAQKLVPGDAGIKKSLDDVKAAAAARKKKEQAAYSKFFQ

SEQ ID NO: 23125 - DNA, 1750 bp, Muscodor strobelii
  misc_feature: SGI EST ID NO. CUFF.54454.0
  misc_feature: Variant of the nucleotide sequence at SEQ ID NO 23123
gcttcatcgactcgcagctgagcctcccaagcaactgagaccgtcaagtttgtctccctgcttccacgtttcttctccctctttccatcggagaggagattggtttgctcctttctcacctgtgccttctgcttgctccaaacaagtcagaccgccatacatcttctctcaattggcatctggtcatctacctcttctacccctccacacccacaaaagctatcagcccacctcacatttcctcccgctccaactcaccaccacaccttcaccgacacaaccacacaccaacccgcaatcatggcgaccgaggagaccaaagcgcgcagccgcgtcttcttcgacattagcatcggcgacaagccggccggccgcgtgaccttcgagctgtacagcgacgtcgtgcccaagacggcggagaactttcgcgcgctctgcaccggcgagaagggcattggcaagggcggcaagcccctccactacaagggcagcatcttccaccgcgtcatcaagcagttcatgatccagggtggtgacttcaccgctggcgacggaaccggtggcgagtctatctacggcgccaagttcgaggatgagaacttcgagctcaagcatgagaagccctttttgctctctatggctaatgccgggcctggaaccaacggctcccaattcttcgtaaccacagtcgcaacaccccacctggacgggaaacacgtagtattcggcgaagtaaaaacgggtaaatccataatccgtcaaatcgagaacctcaagacgcaaggatccgacaaacccgtgcacgacgcttgcatcacggactgcggcgagctatccggccccatagaggacgaagtcaagaaagcagacgattacggcgacgtctacgaagacttccccgaagacgcctctaccgactcccctctcgacgccgccaaagtcctggagatcgccaccgcctgcaaggaatacggtaattcggctttcaaaaaggcggatttctacatggcgttggagaaatacgaaaagggtctgcgctaccttaatgaagaacccgataccgattcctcacccgatctaaagtctaaactggataccctccgcataacgctgaactccaactcctccctaatgtctctcaagctatcccaatggtcagaagctgagcgtttcgcgtctcaagctctcctcgtgtccacaatcacccccgccgaaaagggaaaagctctctatcgccgcggcacagcctacatcaagctaaaagacgaagataaagccatcgagtgtctgaccgaggcccagaagctcgtccccggcgacgcagggataaagaagagtttagatgatgtgaaggccgcggctgcggcacgaaagaagaaggaacaggctgcttacagcaagttcttccagtgagcgcggtactaacagatgctaggggttagagaggcgatgatgggcgttatgggcatggatttgtgaggaacgagagacatggcgatgttttaccgatgaagaactgaaaggaaggggcaggcaagaagaagtaaagagtcagaaagaggtaagagccaaggatacgaaagtgtttcccaatatatagagagtcgatggctccacctcatgtcctatctacgagtctctacaagtttaggaagagaaccgaacagggatcctagttcgtgcttgttactgtagcttagataggagcaaaagagcaaaaacattcacaatcaacagagattcaacttca

SEQ ID NO: 23126 - DNA, 3168 bp, Muscodor strobelii
  misc_feature: SGI cDNA ID NO. 567864
  misc_feature: Encodes the peptide sequence at SEQ ID NO 23127
atgtccaaaaaggagaagaaacctagtactaggcgcctggtcaaaaggggttcttctcgtccaacatcaccacccgcctctccgcctccctcggtcgattcactacccctccctatccccacggcagatgcgaacagaatgctttcgctgatgaagagattgcatggccgcatgaagggcaaagtcgagtatcagaccgagcccggtacaccgtggcatagcgggatctgctatatagaagaagacaaaggaagtctaatatttgaccctggccaccatgacctcttccatgttactctcattgcagacctgcgcggatgccgagtcctgccatgcaagtcaccggaagccaatacaatgtgcttggaactaaatagtgccaagatgggcattgagcttctccttcatccccttaaccccgaagaattcgaactatggcttgccagcttactctgctggcaacagttaaggcctccaggagtcagattggcaggcaataataaggcacccagctctcctggacctgaccgacctgagacaaggaggagaggctcgtctgcagctgcttcctgctcgaaagaccctgccatcatcaaggtcggaaacgtcatgctatgggataaaggggccgcaacatccccacgggccatcgtgaaacgtccatctactcgggatctccgctcgcccggtacttcctggaggagagtttcttgtattctccaggataatggcgaattcaagctcatgaacgagaacgacgtgacggtgctctcggtcattgatctctcccagctgtcacgctcagcagtgcagaaattggatagatctgtcttggacgatgactattgcattgctgttttccctatatattcatccacgtcccgacagctttcgatttttcgacccgtatatctcgccctggattcgagagtcctttttgaggtctggttcgtcttactacgcgcattcactgttccagaattatacggcctgtcctcttccacgaagcaaattaccgaagtgcatcgcccgggtgctgaattcgatggggacttgtttcgagtagaaaagtctatccaagttagggtcattgaagcaaaagtacagaagcctgtgtcgtcgaaagaccactatggccacaatgagcgggatccacttgtcggtaattattttgcagaagttatactcgacggtgaaactcggtcaagaacagcccctcaggaaaatacgaagaaccctttttggcgcgacacggctcagttttcggatcttcctgccgcgcttcccactttgacagtcgtcttaaagaagcttgagggaaatatagacaactatggccgctcgatgcgatctttacggcttccccaccagaacaatctttctgaagtcatgtgtggagtcgtcgaggtgccgttagataaagccgagaaaggcaaggacactgaagaatggttcgatgcatacgacgagaaacaagaatgcatgggaagcatgctcataagactcgagtatgacgagatggtcgttctagcgaatcaggattacaagtctctttccgacttattacatcaattcggctctgggctcaccagccagatcacacagtcggccccaggcatgatgaggcggctatccgaaatattcttgaacatctttcaggtcaccggtactgctcataaatggctctcggccttggtcgaggatgaaatcgatggtgttgggaacactagcaacagtatgaaaaagctacgattcagtcggcgcatgaaatcgaacgagtcttcgcaatctgctagcgaaagagagcaaatcgttcgtgacatgagcaagagtctcacaggcgaagccaatttgctttttcgtggaaataccctcctcacccaagcgctcgaattccacatgcggcgtttaggaaaagagtatttggaggatatcctgggtgagaagattaacgagatcaacgagatcaatcctgactgcgaggtcgacccttctaggatcgagagggaggaagatctacaccagcactggagtctactaatacggttcacgacggaattatgggagatcatttctttctctgtcaataagttacccatggagcttcgcagtattctcaagtacgttcgggcagtagccgaagatcgttacggcgatttccttcgaactgtgaactatacaagcgtttcgggattcttattccttcgattcatttgcccagccatcctaaatcccaaactctttggacttcttcgagactacccgcgaccacgggctcagaggaccctgacgctcatcgcaaagggacttcaagcgctcgccaacatatcacagtttggcaagaaagagtcttggatggaaccgatgaacaagtttctgggtgtttacaggcaatcattccggaactatatcgatcaggtatgcgcgatacctgcaaactcggatcagatcccccatattgtgcctgcgtcctatacaaccccgattatgatcctgggacgcatgacgccggaggctcgagaaggatttccgtcgcttccgtatctgattgaccaccaaagaacctttgctgcacttgtccgattatggctcgattctcaccacgcacacgccgccgaatcagtaaccttcacgggagagctcggccagttccacgctatctgtgtgcagctacaagaacggtcggatgaatgtctggctcaattgcaagtggcccgagatgcagagaatgagtctgtcgccacggacgacctggctgatagtctggaaagggcctccttgttagagtccctcagcccaagctacgcaagcagtgcggtgtggatggagaacgatccgtataaaccaccaggctcgtcggaaagtgatacggaagctactgacacagcgcctcgtcgccattatgcccgagaccaaggccccctccgtggtatcgccgacggcctggagaccatccgggtgaagaataggaacggcaaagagtctcgcggattcctcagcggcctgatcgggagggataagagaagcaaagagaatgcgcacttgtctatcgggtcgatgggacgggtcaagagcagaggcaaagaagagaaaggcaatcgtggtcttctcggaaagaatttttcggatttgtgggatcagaacaacgacaccggctcgaggcactag

SEQ ID NO: 23127 - protein, 1055 aa, Muscodor strobelii
  misc_feature: SGI Peptide ID NO. 567864
  misc_feature (561)..(775): Pfam Id: PF00616 Pfam Desc: GTPase-activator protein for Ras-like GTPase
  misc_feature (39)..(952): NCBI GI: 70992527 Blast Desc: GTPase activating protein (BUD2/CLA2) [Aspergillus fumigatus Af293] gi|66848745|gb|EAL89074.1| GTPase activating protein (BUD2/CLA2), [Aspergillus fumigatus Af293]
  misc_feature (39)..(952): NCBI GI: 119472588 Blast Desc: GTPase activating protein (BUD2/CLA2), [Neosartorya fischeri NRRL 181] gi|119406529|gb|EAW16480.1| GTPase activating protein (BUD2/CLA2), [Neosartorya fischeri NRRL 181]
  misc_feature (43)..(928): NCBI GI: 67526555 Blast Desc: AN3735.2 [Aspergillus nidulans FGSC A4] gi|40740753|gb|EAA59943.1| AN3735.2 [Aspergillus nidulans FGSC A4] gi|259481719|tpe|CBF75503.1| TPA: GTPase activating protein
  misc_feature (38)..(938): NCBI GI: 240280626 Blast Desc: GTPase activating protein [Ajellomyces capsulatus H143]
  misc_feature (10)..(940): NCBI GI: 115389914 Blast Desc: conserved [Aspergillus terreus NIH2624] gi|114194858|gb|EAU36558.1| conserved [Aspergillus terreus NIH2624]
  misc_feature (38)..(938): NCBI GI: 225560829 Blast Desc: GTPase activating protein [Ajellomyces capsulatus G186AR]
  misc_feature (43)..(934): NCBI GI: 169764421 Blast Desc: [Aspergillus oryzae RIB40] gi|83764536|dbj|BAE54680.1| protein product [Aspergillus oryzae]
  misc_feature (43)..(934): NCBI GI: 238504332 Blast Desc: GTPase activating protein (BUD2/CLA2), [Aspergillus flavus NRRL3357] gi|220690868|gb|EED47217.1| GTPase activating protein (BUD2/CLA2), [Aspergillus flavus NRRL3357]
  misc_feature (33)..(924): NCBI GI: 255947354 Blast Desc: Pc22g04050 [Penicillium chrysogenum Wisconsin 54-1255] gi|211591461|emb|CAP97693.1| Pc22g04050 [Penicillium chrysogenum Wisconsin 54-1255]
  misc_feature (38)..(938): NCBI GI: 261203803 Blast Desc: GTPase activating protein [Ajellomyces dermatitidis SLH14081] gi|239586900|gb|EEQ69543.1| GTPase activating protein [Ajellomyces dermatitidis SLH14081] gi|239608867|gb|EEQ85854.1|
MSKKEKKPSTRRLVKRGSSRPTSPPASPPPSVDSLPLPIPTADANRMLSLMKRLHGRMKGKVEYQTEPGTPWHSGICYIEEDKGSLIFDPGHHDLFHVTLIADLRGCRVLPCKSPEANTMCLELNSAKMGIELLLHPLNPEEFELWLASLLCWQQLRPPGVRLAGNNKAPSSPGPDRPETRRRGSSAAASCSKDPAIIKVGNVMLWDKGAATSPRAIVKRPSTRDLRSPGTSWRRVSCILQDNGEFKLMNENDVTVLSVIDLSQLSRSAVQKLDRSVLDDDYCIAVFPIYSSTSRQLSIFRPVYLALDSRVLFEVWFVLLRAFTVPELYGLSSSTKQITEVHRPGAEFDGDLFRVEKSIQVRVIEAKVQKPVSSKDHYGHNERDPLVGNYFAEVILDGETRSRTAPQENTKNPFWRDTAQFSDLPAALPTLTVVLKKLEGNIDNYGRSMRSLRLPHQNNLSEVMCGVVEVPLDKAEKGKDTEEWFDAYDEKQECMGSMLIRLEYDEMVVLANQDYKSLSDLLHQFGSGLTSQITQSAPGMMRRLSEIFLNIFQVTGTAHKWLSALVEDEIDGVGNTSNSMKKLRFSRRMKSNESSQSASEREQIVRDMSKSLTGEANLLFRGNTLLTQALEFHMRRLGKEYLEDILGEKINEINEINPDCEVDPSRIEREEDLHQHWSLLIRFTTELWEIISFSVNKLPMELRSILKYVRAVAEDRYGDFLRTVNYTSVSGFLFLRFICPAILNPKLFGLLRDYPRPRAQRTLTLIAKGLQALANISQFGKKESWMEPMNKFLGVYRQSFRNYIDQVCAIPANSDQIPHIVPASYTTPIMILGRMTPEAREGFPSLPYLIDHQRTFAALVRLWLDSHHAHAAESVTFTGELGQFHAICVQLQERSDECLAQLQVARDAENESVATDDLADSLERASLLESLSPSYASSAVWMENDPYKPPGSSESDTEATDTAPRRHYARDQGPLRGIADGLETIRVKNRNGKESRGFLSGLIGRDKRSKENAHLSIGSMGRVKSRGKEEKGNRGLLGKNFSDLWDQNNDTGSRH

SEQ ID NO: 23128 - DNA, 4481 bp, Muscodor strobelii
  misc_feature: SGI EST ID NO. CUFF.54457.0
  misc_feature: Variant of the nucleotide sequence at SEQ ID NO 23126
cccgccccagcgcgcatcgctgaggccacgcacgcacacggtcgacggagccctcactctccggctgccatccaccaccgcagctgcctcgccagacactcgacatcgagtagaatcgttttcgtcgtcgtctggctcccagccccaggctgataacgatgctcgttctccgccctcggccgcagaaacacccacatacggctcgatagccccagcacggcagcccgaccagaggggctctaccatgtccaaaaaggagaagaaacctagtactaggcgcctggtcaaaaggggttcttctcgtccaacatcaccacccgcctctccgcctccctcggtcgattcactacccctccctatccccacggcagatgcgaacagaatgctttcgctgatgaagagattgcatggccgcatgaagggcaaagtcgagtatcagaccgagcccggtacaccgtggcatagcgggatctgctatatagaagaagacaaaggaagtctaatatttgaccctggccaccatgacctcttccatgttactctcattgcagacctgcgcggatgccgagtcctgccatgcaagtcaccggaagccaatacaatgtgcttggaactaaatagtgccaagatgggcattgagcttctccttcatccccttaaccccgaagaattcgaactatggcttgccagcttactctgctggcaacagttaaggcctccaggagtcagattggcaggcaataataaggcacccagctctcctggacctgaccgacctgagacaaggaggagaggctcgtctgcagctgcttcctgctcgaaagaccctgccatcatcaaggtcggaaacgtcatgctatgggataaaggggccgcaacatccccacgggccatcgtgaaacgtccatctactcgggatctccgctcgcccggtacttcctggaggagagtttcttgtattctccaggataatggcgaattcaagctcatgaacgagaacgacgtgacggtgctctcggtcattgatctctcccagctgtcacgctcagcagtgcagaaattggatagatctgtcttggacgatgactattgcattgctgttttccctatatattcatccacgtcccgacagctttcgatttttcgacccgtatatctcgccctggattcgagagtcctttttgaggtctggttcgtcttactacgcgcattcactgttccagaattatacggcctgtcctcttccacgaagcaaattaccgaagtgcatcgcccgggtgctgaattcgatggggacttgtttcgagtagaaaagtctatccaagttagggtcattgaagcaaaagtacagaagcctgtgtcgtcgaaagaccactatggccacaatgagcgggatccacttgtcggtaattattttgcagaagttatactcgacggtgaaactcggtcaagaacagcccctcaggaaaatacgaagaaccctttttggcgcgacacggctcagttttcggatcttcctgccgcgcttcccactttgacagtcgtcttaaagaagcttgagggaaatatagacaactatggccgctcgatgcgatctttacggcttccccaccagaacaatctttctgaagtcatgtgtggagtcgtcgaggtgccgttagataaagccgagaaaggcaaggacactgaagaatggttcgatgcatacgacgagaaacaagaatgcatgggaagcatgctcataagactcgagtatgacgagatggtcgttctagcgaatcaggattacaagtctctttccgacttattacatcaattcggctctgggctcaccagccagatcacacagtcggccccaggcatgatgaggcggctatccgaaatattcttgaacatctttcaggtcaccggtactgctcataaatggctctcggccttggtcgaggatgaaatcgatggtgttgggaacactagcaacagtatgaaaaagctacgattcagtcggcgcatgaaatcgaacgagtcttcgcaatctgctagcgaaagagagcaaatcgttcgtgacatgagcaagagtctcacaggcgaagccaatttgctttttcgtggaaataccctcctcacccaagcgctcgaattccacatgcggcgtttaggaaaagagtatttggaggatatcctgggtgagaagattaacgagatcaacgagatcaatcctgactgcgaggtcgacccttctaggatcgagagggaggaagatctacaccagcactggagtctactaatacggttcacgacggaattatgggagatcatttctttctctgtcaataagttacccatggagcttcgcagtattctcaagtacgttcgggcagtagccgaagatcgttacggcgatttccttcgaactgtgaactatacaagcgtttcgggattcttattccttcgattcatttgcccagccatcctaaatcccaaactctttggacttcttcgagactacccgcgaccacgggctcagaggaccctgacgctcatcgcaaagggacttcaagcgctcgccaacatatcacagtttggcaagaaagagtcttggatggaaccgatgaacaagtttctgggtgtttacaggcaatcattccggaactatatcgatcaggtatgcgcgatacctgcaaactcggatcagatcccccatattgtgcctgcgtcctatacaaccccgattatgatcctgggacgcatgacgccggaggctcgagaaggatttccgtcgcttccgtatctgattgaccaccaaagaacctttgctgcacttgtccgattatggctcgattctcaccacgcacacgccgccgaatcagtaaccttcacgggagagctcggccagttccacgctatctgtgtgcagctacaagaacggtcggatgaatgtctggctcaattgcaagtggcccgagatgcagagaatgagtctgtcgccacggacgacctggctgatagtctggaaagggcctccttgttagagtccctcagcccaagctacgcaagcagtgcggtgtggatggagaacgatccgtataaaccaccaggctcgtcggaaagtgatacggaagctactgacacagcgcctcgtcgccattatgcccgagaccaaggccccctccgtggtatcgccgacggcctggagaccatccgggtgaagaataggaacggcaaagagtctcgcggattcctcagcggcctgatcgggagggataagagaagcaaagagaatgcgcacttgtctatcgggtcgatgggacgggtcaagagcagaggcaaagaagagaaaggcaatcgtggtcttctcggaaagaatttttcggatttgtgggatcagaacaacgacaccggctcgaggcactagtggtgcttccgacggtcagctactgtatcaaactacgaacaattgatcgactctgggaacacgtccgatatcactcctgccgcggatcctcctccacggtcgaaattgaggaaatcagctactgcagcgaattacgaacagatggtcggatccggatttcaccgatcggctactgtggcaaactacgatcaactgatggggtctggacattcgtctgatttcatcccgcctgtagagcgtccgaggccgaggtcgaggctgaggaaacatcgtccttctccacacagagaaccgagcgatctgacggtgctgaatgagaaacaaaggaatgggtagaaacctagaatgcgcctgaggaggattatacgtcacccacggtctatatatcatagacgacgaaggacgcaatgaagaaagcacaacgcgaaccccctaatacctaagccgagtacattgcgtcggaaatacagtctataaaatgagacgaaacgaaatgggccattgtgatgggatcagaggagaggcctaaagtccaaaatttttctccttgtgttattatccacaaaatttactagtgttctgtttctgttggttcggattatgtcgagcaaagcgttcatccctcctattttgatgattgggccgttattagatgactgaacgaaacgccatgccatgactaggtggagttggtgcgagataccaatggaaatgggctcatttcgggctcaatggtttcaagactcatttttgttgtttgaagaggatgtgttaggatattgctatgcgtggatagagagttgggaatgaggggaggggaaaggaagagaggacagaggaggagctggggtgcagggggtagggggcgggtttaaagagtaaaaatgaagcgaatcaaagattataatgtggatttttgtcttctgtgagatgaagtgagaatgacgtgaatacctacatgtagatatagtagggatgccagtggaatcagcgctgagaccggtactgtgagtctgctgacccctgtcagatagtgtgtgagctgtttatccagtcaattagagcatcg

SEQ ID NO: 23129 - DNA, 611 bp, Muscodor strobelii
  misc_feature: SGI cDNA ID NO. 567865
  misc_feature: Encodes the peptide sequence at SEQ ID NO 23130
atgccgcccaaagacgaccaatccctgacacacgacctgctgcgtcgtgcacacagtcccgacagcacgaaccgcatctacaccgagaagatacagtaccgcccgctgctcctcaaacccagctcacccccaccatccaacgctcgagatgcgcgccgcaaagcacgacaggagaagaacaagcgtgccaaagccctaaagcctaagcccttgtcttcgagacaaagacgcactcttggcctccatgacttgccaaaagatggcgctaaatacgagacattcgtcccgctgaataacctctggctcgggtacatccgtgaaatcctcggtgctagtctatataccggcgggccgggatcagccgcagtgctcgcatctgccgatttccacggtgctgatgttgaagtctctcggagtcactgcccaagccgtgtcggtgtgcgtggcatcgtcatcaaggactcgcgcttcacgttccaggtcgtcacccccaaacatcagatcaagactcttcccaaggagggtactacctttcgcgtcagagtttcacctgccgatgcaaagcctggagatgagccctttatgtttgagattctcggcgaccagtttca

SEQ ID NO: 23130 - protein, 203 aa, Muscodor strobelii
  misc_feature: SGI Peptide ID NO. 567865
  misc_feature (7)..(203): NCBI GI: 256725605 Blast Desc: NECHADRAFT_61833 [Nectria haematococca mpVI 77-13-4]
  misc_feature (1)..(203): NCBI GI: 261359833 Blast Desc: ribonuclease P protein subunit p29 [Verticillium albo-atrum VaMs.102]
  misc_feature (7)..(203): NCBI GI: 46116686 Blast Desc: FG04185.1 [Gibberella zeae PH-1]
  misc_feature (6)..(203): NCBI GI: 85105422 Blast Desc: NCU08660 [Neurospora crassa OR74A] gi|28923549|gb|EAA32725.1| [Neurospora crassa OR74A]
  misc_feature (7)..(203): NCBI GI: 39953193 Blast Desc: MGG_01893 [Magnaporthe grisea 70-15] gi|145020237|gb|EDK04366.1| MGG_01893 [Magnaporthe grisea 70-15]
  misc_feature (4)..(203): NCBI GI: 171688280 Blast Desc: protein product [Podospora anserina] gi|170944102|emb|CAP70212.1| protein product [Podospora anserina]
  misc_feature (6)..(203): NCBI GI: 116196800 Blast Desc: CHGG_04998 [Chaetomium globosum CBS 148.51] gi|88180911|gb|EAQ88379.1| CHGG_04998 [Chaetomium globosum CBS 148.51]
  misc_feature (6)..(203): NCBI GI: 156049279 Blast Desc: SS1G_08346 [Sclerotinia sclerotiorum 1980] gi|154692745|gb|EDN92483.1| SS1G_08346 [Sclerotinia sclerotiorum 1980]
  misc_feature (1)..(203): NCBI GI: 115401430 Blast Desc: conserved [Aspergillus terreus NIH2624] gi|114190244|gb|EAU31944.1| conserved [Aspergillus terreus NIH2624]
  misc_feature (11)..(203): NCBI GI: 240106043 Blast Desc: CPC735_056060 [Coccidioides posadasii C735 delta SOWgp]
  misc_feature (71)..(182): SWISSPROT Homolog: EC 3.1.26.5 Ribonuclease P
MPPKDDQSLTHDLLRRAHSPDSTNRIYTEKIQYRPLLLKPSSPPPSNARDARRKARQEKNKRAKALKPKPLSSRQRRTLGLHDLPKDGAKYETFVPLNNLWLGYIREILGASLYTGGPGSAAVLASADFHGADVEVSRSHCPSRVGVRGIVIKDSRFTFQVVTPKHQIKTLPKEGTTFRVRVSPADAKPGDEPFMFEILGDQF

SEQ ID NO: 23131 - DNA, 892 bp, Muscodor strobelii
  misc_feature: SGI EST ID NO. CUFF.54460.0
  misc_feature: Variant of the nucleotide sequence at SEQ ID NO 23129
ggggaggggaacatgtgaagtggtcaccccaagcgttccttatggcatcaccaacgatgcccgcaagctaccctgtaatctaagacaattagtgccatcaccagtgggtagtgcgacgccagacctccaattccccacacaagtgagtgggctgacctgcatagcgcatttcgtcacgagcgaaatattgtttcaactccgaaactttctggtcatagacaacaccttctctaagcataactacctagagcgctatgtcctgtagcatctgcccaacgataagatgccgcccaaagacgaccaatccctgacacacgacctgctgcgtcgtgcacacagtcccgacagcacgaaccgcatctacaccgagaagatacagtaccgcccgctgctcctcaaacccagctcacccccaccatccaacgctcgagatgcgcgccgcaaagcacgacaggagaagaacaagcgtgccaaagccctaaagcctaagcccttgtcttcgagacaaagacgcactcttggcctccatgacttgccaaaagatggcgctaaatacgagacattcgtcccgctgaataacctctggctcgggtacatccgtgaaatcctcggtgctagtctatataccggcgggccgggatcagccgcagtgctcgcatctgccgatttccacggtgctgatgttgaagtctctcggagtcactgcccaagccgtgtcggtgtgcgtggcatcgtcatcaaggactcgcgcttcacgttccaggtcgtcacccccaaacatcagatcaagactcttcccaaggagggtactacctttcgcgtcagagtttcacctgccgatgcaaagcctggagatgagccctttatgtttgagattctcggcgaccagttt

SEQ ID NO: 23132 - DNA, 2478 bp, Muscodor strobelii
  misc_feature: SGI cDNA ID NO. 567866
  misc_feature: Encodes the peptide sequence at SEQ ID NO 23133
atgtctcaagacgacgatgactcgactcgggactccgctcccgatctccagatacttggagattcaataacactccaacctcgtagctacgtcgagacgcgccggcccgacgaccatgaagaagccctcatgcataacatggccaggttccggtctgagcccctacaattcctgcgcgaagtctccctctacgtctccgggacaggctggcgcgcctacgataacttcatcggccgccccatcttctactctggtttctccgagcagatgcgcaatgccgttgtctctgcgccgttactacgaacacgaatatccgagctggcagataggcgtctcgaaatcgaggagaaggagggttggctaaaaccagatgataaagactatgctacgaaaaaggcgcacagaagagtggtcatcgagggtggaatacgggaggtcgccgagaagatgacggatgacatgatttgcaagtttgagagcaagcatttcattagaggcgcatattatctcgtcacccaattgttgacacgggcatatcatcaaggcatccatgtctcgagcgaagaggttttgcgcctgaggaaggtagccgaagacgcccagaggaagagacagagcctgatatttctaccatcacaccgatcccacgtcgattacgtctccatgcagttaatatgttaccgtctgggactggctctccctgttgtcgtagcgggtgataacttgaacttccccgtcgttggcagcttcttacaacacgccggagccatgtggattcggaggtcctttggcaatgacaccttgtaccaaactcttgtacaggcatacatagacaccatgctccagggcggatacaatttcgaatgttttatagaaggtgggcgctcacgtacgggcaagctattgccaccaaagttcggcatcctgagttttgtgctcgatagtctgttgtctgggcgcgtggaagatgccatcatctgcccagtcagtacgcagtacgacaaggtcatcgagaccgaaggctatgttacggaactcttgggtgtgccgaagaagaaggagaatctcgcggattttctcagcggtggctcatctatcttgtcgcttaagttggggcgggtcgatgttcgatttcacgagccatggagtcttcgcaagtacattgacgagcaattgacaaaactaagcaaagctcctggggagttggatataagtctgaagacaccagagaattctgttctcaaacagaaattattaaggaccatgggatataaggttctatcggatatcaacgacgtatcggtcgtcatgccgacagcgctgattggaacagtgttacttactctgagaggtcgtggtgtaggcaagacggaactgctgcgacgtatcgaatggctcacagcgcgagtgagagcgaagggcggtcgtgtcgcgcactttggtaactcacccctcgttgacgtcgtccagcgcggtttggacgttctcggcaaagatttggtcggcgttgtccaagggctagcggaaccgacgtactatgctgtggaccgattccagctttccttctaccgcaacatgacgattcatctcttcatatctgaagccctcgtcagtgccagtatgtacacgagagtaaaacaaggaggtggaccggcaaatcaggaaatatcatatttggtactgcgcgaacaggtattgttcttgtcctcgcttttccgcggggaatttatcttccccagtgaaggcctggaggcaaacttggagaagaccttaattggtcttgaggttgatcgtgtgatcaatctaaagagggacgacaacggcataattaccgctgttgggctttctgatgaagagcgccttgcgggcagagaaaattacgatttctactgctttttgatctggccattcattgaggcgagttggcttgctgctacaagtttaatgggtctcacgccaccattagagcagaaagaggacctctggattgaagccgctaaggcacagaatatggcccaattgttcggcaagacattataccaccaaggtgatctgagctacttcgaggcagtgaacaaagagacactcaagaattcctaccagcgcttcgaagaagagggaatcatttacgccgtcaagtcaaaagactccaaaactcctcctcgactacggctctcctctgaatggcgacctacccgcgacccgaatacagggacactagtagcgcaaggcaaattgtgggatttcatcgagaggattgcaaggagcaggagagagggcaagaataggcgtgatggtgcaacagttagtacacgtgtgctaagactgattgatacactgggaggcagattattcgatgaggcggctggcgcgggtaagggtgatagtaaattgagtgatgaggagactgttagtcttaagaagactgtcaaacaggagagacggaggcggaaattggaaggccgggcgcatttgtaa

SEQ ID NO: 23133 - protein, 825 aa, Muscodor strobelii
  misc_feature: SGI Peptide ID NO. 567866
  misc_feature (192)..(332): Pfam Id: PF01553 Pfam Desc: Acyltransferase
  misc_feature (5)..(825): NCBI GI: 261359834 Blast Desc: glycerol-3-phosphate acyltransferase [Verticillium albo-atrum VaMs.102]
  misc_feature (5)..(825): NCBI GI: 46116688 Blast Desc: FG04186.1 [Gibberella zeae PH-1]
  misc_feature (4)..(825): NCBI GI: 145613095 Blast Desc: MGG_01894 [Magnaporthe grisea 70-15] gi|145020236|gb|EDK04365.1| MGG_01894 [Magnaporthe grisea 70-15]
  misc_feature (7)..(825): NCBI GI: 116196798 Blast Desc: CHGG_04997 [Chaetomium globosum CBS 148.51] gi|88180910|gb|EAQ88378.1| CHGG_04997 [Chaetomium globosum CBS 148.51]
  misc_feature (4)..(825): NCBI GI: 164426383 Blast Desc: NCU11282 [Neurospora crassa OR74A] gi|157071314|gb|EDO65235.1| NCU11282 [Neurospora crassa OR74A]
  misc_feature (1)..(825): NCBI GI: 256726017 Blast Desc: [Nectria haematococca mpVI 77-13-4]
  misc_feature (12)..(816): NCBI GI: 238495983 Blast Desc: acyltransferase, [Aspergillus flavus NRRL3357] gi|220694107|gb|EED50451.1| acyltransferase, [Aspergillus flavus NRRL3357]
  misc_feature (12)..(799): NCBI GI: 212529776 Blast Desc: acyltransferase, [Penicillium marneffei ATCC 18224] gi|210074443|gb|EEA28530.1| acyltransferase, [Penicillium marneffei ATCC 18224]
  misc_feature (5)..(795): NCBI GI: 121713572 Blast Desc: acyltransferase, [Aspergillus clavatus NRRL 1] gi|119402550|gb|EAW12971.1| acyltransferase, [Aspergillus clavatus NRRL 1]
  misc_feature (2)..(814): NCBI GI: 242762287 Blast Desc: acyltransferase, [Talaromyces stipitatus ATCC 10500] gi|218723541|gb|EED22958.1| acyltransferase, [Talaromyces stipitatus ATCC 10500]
  misc_feature (160)..(709): SWISSPROT Homolog: EC 2.3.1.15 Glycerol-3-phosphate O-acyltransferase
MSQDDDDSTRDSAPDLQILGDSITLQPRSYVETRRPDDHEEALMHNMARFRSEPLQFLREVSLYVSGTGWRAYDNFIGRPIFYSGFSEQMRNAVVSAPLLRTRISELADRRLEIEEKEGWLKPDDKDYATKKAHRRVVIEGGIREVAEKMTDDMICKFESKHFIRGAYYLVTQLLTRAYHQGIHVSSEEVLRLRKVAEDAQRKRQSLIFLPSHRSHVDYVSMQLICYRLGLALPVVVAGDNLNFPVVGSFLQHAGAMWIRRSFGNDTLYQTLVQAYIDTMLQGGYNFECFIEGGRSRTGKLLPPKFGILSFVLDSLLSGRVEDAIICPVSTQYDKVIETEGYVTELLGVPKKKENLADFLSGGSSILSLKLGRVDVRFHEPWSLRKYIDEQLTKLSKAPGELDISLKTPENSVLKQKLLRTMGYKVLSDINDVSVVMPTALIGTVLLTLRGRGVGKTELLRRIEWLTARVRAKGGRVAHFGNSPLVDVVQRGLDVLGKDLVGVVQGLAEPTYYAVDRFQLSFYRNMTIHLFISEALVSASMYTRVKQGGGPANQEISYLVLREQVLFLSSLFRGEFIFPSEGLEANLEKTLIGLEVDRVINLKRDDNGIITAVGLSDEERLAGRENYDFYCFLIWPFIEASWLAATSLMGLTPPLEQKEDLWIEAAKAQNMAQLFGKTLYHQGDLSYFEAVNKETLKNSYQRFEEEGIIYAVKSKDSKTPPRLRLSSEWRPTRDPNTGTLVAQGKLWDFIERIARSRREGKNRRDGATVSTRVLRLIDTLGGRLFDEAAGAGKGDSKLSDEETVSLKKTVKQERRRRKLEGRAHL

SEQ ID NO: 23134 - DNA, 2844 bp, Muscodor strobelii
  misc_feature: SGI EST ID NO. CUFF.54463.0
  misc_feature: Variant of the nucleotide sequence at SEQ ID NO 23132
ttacgatttcccattccaatgaacagtctatccccacgctccattccgtaaaacagtccatcgttacaactacatcgctctctaatagtcctgcactaactacgcaacggccttgtcgtagtcgaatgctgcccggccatgtggcccaaccgtagaaaattggaggaaatcgttgaatttctgtgataaccatagccatgtctcaagacgacgatgactcgactcgggactccgctcccgatctccagatacttggagattcaataacactccaacctcgtagctacgtcgagacgcgccggcccgacgaccatgaagaagccctcatgcataacatggccaggttccggtctgagcccctacaattcctgcgcgaagtctccctctacgtctccgggacaggctggcgcgcctacgataacttcatcggccgccccatcttctactctggtttctccgagcagatgcgcaatgccgttgtctctgcgccgttactacgaacacgaatatccgagctggcagataggcgtctcgaaatcgaggagaaggagggttggctaaaaccagatgataaagactatgctacgaaaaaggcgcacagaagagtggtcatcgagggtggaatacgggaggtcgccgagaagatgacggatgacatgatttgcaagtttgagagcaagcatttcattagaggcgcatattatctcgtcacccaattgttgacacgggcatatcatcaaggcatccatgtctcgagcgaagaggttttgcgcctgaggaaggtagccgaagacgcccagaggaagagacagagcctgatatttctaccatcacaccgatcccacgtcgattacgtctccatgcagttaatatgttaccgtctgggactggctctccctgttgtcgtagcgggtgataacttgaacttccccgtcgttggcagcttcttacaacacgccggagccatgtggattcggaggtcctttggcaatgacaccttgtaccaaactcttgtacaggcatacatagacaccatgctccagggcggatacaatttcgaatgttttatagaaggtgggcgctcacgtacgggcaagctattgccaccaaagttcggcatcctgagttttgtgctcgatagtctgttgtctgggcgcgtggaagatgccatcatctgcccagtcagtacgcagtacgacaaggtcatcgagaccgaaggctatgttacggaactcttgggtgtgccgaagaagaaggagaatctcgcggattttctcagcggtggctcatctatcttgtcgcttaagttggggcgggtcgatgttcgatttcacgagccatggagtcttcgcaagtacattgacgagcaattgacaaaactaagcaaagctcctggggagttggatataagtctgaagacaccagagaattctgttctcaaacagaaattattaaggaccatgggatataaggttctatcggatatcaacgacgtatcggtcgtcatgccgacagcgctgattggaacagtgttacttactctgagaggtcgtggtgtaggcaagacggaactgctgcgacgtatcgaatggctcacagcgcgagtgagagcgaagggcggtcgtgtcgcgcactttggtaactcacccctcgttgacgtcgtccagcgcggtttggacgttctcggcaaagatttggtcggcgttgtccaagggctagcggaaccgacgtactatgctgtggaccgattccagctttccttctaccgcaacatgacgattcatctcttcatatctgaagccctcgtcagtgccagtatgtacacgagagtaaaacaaggaggtggaccggcaaatcaggaaatatcatatttggtactgcgcgaacaggtattgttcttgtcctcgcttttccgcggggaatttatcttccccagtgaaggcctggaggcaaacttggagaagaccttaattggtcttgaggttgatcgtgtgatcaatctaaagagggacgacaacggcataattaccgctgttgggctttctgatgaagagcgccttgcgggcagagaaaattacgatttctactgctttttgatctggccattcattgaggcgagttggcttgctgctacaagtttaatgggtctcacgccaccattagagcagaaagaggacctctggattgaagccgctaaggcacagaatatggcccaattgttcggcaagacattataccaccaaggtgatctgagctacttcgaggcagtgaacaaagagacactcaagaattcctaccagcgcttcgaagaagagggaatcatttacgccgtcaagtcaaaagactccaaaactcctcctcgactacggctctcctctgaatggcgacctacccgcgacccgaatacagggacactagtagcgcaaggcaaattgtgggatttcatcgagaggattgcaaggagcaggagagagggcaagaataggcgtgatggtgcaacagttagtacacgtgtgctaagactgattgatacactgggaggcagattattcgatgaggcggctggcgcgggtaagggtgatagtaaattgagtgatgaggagactgttagtcttaagaagactgtcaaacaggagagacggaggcggaaattggaaggccgggcgcatttgtaaataggaagcgagctaaagttgacggcatcgaaccaattgtatatcaattgacagcatcgcatagaaatgatcaatcatatggcagcaatgatcatttgtcgaacactacatcgatggtaaagaagtcatgtttttatgatcagttgaccatgataaaatatcctcactg

SEQ ID NO: 23135 - DNA, 1749 bp, Muscodor strobelii
  misc_feature: SGI cDNA ID NO. 567867
  misc_feature: Encodes the peptide sequence at SEQ ID NO 23136
atgttcaccacggttcttctagtagccggatatctcctccaaagatgcgtcgcatctccaacctgtcccctggagggccctgtattcccgaagccacaacagctagccaaaggcgacgccatcaaatccgccgtagccaacctgacatcgacattcaaaaacatcaccgacagcgcaacagactactccttcgccctagaagtattctcagcgcacgatccatcagccatattctcaatctaccacaccgcgccctctttagccaacaaaagcacaacaggcgtcagaaccgtcgacgcgaacacggtgtttcgactaggcagtctgacgaaagtctacacgatttacacattcctcatcaacgccggagacaaactgtggaacgaaccaatcactaaatacgtctccgagctagcgaacttggccaatagatcggatgatgcggtgttaaacacggcttgggatcaggtgacgattggtgggctcgcgactcagatgactggtattccgagggattatgcgctccttggagagttgacgcagagtacggctacgagggataatgttgtggggtatgggtttccgcccctgagcaatgagcagaaaccgccttgtggggagtatcctacttgttcgagagagcagttcttcaagggcattgagaatttttatccctcgcttgcgccgatgactacgcctgcttattctaatgttgcttttcagcttttgggatacgcgcttgagacgattacaggcaagccgtttgagtcgcttctcaacgatacggtgttcgcgcctctgggcttgaataacacttttctgagagcaccggatcaagcacgtggtgtcatacctggagatcctgatgaaacgggttggacctttgatttgggagaatcggcagccgctggcaatatctacgcctcagtaggcgacatgtcgaacctcgggcgttcgatcctgaattacaagcttctcgatcccgtaacgacaagacgctggctcaagcccttttccttctccacagatccccatgcctctgtcggtgtgccgtggggagcaaggaggatcaacgtgaacggacaggcgtacagatggataaccgcatacaacaaggctggacgcatcagtgattacagttctgtgcttgcgattatacctgattacgatattgggatcgcggtcctacttgcggggaatttaccggccaatgctaactttggtcttctcgacacaatcggagaagtcctcatcccagcggtcgaagaagcagctcgcgccgagacaggatcaatctacagcgggcactacacgttcgtcaatacctcacagctcaactcctcgatgacaataaaaacagacgatcagccaggtcttagtgtctcgcaatggatcagtaatggaacggatttcgtgtacatttccacggtattgcaacaggagtactatccccttactcctagggtcagattatatccatctggacttgagagtactgctgcagacggcagtaggaaagtcgttttcaaggcagtgtttgaggatgctgatgcgccgagccatgccacaagcatgttttcgacggattgcgcgacgtggataaatgttgagagtgtcatttatggttcgagtgctatggatgagttgatgtatgttaatcttccatattatgcattcaaccttgactcaagcggcaaagtcatcagcgtcacgtcgccctcactacgagttactttaaacaaacagtaa

SEQ ID NO: 23136 - protein, 582 aa, Muscodor strobelii
  misc_feature: SGI Peptide ID NO. 567867
  misc_feature (64)..(418): Pfam Id: PF00144 Pfam Desc: Beta-lactamase
  misc_feature (96)..(418): Pfam Id: PF00144 Pfam Desc: Beta-lactamase
  misc_feature (3)..(581): NCBI GI: 116198601 Blast Desc: CHGG_07456 [Chaetomium globosum CBS 148.51] gi|88178735|gb|EAQ86203.1| CHGG_07456 [Chaetomium globosum CBS 148.51]
  misc_feature (1)..(581): NCBI GI: 145604126 Blast Desc: MGG_10744 [Magnaporthe grisea 70-15] gi|145012195|gb|EDJ96851.1| MGG_10744 [Magnaporthe grisea 70-15]
  misc_feature (2)..(581): NCBI GI: 164426216 Blast Desc: NCU01038 [Neurospora crassa OR74A] gi|16415969|emb|CAD01102.1| conserved [Neurospora crassa] gi|157071245|gb|EAA32414.2| [Neurospora crassa OR74A]
  misc_feature (18)..(581): NCBI GI: 164428737 Blast Desc: NCU00993 [Neurospora crassa OR74A] gi|157072259|gb|EAA34667.2| [Neurospora crassa OR74A]
  misc_feature (16)..(530): NCBI GI: 116182952 Blast Desc: CHGG_02104 [Chaetomium globosum CBS 148.51] gi|88186401|gb|EAQ93869.1| CHGG_02104 [Chaetomium globosum CBS 148.51]
  misc_feature (18)..(581): NCBI GI: 169615793 Blast Desc: SNOG_11060 [Phaeosphaeria nodorum SN15] gi|160703048|gb|EAT81559.2| SNOG_11060 [Phaeosphaeria nodorum SN15]
  misc_feature (7)..(580): NCBI GI: 145601307 Blast Desc: MGG_14134 [Magnaporthe grisea 70-15] gi|145009316|gb|EDJ94027.1| MGG_14134 [Magnaporthe grisea 70-15]
  misc_feature (22)..(581): NCBI GI: 242799287 Blast Desc: beta-lactamase, [Talaromyces stipitatus ATCC 10500] gi|218716692|gb|EED16113.1| beta-lactamase, [Talaromyces stipitatus ATCC 10500]
  misc_feature (11)..(581): NCBI GI: 169765968 Blast Desc: [Aspergillus oryzae RIB40] gi|83765310|dbj|BAE55453.1| protein product [Aspergillus oryzae]
  misc_feature (22)..(581): NCBI GI: 67904662 Blast Desc: AN9318.2 [Aspergillus nidulans FGSC A4] gi|40747229|gb|EAA66385.1| AN9318.2 [Aspergillus nidulans FGSC A4] gi|259488153|tpe|CBF87393.1| TPA: conserved [Aspergillus FGSC
MFTTVLLVAGYLLQRCVASPTCPLEGPVFPKPQQLAKGDAIKSAVANLTSTFKNITDSATDYSFALEVFSAHDPSAIFSIYHTAPSLANKSTTGVRTVDANTVFRLGSLTKVYTIYTFLINAGDKLWNEPITKYVSELANLANRSDDAVLNTAWDQVTIGGLATQMTGIPRDYALLGELTQSTATRDNVVGYGFPPLSNEQKPPCGEYPTCSREQFFKGIENFYPSLAPMTTPAYSNVAFQLLGYALETITGKPFESLLNDTVFAPLGLNNTFLRAPDQARGVIPGDPDETGWTFDLGESAAAGNIYASVGDMSNLGRSILNYKLLDPVTTRRWLKPFSFSTDPHASVGVPWGARRINVNGQAYRWITAYNKAGRISDYSSVLAIIPDYDIGIAVLLAGNLPANANFGLLDTIGEVLIPAVEEAARAETGSIYSGHYTFVNTSQLNSSMTIKTDDQPGLSVSQWISNGTDFVYISTVLQQEYYPLTPRVRLYPSGLESTAADGSRKVVFKAVFEDADAPSHATSMFSTDCATWINVESVIYGSSAMDELMYVNLPYYAFNLDSSGKVISVTSPSLRVTLNKQ

SEQ ID NO: 23137 - DNA, 495 bp, Muscodor strobelii
  misc_feature: SGI cDNA ID NO. 567868
  misc_feature: Encodes the peptide sequence at SEQ ID NO 23138
atgccattcctcaccacaccactcacaatatccgccagtctcagcatcgcagcatccttcatagcatccggaagcaacatagccctaacattcaacacaatcccggccatccttctcaccaacgcatcaacccccaaactcatagaagcatggtactaccaattcagccgcgcgctctacatcccattattcgcgaccgcagcggcttttaactatttctacctcacctacatccacaactctgaatcactagagtggcgcggctacgcggctggagcgttggcgaacttggcgatgcctgtgtttacacagatcgctatcatggggatcaataaaaggcttattgctgctatgagtggtgccgatgggaaaatgctggcggcgggtgaggcgagagagttgattggacggtggggaagattgaacttttggaggattcttatgccgcttgctggggctgggttggggatgtggaatttattggttcgagtgtga

SEQ ID NO: 23138 - protein, 164 aa, Muscodor strobelii
  misc_feature: SGI Peptide ID NO. 567868
  misc_feature (87)..(160): Pfam Id: PF08592 Pfam Desc: Domain of function (DUF1772)
  misc_feature (7)..(156): NCBI GI: 46109262 Blast Desc: FG01513.1 [Gibberella zeae PH-1]
  misc_feature (8)..(160): NCBI GI: 242820019 Blast Desc: conserved [Talaromyces stipitatus ATCC 10500] gi|218713897|gb|EED13321.1| conserved [Talaromyces stipitatus ATCC 10500]
  misc_feature (10)..(157): NCBI GI: 155382645 Blast Desc: [Mycosphaerella pini]
  misc_feature (33)..(157): NCBI GI: 197725398 Blast Desc: HypB2 [Aspergillus ochraceoroseus]
  misc_feature (23)..(152): NCBI GI: 256730794 Blast Desc: NECHADRAFT_89747 [Nectria haematococca mpVI 77-13-4]
  misc_feature (33)..(157): NCBI GI: 171693181 Blast Desc: protein product [Podospora anserina] gi|170946539|emb|CAP73340.1| protein product [Podospora anserina]
  misc_feature (62)..(158): NCBI GI: 212538915 Blast Desc: conserved [Penicillium marneffei ATCC 18224] gi|210069355|gb|EEA23446.1| conserved [Penicillium marneffei ATCC 18224]
  misc_feature (25)..(161): NCBI GI: 171695286 Blast Desc: protein product [Podospora anserina] gi|170947885|emb|CAP60049.1| protein product [Podospora anserina]
  misc_feature (4)..(156): NCBI GI: 119499640 Blast Desc: NFIA_101640 [Neosartorya fischeri NRRL 181] gi|119414742|gb|EAW24680.1| conserved [Neosartorya fischeri NRRL 181]
MPFLTTPLTISASLSIAASFIASGSNIALTFNTIPAILLTNASTPKLIEAWYYQFSRALYIPLFATAAAFNYFYLTYIHNSESLEWRGYAAGALANLAMPVFTQIAIMGINKRLIAAMSGADGKMLAAGEARELIGRWGRLNFWRILMPLAGAGLGMWNLLVRV

SEQ ID NO: 23139 - DNA, 3331 bp, Muscodor strobelii
  misc_feature: SGI EST ID NO. CUFF.54485.0
  misc_feature: Variant of the nucleotide sequence at SEQ ID NO 23137
actttaaacaaacagtaatatttggctccatccagcacattggaatgtacaattcgataccattccatcacctccggcctccgagagttgttcgtatgccgagtgcggcaccggaaaagagtggaccgcttcggcatcttagtacatattcggacaattgggtttgtccggcatcatcaaatataagaacgccatttcgaatcttgatatagagatcataatagtatcgcacctcttactctgctacagcatatatatacgcagatcgctcaaaacctcacacttgaaccattcgccgggaaatcaacatgccattcctcaccacaccactcacaatatccgccagtctcagcatcgcagcatccttcatagcatccggaagcaacatagccctaacattcaacacaatcccggccatccttctcaccaacgcatcaacccccaaactcatagaagcatggtactaccaattcagccgcgcgctctacatcccattattcgcgaccgcagcggcttttaactatttctacctcacctacatccacaactctgaatcactagagtggcgcggctacgcggctggagcgttggcgaacttggcgatgcctgtgtttacacagatcgctatcatggggatcaataaaaggcttattgctgctatgagtggtgccgatgggaaaatgctggcggcgggtgaggcgagagagttgattggacggtggggaagattgaacttttggaggattcttatgccgcttgctggggctgggttggggatgtggaatttattggttcgagtgtgagtgattgagggagctggttaagtgaattgtggtgtagttaagtgtttggtatggaaaggggctagagatgtggtattgtcgataaagggggtttgtacatgcgaaagtggtgatacaatccggatattgcgctcatatttggtttatcaatcggttaccagctcctctgatggtcttctcgccgtctcaagctagtgtaactggaagcaaacggtgcatataatgctggtctatttcatcttcgtggactctcttgcgtgctcattctgaggaaggcacacagataaccacactagaccagaaaagagacgcgagctcttctatcattcgaacaaataaatacttcagacgcccttctgtgggatacgacagccatttctagctcttctatcattggaccagaggtttttctttcttcaaggctttgacgaaaagtcccactcccccgcctctaacaaacgtttggcttcttcgtcctgtctacccgatgctagattcgggacgtctatggaacagacttcgtgttctctttatgatagactccttcttcggcgaaggtaaatccggcgggttcatcttggcggtgctttgcatattcgatatagggttctgctcatatcgaggtggggaattttgttgcttcccaggctgtgaagacttggcctttttcaacattagcaagtgtaccttctccagggatgcgctaagccgagccgagccgtttatgtgtaagtgcttagtgcgcagtacctcgattgtcatggcgagcatctcggggggcgagaatgaccctgtgctgaattctattggggtagagacatctgccccatgaatgacgaacaatctgagcaactcctccacagccgctgagtcggaagatgtgtttgtaaaatcttctcggacttgcgtatcaaagaggtacaggagcagtacccagatgctgaatccgctactaatagaagtctgaaattcagatgggacccagtcaactatgcgatttggttcggctccgtttccaagaagacaagcggccatcatgacgtccctttcggtgaacagcaaattgtccggcttttcaacaaccataactttatatactagaaactctagcaggaccgtggcgtcattctcggattgagaggtgagaccttcctgtggatcgatgccagagacgtcagcgaaccagaagctaataaatgacggaagcgagtaaagaacagcaacagaaaggaggccacgccttctttcgcgagtcttccaccgtatcataacatcatcggcaaacactgagcacagcggtctagataatttaatttccgtcctaacatccgagataaaacggtcctcgggatatggtattttgccgaccggcaatcctggaatattacctggatcatatccgatgagcatgagatcggaccagtgatcttcagttcctaacgcgcacgaacttcctgtccagaacccagggtcccaaccattggccaactgccaggaagattgcaggacacggtcatattctagcagatacttcggatccagagggcgttcttgcgcctctgcgaggccagctaagctgaaagctgacgcgaaacttccccaagcagggcctatagtgtgataactaatcgttgttcgttttgtgtccgatttggctaggagtatgtatgaccagaacagagatgcaaagggatcgaatgaggacgaacgcgtcagatcctccagtactctgtaggtaacactgtcattcaagaattcaaatgtagttttgtgaataaactcgacgtatccgtcgcacccaagcaattcagaggtgtgctgatgctttcgaacctcaaccataccgagacacctgctattaatcctggcctcgacccgtgaactcctcatagacattgacttagcagtgattgtcgcgatctcgtattccacaacggaatcccaattttctaatgcgaaagacagttgcagagtgcttaagggctcgaagaaagtatcgcctccaatgcgttgctggttgacgacgagtatctggaatatctcggcagcttgagcacgatatgcgacagggattctttccatcatgtgctgataaagatctcgaatatccgtggggagttcttcgagatgggccttaagttcgcttcctgtgtccccgtctctaaggccgactaggagcgactttgcgacaaggctcacccacagaaacacacccgatgacttgtcgacgatatcgtcgattataccaatccattcgatatcttccatggactgcagctgttctttcagtagatcttcagcgtaattccggatatcgtctttgttcagatcttggacacgcaggtgcggaaaacgcttgaacgcttgcgcgcacgcggtgattgacctactcgaaatcaggagcttgatcgatgggaatgtagtaactgtttgaagcagaatgtccaagagcggctcattgtcaccatcaaattcgtcgaatccgtccaatgcaatgcagatccggtgtgtcgacgtagtaacttcgg

SEQ ID NO: 23140 - DNA, 3147 bp, Muscodor strobelii
  misc_feature: SGI cDNA ID NO. 567869
  misc_feature: Elevated expression when VOC is produced
  misc_feature: Encodes the peptide sequence at SEQ ID NO 23141
atggaccctatcgcagcactaagtgttgcggccgctgctgtaggcttcttcgactgcgcgtacggattactgaaagattatgatgatattcgctccacgggagtgactctaacagtcgcatcctttgagaaatccgcaaatgatctgatggcttacagcatggccttgcaaagaaggcctgcgttctcaatcacatcagacgatcctctcatagagcatcaaaaggcactggatcgtgtactctgcgaggtcgcatcagttgcgaaggagttactaggagcaatcaattctctgaagccccaggcccagtctgccaaatggtctagttttctccaggcactcaagacgacttggaagaccaaagacctggaaaagctgagaacccagctcgaatcttgtcgcaccgatttgacgattcacatcctcgggtacctcaatgcaaagtccgacatctacgccgcgcagcagggccagcaactatcaaccatccagcagggtaaccacgagatccaagcagcatccggaatcgtcgaagcaatcttcactttcaaggacgggcagcaaaagtctctctccccccgcattgggtcctcccccgatcgtcgagactacgaacgtggcagcatcctgactatccaggctaagaccgatgatatagcggcaagctcccatttcgtcgagcttgggccggtccaaagaaagattctcgattgtctgcacttccgctatatacacgatcgattcagtgacatctcaccggcgcatgtgaaaacccttggttgggtatatgagcagccaaaggacgagggcccaccttggtcagacctcagcaaatggctagaggaagggaaccagtgctattggatcagcggaaaagcggcgtctgggaaatctaccttgatgaagttcatttacaccgactcgaggttctcgagtcgcttgcggcgatggtctggaaacctgccacttatcacagcatctttctttttctggttcctcggaacgtcattgcagaaatcgcaagttggtctgttccgagctcttctatatgaaattctctcgaagaggccagagttaatcccatccgtcatgccggagctctgtcgtgaagtatccaaactggaaccgaacgtcatcttgaccgatccgactctgacagaagtgacacggtggtttcggaaattggccgaagttactacgtcgacacaccggatctgcattgcattggacggattcgacgaatttgatggtgacaatgagccgctcttggacattctgcttcaaacagttactacattcccatcgatcaagctcctgatttcgagtaggtcaatcaccgcgtgcgcgcaagcgttcaagcgttttccgcacctgcgtgtccaagatctgaacaaagacgatatccggaattacgctgaagatctactgaaagaacagctgcagtccatggaagatatcgaatggattggtataatcgacgatatcgtcgacaagtcatcgggtgtgtttctgtgggtgagccttgtcgcaaagtcgctcctagtcggccttagagacggggacacaggaagcgaacttaaggcccatctcgaagaactccccacggatattcgagatctttatcagcacatgatggaaagaatccctgtcgcatatcgtgctcaagctgccgagatattccagatactcgtcgtcaaccagcaacgcattggaggcgatactttcttcgagcccttaagcactctgcaactgtctttcgcattagaaaattgggattccgttgtggaatacgagatcgcgacaatcactgctaagtcaatgtctatgaggagttcacgggtcgaggccaggattaatagcaggtgtctcggtatggttgaggttcgaaagcatcagcacacctctgaattgcttgggtgcgacggatacgtcgagtttattcacaaaactacatttgaattcttgaatgacagtgttacctacagagtactggaggatctgacgcgttcgtcctcattcgatccctttgcatctctgttctggtcatacatactcctagccaaatcggacacaaaacgaacaacgattagttatcacactataggccctgcttggggaagtttcgcgtcagctttcagcttagctggcctcgcagaggcgcaagaacgccctctggatccgaagtatctgctagaatatgaccgtgtcctgcaatcttcctggcagttggccaatggttgggaccctgggttctggacaggaagttcgtgcgcgttaggaactgaagatcactggtccgatctcatgctcatcggatatgatccaggtaatattccaggattgccggtcggcaaaataccatatcccgaggaccgttttatctcggatgttaggacggaaattaaattatctagaccgctgtgctcagtgtttgccgatgatgttatgatacggtggaagactcgcgaaagaaggcgtggcctcctttctgttgctgttctttactcgcttccgtcatttattagcttctggttcgctgacgtctctggcatcgatccacaggaaggtctcacctctcaatccgagaatgacgccacggtcctgctagagtttctagtatataaagttatggttgttgaaaagccggacaatttgctgttcaccgaaagggacgtcatgatggccgcttgtcttcttggaaacggagccgaaccaaatcgcatagttgactgggtcccatctgaatttcagacttctattagtagcggattcagcatctgggtactgctcctgtacctctttgatacgcaagtccgagaagattttacaaacacatcttccgactcagcggctgtggaggagttgctcagattgttcgtcattcatggggcagatgtctctaccccaatagaattcagcacagggtcattctcgccccccgagatgctcgccatgacaatcgaggccaagtcttcacagcctgggaagcaacaaaattccccacctcgatatgagcagaaccctatatcgaatatgcaaagcaccgccaagatgaacccgccggatttaccttcgccgaagaaggagtctatcataaagagaacacgaagtctgttccatagacgtcccgaatctagcatcgggtag

SEQ ID NO: 23141 - protein, 1048 aa, Muscodor strobelii
  misc_feature: SGI Peptide ID NO. 567869
  misc_feature (231)..(841): NCBI GI: 164425886 Blast Desc: NCU08565 [Neurospora crassa OR74A] gi|157071107|gb|EAA33591.2| [Neurospora crassa OR74A]
  misc_feature (1)..(767): NCBI GI: 226293863 Blast Desc: conserved [Paracoccidioides brasiliensis Pb18]
  misc_feature (1)..(786): NCBI GI: 256726514 Blast Desc: NECHADRAFT_79534 [Nectria haematococca mpVI 77-13-4]
  misc_feature (1)..(767): NCBI GI: 225684243 Blast Desc: conserved [Paracoccidioides brasiliensis Pb03]
  misc_feature (1)..(684): NCBI GI: 261190024 Blast Desc: conserved [Ajellomyces dermatitidis SLH14081] gi|239591250|gb|EEQ73831.1| conserved [Ajellomyces dermatitidis SLH14081]
  misc_feature (235)..(661): NCBI GI: 256722211 Blast Desc: NECHADRAFT_86865 [Nectria haematococca mpVI 77-13-4]
  misc_feature (235)..(715): NCBI GI: 46133835 Blast Desc: FG09057.1 [Gibberella zeae PH-1]
  misc_feature (204)..(657): NCBI GI: 9453820 Blast Desc: related to small s protein [Neurospora crassa]
  misc_feature (1)..(697): NCBI GI: 154293653 Blast Desc: BC1G_14084 [Botryotinia fuckeliana B05.10] gi|150845240|gb|EDN20433.1| BC1G_14084 [Botryotinia fuckeliana B05.10]
  misc_feature (232)..(562): NCBI GI: 116198607 Blast Desc: CHGG_07459 [Chaetomium globosum CBS 148.51] gi|88178738|gb|EAQ86206.1| CHGG_07459 [Chaetomium globosum CBS 148.51]
  misc_feature: Useful for introducing or modulating the production of volatile compounds
MDPIAALSVAAAAVGFFDCAYGLLKDYDDIRSTGVTLTVASFEKSANDLMAYSMALQRRPAFSITSDDPLIEHQKALDRVLCEVASVAKELLGAINSLKPQAQSAKWSSFLQALKTTWKTKDLEKLRTQLESCRTDLTIHILGYLNAKSDIYAAQQGQQLSTIQQGNHEIQAASGIVEAIFTFKDGQQKSLSPRIGSSPDRRDYERGSILTIQAKTDDIAASSHFVELGPVQRKILDCLHFRYIHDRFSDISPAHVKTLGWVYEQPKDEGPPWSDLSKWLEEGNQCYWISGKAASGKSTLMKFIYTDSRFSSRLRRWSGNLPLITASFFFWFLGTSLQKSQVGLFRALLYEILSKRPELIPSVMPELCREVSKLEPNVILTDPTLTEVTRWFRKLAEVTTSTHRICIALDGFDEFDGDNEPLLDILLQTVTTFPSIKLLISSRSITACAQAFKRFPHLRVQDLNKDDIRNYAEDLLKEQLQSMEDIEWIGIIDDIVDKSSGVFLWVSLVAKSLLVGLRDGDTGSELKAHLEELPTDIRDLYQHMMERIPVAYRAQAAEIFQILVVNQQRIGGDTFFEPLSTLQLSFALENWDSVVEYEIATITAKSMSMRSSRVEARINSRCLGMVEVRKHQHTSELLGCDGYVEFIHKTTFEFLNDSVTYRVLEDLTRSSSFDPFASLFWSYILLAKSDTKRTTISYHTIGPAWGSFASAFSLAGLAEAQERPLDPKYLLEYDRVLQSSWQLANGWDPGFWTGSSCALGTEDHWSDLMLIGYDPGNIPGLPVGKIPYPEDRFISDVRTEIKLSRPLCSVFADDVMIRWKTRERRRGLLSVAVLYSLPSFISFWFADVSGIDPQEGLTSQSENDATVLLEFLVYKVMVVEKPDNLLFTERDVMMAACLLGNGAEPNRIVDWVPSEFQTSISSGFSIWVLLLYLFDTQVREDFTNTSSDSAAVEELLRLFVIHGADVSTPIEFSTGSFSPPEMLAMTIEAKSSQPGKQQNSPPRYEQNPISNMQSTAKMNPPDLPSPKKESIIKRTRSLFHRRPESSIG

SEQ ID NO: 23142 - DNA, 4991 bp, Muscodor strobelii
  misc_feature: SGI EST ID NO. CUFF.54486.2
  misc_feature: Variant of the nucleotide sequence at SEQ ID NO 23140
cctggccgctctggacagagcactgccacacgctgtatggattgcagtatgccttcctgtcctgtaaagctcgttgggcagctaagaagcaatgacataccagacacgtaggcggctgtgtgcgcggttgaacacgtacttttcgaggccatggtttcaatttaatacagcgtaaatgacactcatacattagattattatgtctctatgtcttatttagggagtgctaatgatcgcacgagttgaatcgtgagctttgtggtaaaccacgattccgcttagaggctcacttaggaggttgtcatggaccctatcgcagcactaagtgttgcggccgctgctgtaggcttcttcgactgcgcgtacggattactgaaagattatgatgatattcgctccacgggagtgactctaacagtcgcatcctttgagaaatccgcaaatgatctgatggcttacagcatggccttgcaaagaaggcctgcgttctcaatcacatcagacgatcctctcatagagcatcaaaaggcactggatcgtgtactctgcgaggtcgcatcagttgcgaaggagttactaggagcaatcaattctctgaagccccaggcccagtctgccaaatggtctagttttctccaggcactcaagacgacttggaagaccaaagacctggaaaagctgagaacccagctcgaatcttgtcgcaccgatttgacgattcacatcctcgggtacctcaatgcaaagtccgacatctacgccgcgcagcagggccagcaactatcaaccatccagcagggtaaccacgagatcgttaatattctgactgtcatccacgcagatatattagaccgcttgtccaagcaagattcggacgtacagaggtgatttgacagtcatgatgttgttcaacagcaagcagcatccggaatcgtcgaagcaatcttcactttcaaggacgggcagcaaaagtctctctccccccgcattgggtcctcccccgatcgtcgagactacgaacgtggcagcatcctgactatccaggctaagaccgatgatatagcggcaagctcccatttcgtcgagcttgggccggtccaaagaaagattctcgattgtctgcacttccgctatatacacgatcgattcagtgacatctcaccggcgcatgtgaaaacccttggttgggtatatgagcagccaaaggacgagggcccaccttggtcagacctcagcaaatggctagaggaagggaaccagtgctattggatcagcggaaaagcggcgtctgggaaatctaccttgatgaagttcatttacaccgactcgaggttctcgagtcgcttgcggcgatggtctggaaacctgccacttatcacagcatctttctttttctggttcctcggaacgtcattgcagaaatcgcaagttggtctgttccgagctcttctatatgaaattctctcgaagaggccagagttaatcccatccgtcatgccggagctctgtcgtgaagtatccaaactggaaccgaacgtcatcttgaccgatccgactctgacagaagtgacacggtggtttcggaaattggccgaagttactacgtcgacacaccggatctgcattgcattggacggattcgacgaatttgatggtgacaatgagccgctcttggacattctgcttcaaacagttactacattcccatcgatcaagctcctgatttcgagtaggtcaatcaccgcgtgcgcgcaagcgttcaagcgttttccgcacctgcgtgtccaagatctgaacaaagacgatatccggaattacgctgaagatctactgaaagaacagctgcagtccatggaagatatcgaatggattggtataatcgacgatatcgtcgacaagtcatcgggtgtgtttctgtgggtgagccttgtcgcaaagtcgctcctagtcggccttagagacggggacacaggaagcgaacttaaggcccatctcgaagaactccccacggatattcgagatctttatcagcacatgatggaaagaatccctgtcgcatatcgtgctcaagctgccgagatattccagatactcgtcgtcaaccagcaacgcattggaggcgatactttcttcgagcccttaagcactctgcaactgtctttcgcattagaaaattgggattccgttgtggaatacgagatcgcgacaatcactgctaagtcaatgtctatgaggagttcacgggtcgaggccaggattaatagcaggtgtctcggtatggttgaggttcgaaagcatcagcacacctctgaattgcttgggtgcgacggatacgtcgagtttattcacaaaactacatttgaattcttgaatgacagtgttacctacagagtactggaggatctgacgcgttcgtcctcattcgatccctttgcatctctgttctggtcatacatactcctagccaaatcggacacaaaacgaacaacgattagttatcacactataggccctgcttggggaagtttcgcgtcagctttcagcttagctggcctcgcagaggcgcaagaacgccctctggatccgaagtatctgctagaatatgaccgtgtcctgcaatcttcctggcagttggccaatggttgggaccctgggttctggacaggaagttcgtgcgcgttaggaactgaagatcactggtccgatctcatgctcatcggatatgatccaggtaatattccaggattgccggtcggcaaaataccatatcccgaggaccgttttatctcggatgttaggacggaaattaaattatctagaccgctgtgctcagtgtttgccgatgatgttatgatacggtggaagactcgcgaaagaaggcgtggcctcctttctgttgctgttctttactcgcttccgtcatttattagcttctggttcgctgacgtctctggcatcgatccacaggaaggtctcacctctcaatccgagaatgacgccacggtcctgctagagtttctagtatataaagttatggttgttgaaaagccggacaatttgctgttcaccgaaagggacgtcatgatggccgcttgtcttcttggaaacggagccgaaccaaatcgcatagttgactgggtcccatctgaatttcagacttctattagtagcggattcagcatctgggtactgctcctgtacctctttgatacgcaagtccgagaagattttacaaacacatcttccgactcagcggctgtggaggagttgctcagattgttcgtcattcatggggcagatgtctctaccccaatagaattcagcacagggtcattctcgccccccgagatgctcgccatgacaatcgaggtactgcgcactaagcacttacacataaacggctcggctcggcttagcgcatccctggagaaggtacacttgctaatgttgaaaaaggccaagtcttcacagcctgggaagcaacaaaattccccacctcgatatgagcagaaccctatatcgaatatgcaaagcaccgccaagatgaacccgccggatttaccttcgccgaagaaggagtctatcataaagagaacacgaagtctgttccatagacgtcccgaatctagcatcgggtagacaggacgaagaagccaaacgtttgttagaggcgggggagtgggacttttcgtcaaagccttgaagaaagaaaaacctctggtccaatgatagaagagctagaaatggctgtcgtatcccacagaagggcgtctgaagtatttatttgttcgaatgatagaagagctcgcgtctcttttctggtctagtgtggttatctgtgtgccttcctcagaatgagcacgcaagagagtccacgaagatgaaatagaccagcattatatgcaccgtttgcttccagttacactagcttgagacggcgagaagaccatcagaggagctggtaaccgattgataaaccaaatatgagcgcaatatccggattgtatcaccactttcgcatgtacaaaccccctttatcgacaataccacatctctagcccctttccataccaaacacttaactacaccacaattcacttaaccagctccctcaatcactcacactcgaaccaataaattccacatccccaacccagccccagcaagcggcataagaatcctccaaaagttcaatcttccccaccgtccaatcaactctctcgcctcacccgccgccagcattttcccatcggcaccactcatagcagcaataagccttttattgatccccatgatagcgatctgtgtaaacacaggcatcgccaagttcgccaacgctccagccgcgtagccgcgccactctagtgattcagagttgtggatgtaggtgaggtagaaatagttaaaagccgctgcggtcgcgaataatgggatgtagagcgcgcggctgaattggtagtaccatgcttctatgagtttgggggttgatgcgttggtgagaaggatggccgggattgtgttgaatgttagggctatgttgcttcctgatgtttaaattaggactatattctgagatcagggtaacgggagatggaggaggaagggttatgtaccggatgctatgaaggatgctgcgatgctgagactggcggatattgtgagtggtgtggtgaggaatggcatgttgatttcccggcgaatggttcaagtgtgaggttttgagcgatctgcgtatatatatgctgtagcagagtaagaggtgcgatactattatgatctctatatcaagattcgaaatggcgttcttatatttgatgatgccggacaaacccaattgtccgaatatgtactaagatgccgaagcggtccactcttttccggtgccgcactcggcatacgaacaactctcggaggccggaggtgatggaatggtatcgaattgtacattccaatgtgctggatggagccaaatattactgtttgtttaaagt

SEQ ID NO: 23143 - DNA, 804 bp, Muscodor strobelii
  misc_feature: SGI cDNA ID NO. 567870
  misc_feature: Encodes the peptide sequence at SEQ ID NO 23144
atgagactgttatcgactatactcggtggagctacgctggtagcagcccatggttacgttgatactgctcaaatcggcggaacgacctacactttctatcagccatatactgatccatacacctctcccacggtaagtcctcaatactgcttcttctatttccaactcaagtcactaacgataggaaagccccaacgtatctcgagacctatccaaggaaacggccccgtcaccgatgtgacgtacgcagatttgcaatgtggtggctacaccgacggcggtatcgttggatcttctccggcagcacttcacgccccagccgctgcaggatcaactgtgaccctgcactggactctgtggccagatagccacgttgggcccgtcataacatacatggcgcgatgcccagactcaggctgcaccagctacatgcccggcacttcagcagtctggttcaagatcaagcaggatggccgaaccggcaccacaaacacatggggtgactctcctttgatggtcagcggtaacgcgggctaccagtacacaatcccaagctgcctggctcctggctactacctcgttcgccacgagatcatcgcgctgcacgcctcctatgagtatcccggtgcgcagttctaccctggatgccatcagctccaagttactggatccggtaccaagaagccttcctcgaacttggtcgctttccccggtgcttataagggcagcgatcctggtatcacatacgatgcctacaaagcacagacctacactgttcccggccctgccgtattcacttgttag

SEQ ID NO: 23144 - protein, 267 aa, Muscodor strobelii
  misc_feature: SGI Peptide ID NO. 567870
  misc_feature (2)..(259): Pfam Id: PF03443 Pfam Desc: Glycosyl hydrolase family 61
  misc_feature (104)..(259): Pfam Id: PF03443 Pfam Desc: Glycosyl hydrolase family 61
  misc_feature (1)..(267): NCBI GI: 256726169 Blast Desc: NECHADRAFT_44104 [Nectria haematococca mpVI 77-13-4]
  misc_feature (4)..(267): NCBI GI: 209570284 Blast Desc: [Glomerella graminicola]
  misc_feature (1)..(267): NCBI GI: 85107660 Blast Desc: NCU07898 [Neurospora crassa OR74A] gi|28924020|gb|EAA33178.1| [Neurospora crassa OR74A]
  misc_feature (1)..(267): NCBI GI: 189191958 Blast Desc: endoglucanase IV precursor [Pyrenophora tritici-repentis Pt-1C-BFP] gi|187973924|gb|EDU41423.1| endoglucanase IV precursor [Pyrenophora tritici-repentis
  misc_feature (1)..(267): NCBI GI: 154291544 Blast Desc: BC1G_15017 [Botryotinia fuckeliana B05.10] gi|150846733|gb|EDN21926.1| BC1G_15017 [Botryotinia fuckeliana B05.10]
  misc_feature (1)..(267): NCBI GI: 261357237 Blast Desc: cellulose-growth-specific protein [Verticillium albo-atrum VaMs.102]
  misc_feature (1)..(250): NCBI GI: 156045265 Blast Desc: SS1G_09821 [Sclerotinia sclerotiorum 1980] gi|154694216|gb|EDN93954.1| SS1G_09821 [Sclerotinia sclerotiorum 1980]
  misc_feature (1)..(267): NCBI GI: 261353995 Blast Desc: cellulose-growth-specific protein [Verticillium albo-atrum VaMs.102]
  misc_feature (1)..(267): NCBI GI: 171691556 Blast Desc: protein product [Podospora anserina] gi|170945726|emb|CAP71839.1| protein product [Podospora anserina]
  misc_feature (1)..(267): NCBI GI: 171685122 Blast Desc: protein product [Podospora anserina] gi|170942522|emb|CAP68173.1| protein product [Podospora anserina]
  misc_feature (2)..(266): SWISSPROT Homolog: EC 3.2.1.4 Cellulase
MRLLSTILGGATLVAAHGYVDTAQIGGTTYTFYQPYTDPYTSPTVSPQYCFFYFQLKSLTIGKPQRISRPIQGNGPVTDVTYADLQCGGYTDGGIVGSSPAALHAPAAAGSTVTLHWTLWPDSHVGPVITYMARCPDSGCTSYMPGTSAVWFKIKQDGRTGTTNTWGDSPLMVSGNAGYQYTIPSCLAPGYYLVRHEIIALHASYEYPGAQFYPGCHQLQVTGSGTKKPSSNLVAFPGAYKGSDPGITYDAYKAQTYTVPGPAVFTC

SEQ ID NO: 23145 - DNA, 957 bp, Muscodor strobelii
  misc_feature: SGI EST ID NO. CUFF.54480.0
  misc_feature: Variant of the nucleotide sequence at SEQ ID NO 23143
catacacctctcccacggtaagtcctcaatactgcttcttctatttccaactcaagtcactaacgataggaaagccccaacgtatctcgagacctatccaaggaaacggccccgtcaccgatgtgacgtacgcagatttgcaatgtggtggctacaccgacggcggtatcgttggatcttctccggcagcacttcacgccccagccgctgcaggatcaactgtgaccctgcactggactctgtggccagatagccacgttgggcccgtcataacatacatggcgcgatgcccagactcaggctgcaccagctacatgcccggcacttcagcagtctggttcaagatcaagcaggatggccgaaccggcaccacaaacacatggggtgactctcctttgatggtcagcggtaacgcgggctaccagtacacaatcccaagctgcctggctcctggctactacctcgttcgccacgagatcatcgcgctgcacgcctcctatgagtatcccggtgcgcagttctaccctggatgccatcagctccaagttactggatccggtaccaagaagccttcctcgaacttggtcgctttccccggtgcttataagggcagcgatcctggtatcacatacgatgcctacaaagcacagacctacactgttcccggccctgccgtattcacttgttaggaagagcgtgagatgtcgtttttgtattgcatcttggattagtagtagaaatttggggtttcatcgagatatgtgcacgtaactatgtaacattagtttatatcacaactcaattgctactaccggaaggactggctataagaaaggagagaccataatttatgtcatgtgcaaaccattggacggcgatgtcaggcgaagctacggtacccgatctccaacaagtggactgtgccctgatggtaaggcatattcagctgccccgcgc

SEQ ID NO: 23146 - DNA, 732 bp, Muscodor strobelii
  misc_feature: SGI cDNA ID NO. 567871
  misc_feature: Reduced expression when VOC is produced
  misc_feature: Encodes the peptide sequence at SEQ ID NO 23147
atgcagaaagctctccttgcactcggcaccgttggcctagccactgccactcctttgaagtgtcgccaggttgttcctaactatcccccaactgagaaatctactgggtttcgtctggttgtaaatgtgaccgacctagccacggatttgacgccctcggttaatggctgggagcttcaaggcatccacaccggcgccggattcaatgaagcaactttgtctgacggtactgggcgactcctctaccacaatggcaccgtcgaggaaatccgctacggccagggcagcgtcctaactgatggcgcaacgccattatctcccttcggcatttacgtccaagccgaggaccaattcgacgcaacctacccagctgagcacgatgttagcattaacgtcggaagcgggacaacaggcgtcacaattacccgattcccagatccttatgcgtacctctttggtgctgctcagggaacatttgtcgcatgcccgcgagtcgtcccgtactacaaccaggacttcatcgtcgtccgattcgcgtacgacacgactgatcctgtcacggcgctgcctgtgcatcacgtgcccgagggttgcactgcaatcaacttgttgcccgaatgcgataccttgaacgatctgcccgaaggtagctactcaagccatgagtatgcgcagcccgagaggtgctatgcggatgtgtcgagcatcgactggcctctgtatggaccttga

SEQ ID NO: 23147 - protein, 243 aa, Muscodor strobelii
  misc_feature: SGI Peptide ID NO. 567871
  misc_feature (1)..(243): NCBI GI: 46123505 Blast Desc: FG06130.1 [Gibberella zeae PH-1]
  misc_feature (26)..(243): NCBI GI: 256731050 Blast Desc: NECHADRAFT_105345 [Nectria haematococca mpVI 77-13-4]
  misc_feature (1)..(238): NCBI GI: 261361426 Blast Desc: conserved [Verticillium albo-atrum VaMs.102]
  misc_feature (34)..(229): NCBI GI: 116192587 Blast Desc: CHGG_06011 [Chaetomium globosum CBS 148.51] gi|88181924|gb|EAQ89392.1| CHGG_06011 [Chaetomium globosum CBS 148.51]
  misc_feature (22)..(242): NCBI GI: 171679860 Blast Desc: protein product [Podospora anserina] gi|170939556|emb|CAP64783.1| protein product [Podospora anserina]
  misc_feature (29)..(240): NCBI GI: 145601495 Blast Desc: [Magnaporthe grisea 70-15] gi|145009561|gb|EDJ94217.1| [Magnaporthe grisea 70-15]
  misc_feature (13)..(237): NCBI GI: 156034781 Blast Desc: SS1G_13326 [Sclerotinia sclerotiorum 1980] gi|154698729|gb|EDN98467.1| SS1G_13326 [Sclerotinia sclerotiorum 1980]
  misc_feature (4)..(241): NCBI GI: 170940323 Blast Desc: protein product [Podospora anserina]
  misc_feature (6)..(241): NCBI GI: 154293094 Blast Desc: [Botryotinia fuckeliana B05.10] gi|150845646|gb|EDN20839.1| [Botryotinia fuckeliana B05.10]
  misc_feature (29)..(213): NCBI GI: 85091590 Blast Desc: NCU09029 [Neurospora crassa OR74A] gi|28920370|gb|EAA29740.1| [Neurospora crassa OR74A]
  misc_feature: Useful for introducing or modulating the production of volatile compounds
MQKALLALGTVGLATATPLKCRQVVPNYPPTEKSTGFRLVVNVTDLATDLTPSVNGWELQGIHTGAGFNEATLSDGTGRLLYHNGTVEEIRYGQGSVLTDGATPLSPFGIYVQAEDQFDATYPAEHDVSINVGSGTTGVTITRFPDPYAYLFGAAQGTFVACPRVVPYYNQDFIVVRFAYDTTDPVTALPVHHVPEGCTAINLLPECDTLNDLPEGSYSSHEYAQPERCYADVSSIDWPLYGP

SEQ ID NO: 23148 - DNA, 1163 bp, Muscodor strobelii
  misc_feature: SGI EST ID NO. CUFF.54500.0
  misc_feature: Variant of the nucleotide sequence at SEQ ID NO 23146
cctgagcttgccttcgcatccacaatcaaaccacctcagctgttgacgaccttcatgttcacgatcattgtaaggtagggtgctaattgcttaaatactggatgccgtcgtcagaaaattggaaggaaatatgtgataaccagcaccatcgaacttagccattgtctacagctatctctctcttctcacaatgcagaaagctctccttgcactcggcaccgttggcctagccactgccactcctttgaagtgtcgccaggttgttcctaactatcccccaactgagaaatctactgggtttcgtctggttgtaaatgtgaccgacctagccacggatttgacgccctcggttaatggctgggagcttcaaggcatccacaccggcgccggattcaatgaagcaactttgtctgacggtactgggcgactcctctaccacaatggcaccgtcgaggaaatccgctacggccagggcagcgtcctaactgatggcgcaacgccattatctcccttcggcatttacgtccaagccgaggaccaattcgacgcaacctacccagctgagcacgatgttagcattaacgtcggaagcgggacaacaggcgtcacaattacccgattcccagatccttatgcgtacctctttggtgctgctcagggaacatttgtcgcatgcccgcgagtcgtcccgtactacaaccaggacttcatcgtcgtccgattcgcgtacgacacgactgatcctgtcacggcgctgcctgtgcatcacgtgcccgagggttgcactgcaatcaacttgttgcccgaatgcgataccttgaacgatctgcccgaaggtagctactcaagccatgagtatgcgcagcccgagaggtgctatgcggatgtgtcgagcatcgactggcctctgtatggaccttgagaattcgatcaatttgcgttggcattttgttagagttggatattaattatcctaaaatcatgtatagcgttcccgcattgaagcgttatgtcttgtcgttgtgttcttgaaacaagcctacattcatttgaaaaatttgggcagaagtggttggctatagggaagggaaaatatacataattcttctaattagtaatgataaatcatacacatagcgaaaaagataccatactgaacccat

SEQ ID NO: 23149 - DNA, 630 bp, Muscodor strobelii
  misc_feature: SGI cDNA ID NO. 567872
  misc_feature: Elevated expression when VOC is produced
  misc_feature: Encodes the peptide sequence at SEQ ID NO 23150
atgtctgcccccgccatccccgctggaagcaccctgatctcgaccttcaagcggtcgttcaccgatgtcccaatcgatgccgagaaggacaatgctattgccaccaccgagttcctcgacgctgccgagtccttgaccaccatattcgatgctattggatctgttgccttctcgcctgtcaagagtgatatgctcggtaacgtcaagaaaatccgcgagcgtcaacttgctgcccccgccgaatccgacacccttcaggccctcgtcatcaacgagctcaagaccaagtctcacaaggcctctgagggtttggtgtggctagtccgaggcctggacttcacgtgcattggactaagccagaacttggcgaaggccgatgaggagctgtctgcgtccttccgtaacgcctatggtgccaccctcaagcctcaccacagcgtgtggatcaagcccgccttctctgctgccatgagcgcctgcccctaccgcaaagatttctaccctaagctgggagccgaccaggatgctgtttccaacgagctgaggatctatctggcctccctcgagaaggtcgttgctatcctcaagggcttccaggaacgcaaggaggcgaagtgggatgcgaaatag

SEQ ID NO: 23150 - protein, 209 aa, Muscodor strobelii
  misc_feature: SGI Peptide ID NO. 567872
  misc_feature (17)..(205): Pfam Id: PF08718 Pfam Desc: Glycolipid transfer protein (GLTP)
  misc_feature (1)..(206): NCBI GI: 145606685 Blast Desc: het-c [Magnaporthe grisea 70-15] gi|145014358|gb|EDJ98926.1| het-c [Magnaporthe grisea 70-15]
  misc_feature (1)..(206): NCBI GI: 116196712 Blast Desc: CHGG_04954 [Chaetomium globosum CBS 148.51] gi|88180867|gb|EAQ88335.1| CHGG_04954 [Chaetomium globosum CBS 148.51]
  misc_feature (6)..(206): NCBI GI: 156032814 Blast Desc: SS1G_13813 [Sclerotinia sclerotiorum 1980] gi|154699215|gb|EDN98953.1| SS1G_13813 [Sclerotinia sclerotiorum 1980]
  misc_feature (6)..(206): NCBI GI: 523338 Blast Desc: HET-C2 [Podospora anserina]
  misc_feature (1)..(206): NCBI GI: 261359871 Blast Desc: het-c [Verticillium albo-atrum VaMs.102]
  misc_feature (6)..(206): NCBI GI: 537931 Blast Desc: het-c [Podospora anserina]
  misc_feature (6)..(206): NCBI GI: 537939 Blast Desc: het-c [Podospora anserina]
  misc_feature (6)..(206): NCBI GI: 537935 Blast Desc: het-c [Podospora anserina]
  misc_feature (6)..(206): NCBI GI: 537937 Blast Desc: het-c [Podospora anserina]
  misc_feature (6)..(206): NCBI GI: 171676906 Blast Desc: protein product [Podospora anserina] gi|537933|gb|AAA33626.1| het-c [Podospora anserina] gi|170936520|emb|CAP61180.1| protein product [Podospora anserina]
  misc_feature: Useful for introducing or modulating the production of volatile compounds
MSAPAIPAGSTLISTFKRSFTDVPIDAEKDNAIATTEFLDAAESLTTIFDAIGSVAFSPVKSDMLGNVKKIRERQLAAPAESDTLQALVINELKTKSHKASEGLVWLVRGLDFTCIGLSQNLAKADEELSASFRNAYGATLKPHHSVWIKPAFSAAMSACPYRKDFYPKLGADQDAVSNELRIYLASLEKVVAILKGFQERKEAKWDAK

SEQ ID NO: 23151 - DNA, 1175 bp, Muscodor strobelii
  misc_feature: SGI EST ID NO. CUFF.54506.0
  misc_feature: Variant of the nucleotide sequence at SEQ ID NO 23149
cttgaatgttaatgaaaaattgagttaaaccattactcattttatgatcaaaaagatatgcagtgctatttgctgttccatgccatttatattgttggattgtttcaacacgtatcgagctggtgtcaatgcacctgcccctctttctccctcctctcctggccagagtgttggccttagacacatgaagctcaatgtgtattagagctatcccctccgctccacagccagccaaacccccattgctcctgacgtatgtacctcccagatgatttgaattgaccgctcttctatagataattaacattcaaaactacaacttctgcctctgcctcctagtgtctaatttttgttccaagaaccgcactatcgcaatcatgtctgcccccgccatccccgctggaagcaccctgatctcgaccttcaagcggtcgttcaccgatgtcccaatcgatgccgagaaggacaatgctattgccaccaccgagttcctcgacgctgccgagtccttgaccaccatattcgatgctattggatctgttgccttctcgcctgtcaagagtgatatgctcggtaacgtcaagaaaatccgcgagcgtcaacttgctgcccccgccgaatccgacacccttcaggccctcgtcatcaacgagctcaagaccaagtctcacaaggcctctgagggtttggtgtggctagtccggtacgaacctatcgctcccctcattctacaccaaaatagacatattgacaattctccgtatccatagaggcctggacttcacgtgcattggactaagccagaacttggcgaaggccgatgaggagctgtctgcgtccttccgtaacgcctatggtgccaccctcaagcctcaccacagcgtgtggatcaagcccgccttctctgctgccatgagcgcctgcccctaccgcaaagatttctaccctaagctgggagccgaccaggatgctgtttccaacgagctgaggatctatctggcctccctcgagaaggtcgttgctatcctcaagggcttccaggaacgcaaggaggcgaagtgggatgcgaaatagatgggacgccaaagccggttgtttttagtggtcttccacctaactataatctgtaactaaacaaacaattaattataaaaattcactatattaacttagaa

SEQ ID NO: 23152 - DNA, 2562 bp, Muscodor strobelii
  misc_feature: SGI cDNA ID NO. 567873
  misc_feature: Encodes the peptide sequence at SEQ ID NO 23153
atgtctggacctcacaccaacaaggagaagcactccagcttcaaggacaaattgaaaaatcctttccatgaactgaaggagaaattggatcatactcatctccatgatgctaaagcccacctgagccatcagaaacacaaaattggcaaatttgcaaatctcattaatccccaacaccggcacgatgaggagcatgagaaagcctgcgatgagaagcgtagcaaaatccaaggggagcatcggtttaattcattctttccagagcaggatggaaacatgatcaagtggtatgtcgatggcagagactatttctgggctgtctcggtagctctggaacaggccaaggagtccatctatattgcggactggtggctgtcaccggaactgtttctgaggagacctccacatgaaaaccaggaatggcgtttagataacatattgaaacgtcgtgcagaggctggtgtcaagatctacgtcaatgtctaccgcgaagtcgaagccgctttgacatgtaattccgagcacaccaaacatgcactgcaaagtttgtgtcctgaaggttcgcccgggtatggtaacatcaaaatcatgcgccaccccgatcacaacgttttagagaatgcagcggatatgactttttactgggctcatcacgagaaatttattgtaatcgactacgccatggcattcattggtggtcttgatctatgttttggccgctgggacaaccatcagcatattctctctgatgtgcacccagaaggcgttgctaatgaagtctggccgggtcaggatttcaacaataatcgcgtcatggatttcaaaaacgttcaggactggaagcagaacgagctgagcaaagccgattatggaagaatgccttggcatgatgtggcaatgggtgtcataggtccctgcgtctacgacattgctgaacatttcgttttgcgctggaactttgttaaacgggacaagtacaagcgcgatgagagatttgattggattgagttgagaggccgggaaggtgacgacgaggacttagtcggtgttcagagaccgaaacatcccgttggagactatgtccttcatccttacacccctcttgagacaaaaaatcttgagaatcgtggcacggtgcatgcgcaaattgttcggtccagcgctgactggtccagcggcattcttacagatcacagtattcaaaatgcttactctgaaatcattcggagtgctgaacattatgtctacatcgagaatcagttcttcatcacagcaacaggagagcaccaatcgcccatacacaacactattggtagatctatcgtcgaagcttgcgtaagagcgggcaaggagggtcgcaagtttcgtgtcattgtcctgattccagctgtccccggctttgctggtgatttgcgcgacgatgcagcgacaggtactcgggccattatggactaccaatacaagtcaatttgccgaggggagcattccattttcgagcagattcgggctcaaggtgtcgatccgaaggagcacatcttctttttcaacctacgatcttatgatcgcctgaacaagaccccgaagatcgagcagcaagaaaaggaatccggtgtcaaatatcagcaggtccagcgcgcccaagctgaagagattatgggttctggaattcatggcagcaaagatgttgagggcgatcgcgataagcacatgggcaaggcagaagagcagaaagaagagcacgaaaccagtgagagcattgacgctaagaaacgtttcgaagcagcaagacacaatggcggcgagactgagtcttccttcagcgtggcccaccatgcaatggctggtcaaggtaagcttacggatgagccatgggaaggcgacgcagaggaagaggtgaacaactggatccaagaggagctgtatatccacgggaagctcttgattgtggacgaccgtattgttgtttgtggttcaagcaatttgaacgaccgtagtcaaatgggtagccatgacagtgaactctctatcgtcatggaagataccgacaagatagagagtgtcatggacggccaacccttccaggccggaagacacgcagctacccttcgacgttacctgtggcgagaacacatgggtctattgccacctcaagagcacgacgcaagtcaggatgtgaacgcacagccaccgggtgatgattcgccgaacgatatatgggatcgtgacgatacttacaagtttgtcgaggatcctatgagcgatgccctgtgggagcagtggacgtctagcgctacgaagaacaccgcaatattccgacatctattccatgcggatcccgatgaccacatcaaaacgtttgatgattataataccttcctccctccaaagggcgtcaagtcgggccacatctttgatagattcatgccgcctgactatgcgcgagataagctttcgcagattaagggtcacctggtctggatgcctctggaattcctgaaagacgccaatatggccgagacaggattgcaagtcaattcctggactgagagcgtctacacctaa

SEQ ID NO: 23153 - protein, 853 aa, Muscodor strobelii
  misc_feature: SGI Peptide ID NO. 567873
  misc_feature (213)..(240): Pfam Id: PF00614 Pfam Desc: Phospholipase D Active site motif
  misc_feature (638)..(665): Pfam Id: PF00614 Pfam Desc: Phospholipase D Active site motif
  misc_feature (9)..(853): NCBI GI: 171676904 Blast Desc: protein product [Podospora anserina] gi|170936519|emb|CAP61179.1| protein product [Podospora anserina]
  misc_feature (3)..(853): NCBI GI: 164423719 Blast Desc: NCU10400 [Neurospora crassa OR74A] gi|157070209|gb|EDO64986.1| NCU10400 [Neurospora crassa OR74A]
  misc_feature (3)..(853): NCBI GI: 116196714 Blast Desc: CHGG_04955 [Chaetomium globosum CBS 148.51] gi|88180868|gb|EAQ88336.1| CHGG_04955 [Chaetomium globosum CBS 148.51]
  misc_feature (12)..(853): NCBI GI: 145603811 Blast Desc: MGG_05804 [Magnaporthe grisea 70-15] gi|145011961|gb|EDJ96617.1| MGG_05804 [Magnaporthe grisea 70-15]
  misc_feature (12)..(853): NCBI GI: 156048973 Blast Desc: SS1G_08193 [Sclerotinia sclerotiorum 1980] gi|154692592|gb|EDN92330.1| SS1G_08193 [Sclerotinia sclerotiorum 1980]
  misc_feature (34)..(853): NCBI GI: 256720737 Blast Desc: [Nectria haematococca mpVI 77-13-4]
  misc_feature (25)..(853): NCBI GI: 46110182 Blast Desc: FG01973.1 [Gibberella zeae PH-1]
  misc_feature (25)..(853): NCBI GI: 212537097 Blast Desc: phospholipase PldA, [Penicillium marneffei ATCC 18224] gi|210068446|gb|EEA22537.1| phospholipase PldA, [Penicillium marneffei ATCC 18224]
  misc_feature (16)..(849): NCBI GI: 115399910 Blast Desc: ATEG_06366 [Aspergillus terreus NIH2624] gi|114191210|gb|EAU32910.1| ATEG_06366 [Aspergillus terreus NIH2624]
  misc_feature (25)..(853): NCBI GI: 242810219 Blast Desc: phospholipase PldA, [Talaromyces stipitatus ATCC 10500] gi|218716161|gb|EED15583.1| phospholipase PldA, [Talaromyces stipitatus ATCC 10500]
  misc_feature (80)..(571): SWISSPROT Homolog: EC 3.1.4.4 Phospholipase D
MSGPHTNKEKHSSFKDKLKNPFHELKEKLDHTHLHDAKAHLSHQKHKIGKFANLINPQHRHDEEHEKACDEKRSKIQGEHRFNSFFPEQDGNMIKWYVDGRDYFWAVSVALEQAKESIYIADWWLSPELFLRRPPHENQEWRLDNILKRRAEAGVKIYVNVYREVEAALTCNSEHTKHALQSLCPEGSPGYGNIKIMRHPDHNVLENAADMTFYWAHHEKFIVIDYAMAFIGGLDLCFGRWDNHQHILSDVHPEGVANEVWPGQDFNNNRVMDFKNVQDWKQNELSKADYGRMPWHDVAMGVIGPCVYDIAEHFVLRWNFVKRDKYKRDERFDWIELRGREGDDEDLVGVQRPKHPVGDYVLHPYTPLETKNLENRGTVHAQIVRSSADWSSGILTDHSIQNAYSEIIRSAEHYVYIENQFFITATGEHQSPIHNTIGRSIVEACVRAGKEGRKFRVIVLIPAVPGFAGDLRDDAATGTRAIMDYQYKSICRGEHSIFEQIRAQGVDPKEHIFFFNLRSYDRLNKTPKIEQQEKESGVKYQQVQRAQAEEIMGSGIHGSKDVEGDRDKHMGKAEEQKEEHETSESIDAKKRFEAARHNGGETESSFSVAHHAMAGQGKLTDEPWEGDAEEEVNNWIQEELYIHGKLLIVDDRIVVCGSSNLNDRSQMGSHDSELSIVMEDTDKIESVMDGQPFQAGRHAATLRRYLWREHMGLLPPQEHDASQDVNAQPPGDDSPNDIWDRDDTYKFVEDPMSDALWEQWTSSATKNTAIFRHLFHADPDDHIKTFDDYNTFLPPKGVKSGHIFDRFMPPDYARDKLSQIKGHLVWMPLEFLKDANMAETGLQVNSWTESVYT

SEQ ID NO: 23154 - DNA, 5041 bp, Muscodor strobelii
  misc_feature: SGI EST ID NO. CUFF.54588.0
  misc_feature: Variant of the nucleotide sequence at SEQ ID NO 23152
tgctccggtcggtgctcagatactaccggcatgacgtcagatctttggtggggagaaagatggccagccgtttgagaactgaaaataggcaaaagtatggcaagggctcggactaggacatgggcactatggtgggaaatcccattcgagacagatcgcatcgtgagattcagattgccatttgagccattaccagttaacgtgaccaagcaatgctcttggcaggcaccccaatacactcttcgatcccactacgcaagctgtgattgggagcctcggatctggggtgccgggagctcagctgctcatcgtcgtgaaactggaacacatttgcgcaagtcttggcagacaatgaaaacttgcttttccatttgtgagaacgggcattttgaacacaattactgagctcagtcgcattggaaacatactaaggataaggtcttgaatatagggcatatacctgcctcggcctgtaacgctactatcccaagttccgatgacgttgatgcacaacagtgcacttagaatctctaccaccaactctgcatatagtctacatctcctcaaacctacatgcttgtcacatcctccagcctgatccccctcccactctctccccccttcccttgctgtgattacatagtgcaaggacatcagctcaccgacaaatccattattcctagaaacataagctatgtctggacctcacaccaacaaggagaagcactccagcttcaaggacaaattgaaaaatcctttccatgaactgaaggagaaattggatcatactcatctccatgatgctaaagcccacctgagccatcagaaacacaaaattggcaaatttgcaaatctcattaatccccaacaccggcacgatgaggagcatgagaaagcctgcgatgagaagcgtagcaaaatccaaggggagcatcggtttaattcattctttccagagcaggatggaaacatgatcaagtggtatgtcgatggcagagactatttctgggctgtctcggtagctctggaacaggccaaggagtccatctatattgcggactggtggctgtcaccggaactgtttctgaggagacctccacatgaaaaccaggaatggcgtttagataacatattgaaacgtcgtgcagaggctggtgtcaagatctacgtcaatgtctaccgcgaagtcgaagccgctttgacatgtaattccgagcacaccaaacatgcactgcaaagtttgtgtcctgaaggttcgcccgggtatggtaacatcaaaatcatgcgccaccccgatcacaacgttttagagaatgcagcggatatgactttttactgggctcatcacgagaaatttattgtaatcgactacgccatggcattcattggtggtcttgatctatgttttggccgctgggacaaccatcagcatattctctctgatgtgcacccagaaggcgttgctaatgaagtctggccgggtcaggatttcaacaataatcgcgtcatggatttcaaaaacgttcaggactggaagcagaacgagctgagcaaagccgattatggaagaatgccttggcatgatgtggcaatgggtgtcataggtccctgcgtctacgacattgctgaacatttcgttttgcgctggaactttgttaaacgggacaagtacaagcgcgatgagagatttgattggattgagttgagaggccgggaaggtgacgacgaggacttagtcggtgttcagagaccgaaacatcccgttggagactatgtccttcatccttacacccctcttgagacaaaaaatcttgagaatcgtggcacggtgcatgcgcaaattgttcggtccagcgctgactggtccagcggcattcttacagatcacagtattcaaaatgcttactctgaaatcattcggagtgctgaacattatgtctacatcgagaatcagttcttcatcacagcaacaggagagcaccaatcgcccatacacaacactattggtagatctatcgtcgaagcttgcgtaagagcgggcaaggagggtcgcaagtttcgtgtcattgtcctgattccagctgtccccggctttgctggtgatttgcgcgacgatgcagcgacaggtactcgggccattatggactaccaatacaagtcaatttgccgaggggagcattccattttcgagcagattcgggctcaaggtgtcgatccgaaggagcacatcttctttttcaacctacgatcttatgatcgcctgaacaagaccccgaagatcgagcagcaagaaaaggaatccggtgtcaaatatcagcaggtccagcgcgcccaagctgaagagattatgggttctggaattcatggcagcaaagatgttgagggcgatcgcgataagcacatgggcaaggcagaagagcagaaagaagagcacgaaaccagtgagagcattgacgctaagaaacgtttcgaagcagcaagacacaatggcggcgagactgagtcttccttcagcgtggcccaccatgcaatggctggtcaaggtaagcttacggatgagccatgggaaggcgacgcagaggaagaggtgaacaactggatccaagaggagctgtatatccacgggaagctcttgattgtggacgaccgtattgttgtttgtggttcaagcaatttgaacgaccgtagtcaaatgggtagccatgacagtgaactctctatcgtcatggaagataccgacaagatagagagtgtcatggacggccaacccttccaggccggaagacacgcagctacccttcgacgttacctgtggcgagaacacatgggtctattgccacctcaagagcacgacgcaagtcaggatgtgaacgcacagccaccgggtgatgattcgccgaacgatatatgggatcgtgacgatacttacaagtttgtcgaggatcctatgagcgatgccctgtgggagcagtggacgtctagcgctacgaagaacaccgcaatattccgacatctattccatgcggatcccgatgaccacatcaaaacgtttgatgattataataccttcctccctccaaagggcgtcaagtcgggccacatctttgatagattcatgccgcctgactatgcgcgagataagctttcgcagattaagggtcacctggtctggatgcctctggaattcctgaaagacgccaatatggccgagacaggattgcaagtcaattcctggactgagagcgtctacacctaaggtgaaggactgtggtcacaatcgttgctagtatttggttcggcgttcatgtggggacagggtgcaaatttgtttggctgtctgttactaacagtagttgtttcttgcatagacacggaatagcaatacaagcagagtcataatacgcgttctttgtgaaggctcatgtcatttgagaagtcttacgagaggaggaccaatgcttttgtcaatcccaatgtcttaagaacgcggttttaactttctgagaagttaacgcttttcgctcaactatttttctatccctcagacataagtatgatatgaagtctagctgtagcctatcaccagcctctcccagccattttctgatcaggacgcatagagctaacactgataccaaccactagattgaacattcgttagtgattctgatctacggcccatcggatagacccaggttgaattgacttacttgcttctccaagaccctcactacactctgccaaaaccttgccatctctaaagtgtgtcgtcgctctgacaatagcctttgctcttttcgccgcatcgcccgacttgaaaattccactacctacaaaaacaccgtcacagccaagctgcatcatgagcgcggcatccgcgggcgtagcaacaccgccagctgcaaagttgacaacaggcagacgtccgagttccgcagtctgctttaacaaggcggcatcacagccaaattcgcgggctaatgcgcgaatggcgaggtctccgccctcgcgaagcgcggactgtgctcttgctatgtctttctttactgttcgcatgtgcttcacggcttcgacgacgtcgccggtacctgcttcacctttcgtgcggatcattgctgcgccttcggcgatgcgccggagagcttcaggaagattgcggcagccgcatacaaacggtatgttgactaatcgattcgctagttaattgatgtgatttcatacaaacatcgtaggagaaggatgggaatcttgcgtacattctgatttctcgacgtggaactcatcatctgcgggcgtgagcacctcgctctcgtcaatatagtcgacacccagtgactcgaggatttggcactcgacaaagtggccaatacgagcctttgccataacaggtatcgtgactgcggcttggatttctttgatctttgacggatcggacatgcgtgctacgccaccctcggctcggatatctgccggtactctctcgagagccatgacggcacaggccccggcatcttcggcgatccgggcttgcgccgcgtccgtgacgtccactattgatatcgcatattagcaatcggcttatttctttgaggtatgttgtctctagagtatcgaagatcttttatgaatgttgaatgacataacaaggacgacaactcggatgcacttacttatcacaccacccttcagcatctgcgccaggccggccttcaccgtgaaggaggccttggatgcggcgccctcggcagcaattggtgtcgactcgctgttcgtcattatgccagatgtatcgggtatcaagaatcggtgcttattcgtaagaattccaatgaatgtcagtgtagagaccgaagcgtcgtggaagaataattttttttcttgccgttgatatccgatttatagacagatatatcctgcacgtcaggaagcagaccctgatgagtaactagtggcgcaaacatccaagggcgtaaacagatcatcggatccgtcccaaccttaaggtgtggacactgaattaatccaataacgtacatcggac

SEQ ID NO: 23155 - DNA, 936 bp, Muscodor strobelii
  misc_feature: SGI cDNA ID NO. 567874
  misc_feature: Reduced expression when VOC is produced
  misc_feature: Encodes the peptide sequence at SEQ ID NO 23156
atgacgaacagcgagtcgacaccaattgctgccgagggcgccgcatccaaggcctccttcacggtgaaggccggcctggcgcagatgctgaagggtggtgtgataatggacgtcacggacgcggcgcaagcccggatcgccgaagatgccggggcctgtgccgtcatggctctcgagagagtaccggcagatatccgagccgagggtggcgtagcacgcatgtccgatccgtcaaagatcaaagaaatccaagccgcagtcacgatacctgttatggcaaaggctcgtattggccactttgtcgagtgccaaatcctcgagtcactgggtgtcgactatattgacgagagcgaggtgctcacgcccgcagatgatgagttccacgtcgagaaatcagaattcaacataccgtttgtatgcggctgccgcaatcttcctgaagctctccggcgcatcgccgaaggcgcagcaatgatccgcacgaaaggtgaagcaggtaccggcgacgtcgtcgaagccgtgaagcacatgcgaacagtaaagaaagacatagcaagagcacagtccgcgcttcgcgagggcggagacctcgccattcgcgcattagcccgcgaatttggctgtgatgccgccttgttaaagcagactgcggaactcggacgtctgcctgttgtcaactttgcagctggcggtgttgctacgcccgcggatgccgcgctcatgatgcagcttggctgtgacggtgtttttgtaggtagtggaattttcaagtcgggcgatgcggcgaaaagagcaaaggctattgtcagagcgacgacacactttagagatggcaaggttttggcagagtgtagtgagggtcttggagaagcaatggttggtatcagtgttagctctatgcgtcctgatcagaaaatggctgggagaggctggtga

SEQ ID NO: 23156 - protein, 311 aa, Muscodor strobelii
  misc_feature: SGI Peptide ID NO. 567874
  misc_feature (18)..(229): Pfam Id: PF01680 Pfam Desc: SOR/SNZ family
  misc_feature (1)..(311): NCBI GI: 46121313 Blast Desc: FG05035.1 [Gibberella zeae PH-1]
  misc_feature (1)..(311): NCBI GI: 256727331 Blast Desc: [Nectria haematococca mpVI 77-13-4]
  misc_feature (2)..(311): NCBI GI: 39976187 Blast Desc: MGG_05980 [Magnaporthe grisea 70-15] gi|145011746|gb|EDJ96402.1| MGG_05980 [Magnaporthe grisea 70-15]
  misc_feature (12)..(311): NCBI GI: 70998202 Blast Desc: pyridoxine biosynthesis protein [Aspergillus fumigatus Af293] gi|119479697|ref|XP_001259877.1| pyridoxine biosynthesis protein [Neosartorya fischeri NRRL 181] pyridoxine biosynthesis
  misc_feature (10)..(311): NCBI GI: 121713260 Blast Desc: pyridoxine biosynthesis protein [Aspergillus clavatus NRRL 1] gi|119402394|gb|EAW12815.1| pyridoxine biosynthesis protein [Aspergillus clavatus NRRL 1]
  misc_feature (16)..(311): NCBI GI: 115433602 Blast Desc: pyridoxine biosynthesis protein PDX1 [Aspergillus terreus NIH2624] gi|114189790|gb|EAU31490.1| pyridoxine biosynthesis protein PDX1 [Aspergillus terreus NIH2624]
  misc_feature (12)..(311): NCBI GI: 169778123 Blast Desc: [Aspergillus oryzae RIB40] gi|238495392|ref|XP_002378932.1| pyridoxine biosynthesis protein [Aspergillus flavus NRRL3357] gi|83772264|dbj|BAE62394.1| protein
  misc_feature (7)..(311): NCBI GI: 225685013 Blast Desc: pyridoxine biosynthesis protein PDX1 [Paracoccidioides brasiliensis Pb03] gi|226294323|gb|EEH49743.1| pyridoxine biosynthesis protein PDX1 [Paracoccidioides brasiliensis Pb18]
  misc_feature (7)..(311): NCBI GI: 226281337 Blast Desc: pyridoxine biosynthesis protein PDX1 [Paracoccidioides brasiliensis Pb01]
  misc_feature (20)..(311): NCBI GI: 212535478 Blast Desc: pyridoxine biosynthesis protein [Penicillium marneffei ATCC 18224] gi|210070294|gb|EEA24384.1| pyridoxine biosynthesis protein [Penicillium marneffei ATCC 18224]
  misc_feature: Useful for introducing or modulating the production of volatile compounds
MTNSESTPIAAEGAASKASFTVKAGLAQMLKGGVIMDVTDAAQARIAEDAGACAVMALERVPADIRAEGGVARMSDPSKIKEIQAAVTIPVMAKARIGHFVECQILESLGVDYIDESEVLTPADDEFHVEKSEFNIPFVCGCRNLPEALRRIAEGAAMIRTKGEAGTGDVVEAVKHMRTVKKDIARAQSALREGGDLAIRALAREFGCDAALLKQTAELGRLPVVNFAAGGVATPADAALMMQLGCDGVFVGSGIFKSGDAAKRAKAIVRATTHFRDGKVLAECSEGLGEAMVGISVSSMRPDQKMAGRGW

SEQ ID NO: 23157 - DNA, 3739 bp, Muscodor strobelii
  misc_feature: SGI EST ID NO. CUFF.54589.1
  misc_feature: Variant of the nucleotide sequence at SEQ ID NO 23155
cgccactagttactcatcagggtctgcttcctgacgtgcaggatatatctgtctataaatcggatatcaacggcaagaaaaaaaattattcttccacgacgcttcggtctctacactgacattcattggaattcttacgaataagcaccgattcttgatacccgatacatctggcataatgacgaacagcgagtcgacaccaattgctgccgagggcgccgcatccaaggcctccttcacggtgaaggccggcctggcgcagatgctgaagggtggtgtgataatggacgtcacggacgcggcgcaagcccggatcgccgaagatgccggggcctgtgccgtcatggctctcgagagagtaccggcagatatccgagccgagggtggcgtagcacgcatgtccgatccgtcaaagatcaaagaaatccaagccgcagtcacgatacctgttatggcaaaggctcgtattggccactttgtcgagtgccaaatcctcgagtcactgggtgtcgactatattgacgagagcgaggtgctcacgcccgcagatgatgagttccacgtcgagaaatcagaattcaacataccgtttgtatgcggctgccgcaatcttcctgaagctctccggcgcatcgccgaaggcgcagcaatgatccgcacgaaaggtgaagcaggtaccggcgacgtcgtcgaagccgtgaagcacatgcgaacagtaaagaaagacatagcaagagcacagtccgcgcttcgcgagggcggagacctcgccattcgcgcattagcccgcgaatttggctgtgatgccgccttgttaaagcagactgcggaactcggacgtctgcctgttgtcaactttgcagctggcggtgttgctacgcccgcggatgccgcgctcatgatgcagcttggctgtgacggtgtttttgtaggtagtggaattttcaagtcgggcgatgcggcgaaaagagcaaaggctattgtcagagcgacgacacactttagagatggcaaggttttggcagagtgtagtgagggtcttggagaagcaatggttggtatcagtgttagctctatgcgtcctgatcagaaaatggctgggagaggctggtgataggctacagctagacttcatatcatacttatgtctgagggatagaaaaatagttgagcgaaaagcgttaacttctcagaaagttaaaaccgcgttcttaagacattgggattgacaaaagcattggtcctcctctcgtaagacttctcaaatgacatgagccttcacaaagaacgcgtattatgactctgcttgtattgctattccgtgtctatgcaagaaacaactactgttagtaacagacagccaaacaaatttgcaccctgtccccacatgaacgccgaaccaaatactagcaacgattgtgaccacagtccttcaccttaggtgtagacgctctcagtccaggaattgacttgcaatcctgtctcggccatattggcgtctttcaggaattccagaggcatccagaccaggtgacccttaatctgcgaaagcttatctcgcgcatagtcaggcggcatgaatctatcaaagatgtggcccgacttgacgccctttggagggaggaaggtattataatcatcaaacgttttgactttaccaaattagtaagacatggtaatattcaacattgcgtacttactgtggtcatcgggatccgcatggaatagatgtcggaatattgcggtgttcttcgtagcgctagacgtccactgctcccacagggcatcgctcataggatcctcgacaaacttgtaagtatcgtcacgatcccatatatcgttcggcgaatcatcacccggtggctgtgcgttcacatcctgacttgcgtcgtgctcttgaggtggcaatagacccatgtgttctcgccacaggtaacgtcgaagggtagctgcgtgtcttccggcctggaagggttggccgtccatgacactctctatcttgtcggtatcttccatgacgatagagagttcactgtcatggctacccatttgactacggtcgttcaaattgcttgaaccacaaacaacaatacggtcgtccacaatcaagagcttcccgtggatatacagctcctcttggatccagttgttcacctcttcctctgcgtcgccttcccatggctcatccgtaagcttaccttgaccagccattgcatggtgggccacgctgaaggaagactcagtctcgccgccattgtgtcttgctgcttcgaaacgtttcttagcgtcaatgctctcactggtttcgtgctcttctttctgctcttctgccttgcccatgtgcttatcgcgatcgccctcaacatctttgctgccatgaattccagaacccataatctcttcagcttgggcgcgctggacctgctgatatttgacaccggattccttttcttgctgctcgatcttcggggtcttgttcaggcgatcataagatcgtaggttgaaaaagaagatgtgctccttcggatcgacaccttgagcccgaatctgctcgaaaatggaatgctcccctcggcaaattgacttgtattggtagtccataatggcccgagtacctgtcgctgcatcgtcgcgcaaatcaccagcaaagccggggacagctggaatcaggacaatgacacgaaacttgcgaccctccttgcccgctcttacgcaagcttcgacgatagatctaccaatagtgttgtgtatgggcgattggtgctctcctgttgctgtgatgaagaactgattctcgatgtagacataatgttcagcactccgaatgatttcagagtaagcattttgaatactgtgatctgtaagaatgccgctggaccagtcagcgctggaccgaacaatttgcgcatgcaccgtgccacgattctcaagattttttgtctcaagaggggtgtaaggatgaaggacatagtctccaacgggatgtttcggtctctgaacaccgactaagtcctcgtcgtcaccttcccggcctctcaactcaatccaatcaaatctctcatcgcgcttgtacttgtcccgtttaacaaagttccagcgcaaaacgaaatgttcagcaatgtcgtagacgcagggacctatgacacccattgccacatcatgccaaggcattcttccataatcggctttgctcagctcgttctgcttccagtcctgaacgtttttgaaatccatgacgcgattattgttgaaatcctgacccggccagacttcattagcaacgccttctgggtgcacatcagagagaatatgctgatggttgtcccagcggccaaaacatagatcaagaccaccaatgaatgccatggcgtagtcgattacaataaatttctcgtgatgagcccagtaaaaagtcatatccgctgcattctctaaaacgttgtgatcggggtggcgcatgattttgatgttaccatacccgggcgaaccttcaggacacaaactttgcagtgcatgtttggtgtgctcggaattacatgtcaaagcggcttcgacttcgcggtagacattgacgtagatcttgacaccagcctctgcacgacgtttcaatatgttatctaaacgccattcctggttttcatgtggaggtctcctcagaaacagttccggtgacagccaccagtccgcaatatagatggactccttggcctgttccagagctaccgagacagcctttgtg

SEQ ID NO: 23158 - DNA, 663 bp, Muscodor strobelii
  misc_feature: SGI cDNA ID NO. 567875
  misc_feature: Reduced expression when VOC is produced
  misc_feature: Encodes the peptide sequence at SEQ ID NO 23159
atgacgactatcggcgttttggcactacaagggggcttctctgaacatcttggcttgcttaagcgggcagctcatctgaaaagagatgattcgctcttcaactttatcgaagtgcgtacgcccgagcaactaagcacttgcgatgcattaatattacctggcggcgagagcacaactctttccctcgtagcggctcagtctggactaatggaaccactgcgagagtttgtcaaaactctcaataaaccagtatggggtacttgcgcaggtctgatattattatgtgaggaggcgagcgctactaagagaggtggacaggagcttgttggagggctcgacgtcaaggttcatcgtaatcatttcggccgccaactcaacagttttgttcgggatatcgagctgccttttctagactccacagaacagggaaagtctccattccccgccgtgttcatccgagctcccgttgtggagcatgtgctagagcattccgatcgtgtcgagattatggctacgattccgtctcctgacgagggtggagacattgtcgctttgagacaaggaaacgtgtttggcacaagcttccacccagagcttactgacgatgtgcgaattcatgcctggtggcttgatcaagtcttgagcgcgacctcgaatccttga

SEQ ID NO: 23159 - protein, 220 aa, Muscodor strobelii
  misc_feature: SGI Peptide ID NO. 567875
  misc_feature (40)..(204): Pfam Id: PF07685 Pfam Desc: CobB/CobQ-like glutamine amidotransferase domain
  misc_feature (6)..(215): Pfam Id: PF01174 Pfam Desc: SNO glutamine amidotransferase family
  misc_feature (40)..(97): Pfam Id: PF07685 Pfam Desc: CobB/CobQ-like glutamine amidotransferase domain
  misc_feature (3)..(216): NCBI GI: 170940097 Blast Desc: protein product [Podospora anserina]
  misc_feature (3)..(213): NCBI GI: 115443018 Blast Desc: glutamine amidotransferase subunit pdxT [Aspergillus terreus NIH2624] gi|114188185|gb|EAU29885.1| glutamine amidotransferase subunit pdxT [Aspergillus terreus NIH2624]
  misc_feature (3)..(214): NCBI GI: 256726770 Blast Desc: NECHADRAFT_32830 [Nectria haematococca mpVI 77-13-4]
  misc_feature (3)..(215): NCBI GI: 46121315 Blast Desc: FG05036.1 [Gibberella zeae PH-1]
  misc_feature (3)..(214): NCBI GI: 85106827 Blast Desc: pyridoxine-2 [Neurospora crassa OR74A] gi|12802368|gb|AAK07851.1|AF309689_13 Sno-type pyridoxine vitamin B6 biosynthetic protein SNO1 [Neurospora crassa] pyridoxine-2
  misc_feature (3)..(213): NCBI GI: 119480673 Blast Desc: pyridoxine [Neosartorya fischeri NRRL 181] gi|119408519|gb|EAW18468.1| pyridoxine [Neosartorya fischeri NRRL 181]
  misc_feature (3)..(213): NCBI GI: 71001022 Blast Desc: pyridoxine [Aspergillus fumigatus Af293] gi|66852830|gb|EAL93154.1| pyridoxine [Aspergillus fumigatus Af293] gi|159129281|gb|EDP54395.1| pyridoxine [Aspergillus A1163]
  misc_feature (3)..(216): NCBI GI: 255935631 Blast Desc: Pc13g04060 [Penicillium chrysogenum Wisconsin 54-1255] gi|211583462|emb|CAP91475.1| Pc13g04060 [Penicillium chrysogenum Wisconsin 54-1255]
  misc_feature (3)..(213): NCBI GI: 169783912 Blast Desc: [Aspergillus oryzae RIB40] gi|83775162|dbj|BAE65285.1| protein product [Aspergillus oryzae]
  misc_feature (3)..(213): NCBI GI: 238493739 Blast Desc: pyridoxine [Aspergillus flavus NRRL3357] gi|220696600|gb|EED52942.1| pyridoxine [Aspergillus flavus NRRL3357]
  misc_feature: Useful for introducing or modulating the production of volatile compounds
MTTIGVLALQGGFSEHLGLLKRAAHLKRDDSLFNFIEVRTPEQLSTCDALILPGGESTTLSLVAAQSGLMEPLREFVKTLNKPVWGTCAGLILLCEEASATKRGGQELVGGLDVKVHRNHFGRQLNSFVRDIELPFLDSTEQGKSPFPAVFIRAPVVEHVLEHSDRVEIMATIPSPDEGGDIVALRQGNVFGTSFHPELTDDVRIHAWWLDQVLSATSNP

SEQ ID NO: 23160 - DNA, 2730 bp, Muscodor strobelii
  misc_feature: SGI EST ID NO. CUFF.54502.0
  misc_feature: Variant of the nucleotide sequence at SEQ ID NO 23158
ttcgaattgaaatctattcatgcacggcgcttttgtttcggcgattcgaattaccttcgcggggtgtggttccggttgacgctggtcgaaccgggctaggatcattcatttctcaatcttgactagacccatgttgactgaaggcctttatcttgaatactcgcctataaggaactccaagtgtgacagcgagagtctagatgaagtcgaacggttctaattccaatatgacgactatcggcgttttggcactacaagggggcttctctgaacatcttggcttgcttaagcgggcagctcatctgaaaagagatgattcgctcttcaactttatcgaagtgcgtacgcccgagcaactaagcacttgcgatgcattaatattacctggcggcgagagcacaactctttccctcgtagcggctcagtctggactaatggaaccactgcgagagtttgtcaaaactctcaataaaccagtatggggtacttgcgcaggtctgatattattatgtgaggaggcgagcgctactaagagaggtggacaggagcttgttggagggctcgacgtcaaggttcatcgtaatcatttcggccgccaactcaacagttttgttcgggatatcgagctgccttttctagactccacagaacagggaaagtctccattccccgccgtgttcatccgagctcccgttgtggagcatgtgctagagcattccgatcgtgtcgagattatggctacgattccgtctcctgacgagggtggagacattgtcgctttgagacaaggaaacgtgtttggcacaagcttccacccagagcttactgacgatgtgcgaattcatgcctggtggcttgatcaagtcttgagcgcgacctcgaatccttgaggagcggataacagctgtatcaatacctatctcgcgagtctatttagagctggccatatgttctcgaagccgtcttctaatcactcccgcgaagctttcgaacagtatatggtcgtcaccttgaagccagtgaatgacgaccgtgggaggttgatctagagcagctttaagctcgatcctgatggagaatccaaatggacatgaggcagcatcttccgagaccgcaattttcgcttggtgtgtagcagtcatgttgcctctagccttcttgcgccgatatgcgcggctccaaacatcaccattagaaaagccaatacctctatgatcatgcttagtccaaacccaagaagccatgtctagagtcaggatgatactgttgagaagttcttcaatttgtgttacagaaatcaggcctttgccgaatgaatgttcgttgatcatgatttctgtggcgggaggtagcaatctcttggcgtcaggcatgctgtagccgcgacttgagctcatcgaaggtcgtctattcgcgaaactccatgctatagcccatcgacgtgtttttgttccttgaatgaaagtgttgatagcatagttgtcaatcttatgttctttgagtttaccaacgagtacttcgaggctcgactgcttacccagcatcgccgtgtaccattgaaccctttcattgatgagtatagactcttgcagtacgcgctggatgaagccgacctctccaccttcgcataccatttcattcggtgccccagtgcacgcagtatttggtggcttggacttctgagctgcgagactcgcgagttccctctctgaagcgtagaatggagggtttatcatgacgaagtcaatattgctcagaccgagctcatctagcggaatgagaggctcggaggctcgacgtgatacaatgcggatacggtgctcgagttcattgagtctcgcattagtacgagcatattgaagtgatgtggagtcgatatcagaagccacgaagtgccatgatgaccgctgtgcacatccgagtaaggggtatatcaaacttgcgccagtaccgatgtccagtcccatcacacgcctttcaggctcgaaacactccatataagacgtagaagagctatcaagtaggtctttcaaccacaagatataattgtgacggttgggtatcggaggacacaaacgattggatggcagattgatctgaagattgaagtccttcttgagaagagtctttgtcaattgcatgactgactttggatctgcaaagtctagttgcgatctattcttcaagacggcaccaaactcagggtgctccacaccgagttggtaaaagtcaggctctgtagagtataggtcttggaaatatttctctagatgcatgtctgactctactttctgcgttgatacagtcgttggcgattgccaggtggctataacaccttcacgatgcttagattcggatttaagtacagtgtgataagaagctggagtatgcttctggttggtactggtagtgccgttatcagagtgtcggacttgatctccggagtgcttgcgttttatgccgcgcacctctctagcttggcccattctcgatcgatggacatccttaattcttgatgagggagaaatggataattgtttccatataaagagtaggagtgggaagaatctcaagccattttggtaactagtcgaagaaagacgccgggcttgttgaacgacaacgggcagacctagctaggtaacttagtcagcacgtgatcatatttaggaaactccgtccacggcgtaactctggacaagcgatcattttttatgacgtccacatttg

SEQ ID NO: 23161 - DNA, 1557 bp, Muscodor strobelii
  misc_feature: SGI cDNA ID NO. 567876
  misc_feature: Reduced expression when VOC is produced
  misc_feature: Encodes the peptide sequence at SEQ ID NO 23162
atgggccaagctagagaggtgcgcggcataaaacgcaagcactccggagatcaagtccgacactctgataacggcactaccagtaccaaccagaagcatactccagcttcttatcacactgtacttaaatccgaatctaagcatcgtgaaggtgttatagccacctggcaatcgccaacgactgtatcaacgcagaaagtagagtcagacatgcatctagagaaatatttccaagacctatactctacagagcctgacttttaccaactcggtgtggagcaccctgagtttggtgccgtcttgaagaatagatcgcaactagactttgcagatccaaagtcagtcatgcaattgacaaagactcttctcaagaaggacttcaatcttcagatcaatctgccatccaatcgtttgtgtcctccgatacccaaccgtcacaattatatcttgtggttgaaagacctacttgatagctcttctacgtcttatatggagtgtttcgagcctgaaaggcgtgtgatgggactggacatcggtactggcgcaagtttgatataccccttactcggatgtgcacagcggtcatcatggcacttcgtggcttctgatatcgactccacatcacttcaatatgctcgtactaatgcgagactcaatgaactcgagcaccgtatccgcattgtatcacgtcgagcctccgagcctctcattccgctagatgagctcggtctgagcaatattgacttcgtcatgataaaccctccattctacgcttcagagagggaactcgcgagtctcgcagctcagaagtccaagccaccaaatactgcgtgcactggggcaccgaatgaaatggtatgcgaaggtggagaggtcggcttcatccagcgcgtactgcaagagtctatactcatcaatgaaagggttcaatggtacacggcgatgctgggtaagcagtcgagcctcgaagtactcgttggtaaactcaaagaacataagattgacaactatgctatcaacactttcattcaaggaacaaaaacacgtcgatgggctatagcatggagtttcgcgaatagacgaccttcgatgagctcaagtcgcggctacagcatgcctgacgccaagagattgctacctcccgccacagaaatcatgatcaacgaacattcattcggcaaaggcctgatttctgtaacacaaattgaagaacttctcaacagtatcatcctgactctagacatggcttcttgggtttggactaagcatgatcatagaggtattggcttttctaatggtgatgtttggagccgcgcatatcggcgcaagaaggctagaggcaacatgactgctacacaccaagcgaaaattgcggtctcggaagatgctgcctcatgtccatttggattctccatcaggatcgagcttaaagctgctctagatcaacctcccacggtcgtcattcactggcttcaaggtgacgaccatatactgttcgaaagcttcgcgggagtgattagaagacggcttcgagaacatatggccagctctaaatag

SEQ ID NO: 23162 - protein, 518 aa, Muscodor strobelii
  misc_feature: SGI Peptide ID NO. 567876
  misc_feature (65)..(359): Pfam Id: PF05971 Pfam Desc: Domain of function (DUF890)
  misc_feature (107)..(359): Pfam Id: PF05971 Pfam Desc: Domain of function (DUF890)
  misc_feature (74)..(512): NCBI GI: 171688132 Blast Desc: protein product [Podospora anserina] gi|170944028|emb|CAP70138.1| protein product [Podospora anserina]
  misc_feature (74)..(512): NCBI GI: 164424087 Blast Desc: NCU11362 [Neurospora crassa OR74A] gi|157070367|gb|EDO65037.1| [Neurospora crassa OR74A]
  misc_feature (78)..(514): NCBI GI: 242810215 Blast Desc: DUF890 domain protein [Talaromyces stipitatus ATCC 10500] gi|218716160|gb|EED15582.1| DUF890 domain protein [Talaromyces stipitatus ATCC 10500]
  misc_feature (78)..(513): NCBI GI: 212537101 Blast Desc: DUF890 domain protein [Penicillium marneffei ATCC 18224] gi|210068448|gb|EEA22539.1| DUF890 domain protein [Penicillium marneffei ATCC 18224]
  misc_feature (78)..(510): NCBI GI: 240107329 Blast Desc: CPC735_066140 [Coccidioides posadasii C735 delta SOWgp]
  misc_feature (80)..(510): NCBI GI: 255931919 Blast Desc: Pc12g06780 [Penicillium chrysogenum Wisconsin 54-1255] gi|211582135|emb|CAP80305.1| Pc12g06780 [Penicillium chrysogenum Wisconsin 54-1255]
  misc_feature (80)..(510): NCBI GI: 121711573 Blast Desc: DUF890 domain protein [Aspergillus clavatus NRRL 1] gi|119401553|gb|EAW11976.1| DUF890 domain protein [Aspergillus clavatus NRRL 1]
  misc_feature (74)..(516): NCBI GI: 39964161 Blast Desc: MGG_09820 [Magnaporthe grisea 70-15] gi|145011123|gb|EDJ95779.1| MGG_09820 [Magnaporthe grisea 70-15]
  misc_feature (80)..(510): NCBI GI: 225563441 Blast Desc: DUF890 domain-containing protein [Ajellomyces capsulatus G186AR]
  misc_feature (117)..(513): NCBI GI: 145237328 Blast Desc: An07g02250 [Aspergillus niger] gi|134075779|emb|CAK39316.1| protein product [Aspergillus niger]
  misc_feature (70)..(360): SWISSPROT Homolog: EC 2.1.1.48 rRNA (adenine-N(6)-)-methyltransferase
  misc_feature: Useful for introducing or modulating the production of volatile compounds
MGQAREVRGIKRKHSGDQVRHSDNGTTSTNQKHTPASYHTVLKSESKHREGVIATWQSPTTVSTQKVESDMHLEKYFQDLYSTEPDFYQLGVEHPEFGAVLKNRSQLDFADPKSVMQLTKTLLKKDFNLQINLPSNRLCPPIPNRHNYILWLKDLLDSSSTSYMECFEPERRVMGLDIGTGASLIYPLLGCAQRSSWHFVASDIDSTSLQYARTNARLNELEHRIRIVSRRASEPLIPLDELGLSNIDFVMINPPFYASERELASLAAQKSKPPNTACTGAPNEMVCEGGEVGFIQRVLQESILINERVQWYTAMLGKQSSLEVLVGKLKEHKIDNYAINTFIQGTKTRRWAIAWSFANRRPSMSSSRGYSMPDAKRLLPPATEIMINEHSFGKGLISVTQIEELLNSIILTLDMASWVWTKHDHRGIGFSNGDVWSRAYRRKKARGNMTATHQAKIAVSEDAASCPFGFSIRIELKAALDQPPTVVIHWLQGDDHILFESFAGVIRRRLREHMASSK

SEQ ID NO: 23163 - DNA, 2010 bp, Muscodor strobelii
  misc_feature: SGI cDNA ID NO. 567877
  misc_feature: Reduced expression when VOC is produced
  misc_feature: Encodes the peptide sequence at SEQ ID NO 23164
atgacgtcggtcgctcgtggcacgtcgctgcgagccggcggtgcctgtgtgcgctgccgcaagggcaaaaccaaatgtgtctacgaaaatggccgcgcaccttgcaagaactgtgcgaaaggactgcacgattgctatcttccgtccgagtctaattctcacgttcacggccagtcgcctgctagaatgccccgaccgagagagtcgctgccaggagagcgcaccgtgtcggccaacaatgatcggcagcctgccaactccggagcagttttaccacgcaacctccagaacagcaacgaaaaactcacaccagagctcatcgctgaatgtgagagggttatcaacaagacacttccctcatgcgtcgcattccacaagccttcttttctgcaaaagctcaaaaatggtctccttgagccaagcatcgtcaatggccttctgacgtgtgctgcacgaagttctacatctttaattcgtcgctatggtggtcagggcggcgctcaggcagccgcggagcattttgccgtcaagaccatcaatctggttatgcagaccctcgacaaccctaccttggcagacattcaggctctttgtctattgaccattcatgagtggggcaacagaaatgccgtccgcgcctatgtctacctaggacaagccgcgcgcatgacgcagatgttccgcataatatctggacatcagaaccgtggagatcccgatcagttcattaaggatgagtctttccgccggaccctatggcttatctacatcctagactgttttctcacaagcagccccggtcgtcacccggcagtcttacagcatgatatccaagatgttccactcccgtgtcctgacatgagctacaatttcggcacgcctgtggttgtacgaactttgggaggtggcccagcaagtgatcgaccggagggtaacggcaacccagtgtccgaagtaggcgagttcggtcatatcgtcatggcaacacaagcatggcgaaatgtcattgagatgctcactacagtcacacctgcgacgttttctgaggaaaggtgcgcctctctcgaggctggcattgaagctgttcgcaactctctgccgatgcatttcgccgacaagccgaaccacgtcaatctacatatcactatgggcagtggatacacctatgccatgcttcattgtctactgcattcggcaactatcatggttcaacgccgtcgcctcctacattttgttgcgactgacggcttcaatcatgagacctggcgcaatccccacgctcatcaagtgcattctcagactgtagatcgcgtctttgctgcatcgcacagtgttgtccaactccttcttgctctcgagggcaacattgacaaagactcaatgcctaacttcccccttgttatgttattcgcgtgcttcacagcttgtgcaactgtagcctggtttagtttgaagggcctgacaccagtcgatgtgaatgagacagccgaggctattgtcaacgatggcatgcgcttcctcgaagaaggtgctaacacgtgggttctagccgtgccatggtaccgtcaccttgccgtcatgtctaaggttctgcgcaacggtgagcgagatgctcgtcagcaagtccgcgagccagctccagcttccatcagagaggatactgcaagccaaccagaccgcaacccggagaacatggactacgagagacatatgcctgctcatcctcaagaattcggagagcacaatggttccgatcaaccacgcaaatcgggattcaccaccatcaacggcggatccgttggtgcaaccacaccggccaccacgacggccagtccccctgcacaaccaaaggccgagtcccctgtaacttcttcatctggcggtcaacacatggacccggcagcgagcattgaaccgaatgacatgactgcggccgagttgtgtaatgcattcgagcgccagcttctagagcttgatgacctagctgcttttatgggtggtggcgtttga

SEQ ID NO: 23164 - protein, 669 aa, Muscodor strobelii
  misc_feature: SGI Peptide ID NO. 567877
  misc_feature (190)..(287): Pfam Id: PF04082 Pfam Desc: Fungal specific transcription factor domain
  misc_feature (249)..(287): Pfam Id: PF04082 Pfam Desc: Fungal specific transcription factor domain
  misc_feature (1)..(669): NCBI GI: 116196950 Blast Desc: CHGG_05073 [Chaetomium globosum CBS 148.51] gi|88180986|gb|EAQ88454.1| CHGG_05073 [Chaetomium globosum CBS 148.51]
  misc_feature (94)..(669): NCBI GI: 171688144 Blast Desc: protein product [Podospora anserina] gi|170944034|emb|CAP70144.1| protein product [Podospora anserina]
  misc_feature (42)..(669): NCBI GI: 256726005 Blast Desc: [Nectria haematococca mpVI 77-13-4]
  misc_feature (101)..(669): NCBI GI: 164424077 Blast Desc: NCU11358 [Neurospora crassa OR74A] gi|157070362|gb|EDO65033.1| conserved [Neurospora crassa OR74A]
  misc_feature (88)..(669): NCBI GI: 145602739 Blast Desc: MGG_09825 [Magnaporthe grisea 70-15] gi|145011128|gb|EDJ95784.1| MGG_09825 [Magnaporthe grisea 70-15]
  misc_feature (101)..(669): NCBI GI: 46116722 Blast Desc: FG04203.1 [Gibberella zeae PH-1]
  misc_feature (233)..(503): NCBI GI: 261359912 Blast Desc: conserved [Verticillium albo-atrum VaMs.102]
  misc_feature (2)..(203): NCBI GI: 261359912 Blast Desc: conserved [Verticillium albo-atrum VaMs.102]
  misc_feature (10)..(580): NCBI GI: 256728842 Blast Desc: NECHADRAFT_79882 [Nectria haematococca mpVI 77-13-4]
  misc_feature (10)..(533): NCBI GI: 189200933 Blast Desc: [Pyrenophora tritici-repentis Pt-1C-BFP] gi|187983902|gb|EDU49390.1| [Pyrenophora tritici-repentis Pt-1C-BFP]
  misc_feature: Useful for introducing or modulating the production of volatile compounds
MTSVARGTSLRAGGACVRCRKGKTKCVYENGRAPCKNCAKGLHDCYLPSESNSHVHGQSPARMPRPRESLPGERTVSANNDRQPANSGAVLPRNLQNSNEKLTPELIAECERVINKTLPSCVAFHKPSFLQKLKNGLLEPSIVNGLLTCAARSSTSLIRRYGGQGGAQAAAEHFAVKTINLVMQTLDNPTLADIQALCLLTIHEWGNRNAVRAYVYLGQAARMTQMFRIISGHQNRGDPDQFIKDESFRRTLWLIYILDCFLTSSPGRHPAVLQHDIQDVPLPCPDMSYNFGTPVVVRTLGGGPASDRPEGNGNPVSEVGEFGHIVMATQAWRNVIEMLTTVTPATFSEERCASLEAGIEAVRNSLPMHFADKPNHVNLHITMGSGYTYAMLHCLLHSATIMVQRRRLLHFVATDGFNHETWRNPHAHQVHSQTVDRVFAASHSVVQLLLALEGNIDKDSMPNFPLVMLFACFTACATVAWFSLKGLTPVDVNETAEAIVNDGMRFLEEGANTWVLAVPWYRHLAVMSKVLRNGERDARQQVREPAPASIREDTASQPDRNPENMDYERHMPAHPQEFGEHNGSDQPRKSGFTTINGGSVGATTPATTTASPPAQPKAESPVTSSSGGQHMDPAASIEPNDMTAAELCNAFERQLLELDDLAAFMGGGV

SEQ ID NO: 23165 - DNA, 3353 bp, Muscodor strobelii
  misc_feature: SGI EST ID NO. CUFF.54534.1
  misc_feature: Variant of the nucleotide sequence at SEQ ID NO 23163
cgcgacttgtcacacacccgccttgtccgcgccccgctacccgcagcagcagccggtccgagtagaaatttaacacgcgcaacatcctcttttggtattttgtcgctagcgcctgagcctatccgccgggcctggcttctcacttttacgctctgcctagcacgtcaacagctacctcaggtctcttctggacaccggatcggctgatatctgtccgtctgtgccgcccgtttgccctcagaggcagaccacactcccttcactccagcccatcccatccctcttctcccccggaaccaacctattcatcagctgtgaggtcgttcccacccctgatttaatttagcagtacactctgttaatctcgcccctccctgttggctcgagaaggagaaaaatatcctccacttccgaccggggcgcacgctccctcgtgttcttgcatctcgcacatccacttcccaccgtcctcccccgatctctccgttcattctttttcccaccactcttccacctcccaccggaccttacttcggaccatcatcacggtctttttcggcctcatttattctcctcagtattcagactatcgatctacatcctcattcatcgccgataagtcaaaatgacgtcggtcgctcgtggcacgtcgctgcgagccggcggtgcctgtgtgcgctgccgcaagggcaaaaccaaatgtgtctacgaaaatggccgcgcaccttgcaagaactgtgcgaaaggactgcacgattgctatcttccgtccgagtctaattctcacgttcacggccagtcgcctgctagaatgccccgaccgagagagtcgctgccaggagagcgcaccgtgtcggccaacaatgatcggcagcctgccaactccggagcagttttaccacgcaacctccagaacagcaacgaaaaactcacaccagagctcatcgctgaatgtgagagggttatcaacaagacacttccctcatgcgtcgcattccacaagccttcttttctgcaaaagctcaaaaatggtctccttgagccaagcatcgtcaatggccttctgacgtgtgctgcacgaagttctacatctttaattcgtcgctatggtggtcagggcggcgctcaggcagccgcggagcattttgccgtcaagaccatcaatctggttatgcagaccctcgacaaccctaccttggcagacattcaggctctttgtctattgaccattcatgagtggggcaacagaaatgccgtccgcgcctatgtctacctaggacaagccgcgcgcatgacgcagatgttccgcataatatctggacatcagaaccgtggagatcccgatcagttcattaaggatgagtctttccgccggaccctatggcttatctacatcctagactgttttctcacaagcagccccggtcgtcacccggcagtcttacagcatgatatccaagatgttccactcccgtgtcctgacatgagctacaatttcggcacgcctgtggttgtacgaactttgggaggtggcccagcaagtgatcgaccggagggtaacggcaacccagtgtccgaagtaggcgagttcggtcatatcgtcatggcaacacaagcatggcgaaatgtcattgagatgctcactacagtcacacctgcgacgttttctgaggaaaggtgcgcctctctcgaggctggcattgaagctgttcgcaactctctgccgatgcatttcgccgacaagccgaaccacgtcaatctacatatcactatgggcagtggatacacctatgccatgcttcattgtctactgcattcggcaactatcatggttcaacgccgtcgcctcctacattttgttgcgactgacggcttcaatcatgagacctggcgcaatccccacgctcatcaagtgcattctcagactgtagatcgcgtctttgctgcatcgcacagtgttgtccaactccttcttgctctcgagggcaacattgacaaagactcaatgcctaacttcccccttgttatgttattcgcgtgcttcacagcttgtgcaactgtagcctggtttagtttgaagggcctgacaccagtcgatgtgaatgagacagccgaggctattgtcaacgatggcatgcgcttcctcgaagaaggtgctaacacgtgggttctagccgtgccatggtaccgtcaccttgccgtcatgtctaaggttctgcgcaacggtgagcgagatgctcgtcagcaagtccgcgagccagctccagcttccatcagagaggatactgcaagccaaccagaccgcaacccggagaacatggactacgagagacatatgcctgctcatcctcaagaattcggagagcacaatggttccgatcaaccacgcaaatcgggattcaccaccatcaacggcggatccgttggtgcaaccacaccggccaccacgacggccagtccccctgcacaaccaaaggccgagtcccctgtaacttcttcatctggcggtcaacacatggacccggcagcgagcattgaaccgaatgacatgactgcggccgagttgtgtaatgcattcgagcgccagcttctagagcttgatgacctagctgcttttatgggtggtggcgtttgaaacccatcaatgcagtacagctacttttgtcgctacattgctacttgatcttcttgcatgcgatcgtccgcatttgctgcgtatactctctattctgggacaagtgtctaccctcttgtgtacgcactgcatggatgaggcgtattcatgcaacgtgtacgttcttgctacggatgactctcagtccaccgtttctcattgtgtttcctcacagcaatgtgagtgcacacccaaaaagtgtaagctatattgtgttgaatgggttgagtggtttggggggcgttttccgttatggagtttggttgtctatctatacctggtcgctatgaagctgatgatttgtggttacggaaggcgttaaggtgtttggccaatatcaggttggctttggcttgctgaggccgatttcctgtgccaactgcgaatcaacagttcagcacgatgcaaactacaaaacttcgctgctatttgttgacgaatattatgggtacgcatgcacttgctcgctgctgtttgagtttcaccaaggcggggtgaatctttgtttgataccaggacgccgaataagcaaaactcgcgaataaactacttagtggttcagtagagtcctaccgtaaaattgagtgcatgatgtagcatacagagtggccgctggccctgtttgactgagagtgaaatctgccaagctaaacgtcattggttactaaattgcttgcga

SEQ ID NO: 23166 - DNA, 630 bp, Muscodor strobelii
  misc_feature: SGI cDNA ID NO. 567878
  misc_feature: Encodes the peptide sequence at SEQ ID NO 23167
atgcctaacttcccccttgttatgttattcgcgtgcttcacagcttgtgcaactgtagcctggtttagtttgaagggcctgacaccagtcgatgtgaatgagacagccgaggctattgtcaacgatggcatgcgcttcctcgaagaaggtgctaacacgtgggttctagccgtgccatggtaccgtcaccttgccgtcatgtctaaggttctgcgcaacggtgagcgagatgctcgtcagcaagtccgcgagccagctccagcttccatcagagaggatactgcaagccaaccagaccgcaacccggagaacatggactacgagagacatatgcctgctcatcctcaagaattcggagagcacaatggttccgatcaaccacgcaaatcgggattcaccaccatcaacggcggatccgttggtgcaaccacaccggccaccacgacggccagtccccctgcacaaccaaaggccgagtcccctgtaacttcttcatctggcggtcaacacatggacccggcagcgagcattgaaccgaatgacatgactgcggccgagttgtgtaatgcattcgagcgccagcttctagagcttgatgacctagctgcttttatgggtggtggcgtttga

SEQ ID NO: 23167 - protein, 209 aa, Muscodor strobelii
  misc_feature: SGI Peptide ID NO. 567878
  misc_feature (4)..(209): NCBI GI: 116196950 Blast Desc: CHGG_05073 [Chaetomium globosum CBS 148.51] gi|88180986|gb|EAQ88454.1| CHGG_05073 [Chaetomium globosum CBS 148.51]
  misc_feature (4)..(209): NCBI GI: 171688144 Blast Desc: protein product [Podospora anserina] gi|170944034|emb|CAP70144.1| protein product [Podospora anserina]
  misc_feature (1)..(209): NCBI GI: 256726005 Blast Desc: [Nectria haematococca mpVI 77-13-4]
  misc_feature (4)..(209): NCBI GI: 145602739 Blast Desc: MGG_09825 [Magnaporthe grisea 70-15] gi|145011128|gb|EDJ95784.1| MGG_09825 [Magnaporthe grisea 70-15]
  misc_feature (1)..(209): NCBI GI: 164424077 Blast Desc: NCU11358 [Neurospora crassa OR74A] gi|157070362|gb|EDO65033.1| conserved [Neurospora crassa OR74A]
  misc_feature (2)..(209): NCBI GI: 46116722 Blast Desc: FG04203.1 [Gibberella zeae PH-1]
  misc_feature (4)..(43): NCBI GI: 261359912 Blast Desc: conserved [Verticillium albo-atrum VaMs.102]
MPNFPLVMLFACFTACATVAWFSLKGLTPVDVNETAEAIVNDGMRFLEEGANTWVLAVPWYRHLAVMSKVLRNGERDARQQVREPAPASIREDTASQPDRNPENMDYERHMPAHPQEFGEHNGSDQPRKSGFTTINGGSVGATTPATTTASPPAQPKAESPVTSSSGGQHMDPAASIEPNDMTAAELCNAFERQLLELDDLAAFMGGGV

SEQ ID NO: 23168 - DNA, 3353 bp, Muscodor strobelii; identical to SEQ ID NO: 23165
  misc_feature: SGI EST ID NO. CUFF.54534.1
  misc_feature: Variant of the nucleotide sequence at SEQ ID NO 23166

SEQ ID NO: 23169 - DNA, 2469 bp, Muscodor strobelii
  misc_feature: SGI cDNA ID NO. 567879
  misc_feature: Elevated expression when VOC is produced
  misc_feature: Encodes the peptide sequence at SEQ ID NO 23170
atgtttggagccagtgtgcccgtggcctcttcggagagcattattgagaatgttcacgttgaccattcttgcgaatatcgcattcgtgatcttgccacgcgctctgtgactttgttcccatccaccgcccagattgttagaaatattgccaacgtcacactcaagaccggtacaaaccaagtgattatcaaaggtctgtcgccaactgtgatttctgactcaatcaaagttgaaggcacgggatctgctgtcatcactgatctcgctgtcgagctcctacccaacagggagatattcgaagaagtgtaccctgagacagatgacgaggacagtgtatctgacagtagttctgctgatgacgatgaccgtgacttttccaatgtgcctgatatcaaagatgtccgggacagaatccgtcagctagaggacgaaagaaaggtcgcatcagaggctgttcgaagtgccgagagccgcatgaagcttctggatgcacatggcggctcagttgcgaaagatcgcgagaacaaggtagatattaccgaagctctcgaaacgtaccgcattgagcgagagaaagtttttcgcgaccatttatcaggcaatgcaaaggacgctgaacttcgtgacaagattgcgtcactgaataaagaagaaagacgtcttatcaagcgtaccagcaaggatcgtgcgaaagctcgattagccaagaacaagatagtcgaaaaacagcgtcgcaaagaagatgagacgctcaaagagagacgccgtatccgttgggaaagagaatctttctggccaaggaaagtctacactgtaaaactgacgcttgaagttgccggcttcacaccttccacctctcgtcgtagctcaatcgcaagtgacattgcaaagcctgtgatagagatgccatcccaggatagcccagccaatgtcgaaaatgtcaactgcgatctgactttgagttatgtgactagctctgcattttggtcccctacttatgacctcgcgctgtcaacgaccaatggctctggcgttttgtactttgatgctcatttgacgaacaagacatcggaaaaatgggaagcctgcaaaatcatcctatctacttctcagaccgagtcttcgagtcttgcggaggccattccggagcttaagccatggcatgttcgtctggctgggaagggtaactttgcaaacgaggatgttttgtattctcgtgatgaagccttgcacacaggtctgatgaaacaacacaacgtgcaacactcaaagcagccacgatctgagttgtttggtttaggcaattctaaaagtcctttcagtcaaacactacaaatgcagaagcctcagactgctgctggtggtctcttcggtatgcaaacccagaaaaccagcgggtttggtaccagtcaacccaatcaagctcctcatccggtatcactgtttggcaactccggtaatcctccaatatctggacagccgcatgtacccgcagttgcatcggctctttttgggagcagtaccaatgccacaactgcggcgttcggatcatcgacttctacttcaagaagtggcgggggacttttcggtagtgctccagctagcagaccagcagaagtccacttgcctgctgaacatgatgacaacgtgcaagatagaaatgagcgtgttgctgataaaggcctcagagaaatcgacgaggccactcttgctgagccgcaaccggacctagaatttgaggagagtgttgtgggagaaacaggactcacgacgacatatgatctaccaggcgtacgatctctaccgccatcctcgacagtctcaaaacaacgtgttgttcgcatgacttattcaaatgttgtgttcaaacatgtcgttgtcgccaagcataggaaagcagcatttttgaaaacaagcgtgcgcaacagcagtaagcttactctattgaagggccagactagcctgacgctcgacggtagtttcttcgatcgaactatcctacctcgatgcagcccaggtgaatcgtttactctatcactcggagttgatccatccatacgcgtgacttattccaagccagaggtgaagcgcagctcgtcgtccatgttctcattgtcaaaagataatagcactctttacactcgtgtggtcacccttatgaatactcgaaccgatgcggaaggaaaacctgcacacattacattgttagaccagatacctgtcagcgaagatgagcaacttacaattgatctcctcaagcctaaaggacttgtgctcgatgggcctagagtcagttgtggtgaagacgcgcaaggctctacgtctactgcatggggcaaagccgacactcgcctcaaagccggcggcgaggtgttgtgggatgtcaaattgaatgcaggtaaaggcgtcaaatttgctcttgaatatacatgcacagtgccagcctttaatcaagccatcaacgcatga

SEQ ID NO: 23170 - protein, 822 aa, Muscodor strobelii
  misc_feature: SGI Peptide ID NO. 567879
  misc_feature (22)..(814): NCBI GI: 116196728 Blast Desc: CHGG_04962 [Chaetomium globosum CBS 148.51] gi|88180875|gb|EAQ88343.1| CHGG_04962 [Chaetomium globosum CBS 148.51]
  misc_feature (22)..(822): NCBI GI: 171676876 Blast Desc: protein product [Podospora anserina] gi|170936505|emb|CAP61165.1| protein product [Podospora anserina]
  misc_feature (25)..(822): NCBI GI: 156059226 Blast Desc: SS1G_03625 [Sclerotinia sclerotiorum 1980] gi|154701412|gb|EDO01151.1| SS1G_03625 [Sclerotinia sclerotiorum 1980]
  misc_feature (25)..(822): NCBI GI: 154317360 Blast Desc: BC1G_03582 [Botryotinia fuckeliana B05.10] gi|150844999|gb|EDN20192.1| BC1G_03582 [Botryotinia fuckeliana B05.10]
  misc_feature (22)..(820): NCBI GI: 242792166 Blast Desc: conserved [Talaromyces stipitatus ATCC 10500] gi|218718486|gb|EED17906.1| conserved [Talaromyces stipitatus ATCC 10500]
  misc_feature (22)..(820): NCBI GI: 242792171 Blast Desc: conserved [Talaromyces stipitatus ATCC 10500] gi|218718487|gb|EED17907.1| conserved [Talaromyces stipitatus ATCC 10500]
  misc_feature (22)..(820): NCBI GI: 212535148 Blast Desc: conserved [Penicillium marneffei ATCC 18224] gi|210070129|gb|EEA24219.1| conserved [Penicillium marneffei ATCC 18224]
  misc_feature (28)..(818): NCBI GI: 119500640 Blast Desc: NFIA_106680 [Neosartorya fischeri NRRL 181] gi|119415242|gb|EAW25180.1| conserved [Neosartorya fischeri NRRL 181]
  misc_feature (23)..(818): NCBI GI: 70994090 Blast Desc: conserved [Aspergillus fumigatus Af293] gi|66849526|gb|EAL89854.1| conserved [Aspergillus fumigatus Af293] gi|159125194|gb|EDP50311.1| conserved [Aspergillus A1163]
  misc_feature (20)..(408): NCBI GI: 46116718 Blast Desc: FG04201.1 [Gibberella zeae PH-1]
  misc_feature: Useful for introducing or modulating the production of volatile compounds
MFGASVPVASSESIIENVHVDHSCEYRIRDLATRSVTLFPSTAQIVRNIANVTLKTGTNQVIIKGLSPTVISDSIKVEGTGSAVITDLAVELLPNREIFEEVYPETDDEDSVSDSSSADDDDRDFSNVPDIKDVRDRIRQLEDERKVASEAVRSAESRMKLLDAHGGSVAKDRENKVDITEALETYRIEREKVFRDHLSGNAKDAELRDKIASLNKEERRLIKRTSKDRAKARLAKNKIVEKQRRKEDETLKERRRIRWERESFWPRKVYTVKLTLEVAGFTPSTSRRSSIASDIAKPVIEMPSQDSPANVENVNCDLTLSYVTSSAFWSPTYDLALSTTNGSGVLYFDAHLTNKTSEKWEACKIILSTSQTESSSLAEAIPELKPWHVRLAGKGNFANEDVLYSRDEALHTGLMKQHNVQHSKQPRSELFGLGNSKSPFSQTLQMQKPQTAAGGLFGMQTQKTSGFGTSQPNQAPHPVSLFGNSGNPPISGQPHVPAVASALFGSSTNATTAAFGSSTSTSRSGGGLFGSAPASRPAEVHLPAEHDDNVQDRNERVADKGLREIDEATLAEPQPDLEFEESVVGETGLTTTYDLPGVRSLPPSSTVSKQRVVRMTYSNVVFKHVVVAKHRKAAFLKTSVRNSSKLTLLKGQTSLTLDGSFFDRTILPRCSPGESFTLSLGVDPSIRVTYSKPEVKRSSSSMFSLSKDNSTLYTRVVTLMNTRTDAEGKPAHITLLDQIPVSEDEQLTIDLLKPKGLVLDGPRVSCGEDAQGSTSTAWGKADTRLKAGGEVLWDVKLNAGKGVKFALEYTCTVPAFNQAINA

SEQ ID NO: 23171 - DNA, 3459 bp, Muscodor strobelii
  misc_feature: SGI EST ID NO. CUFF.54518.1
  misc_feature: Variant of the nucleotide sequence at SEQ ID NO 23169
gtcgatttggaacttttagacttgtcatttgtcaaatcgtcatgtggaggggttgaaacggcaccttccagggtacggcgatacccaaatagctaatagagacaagggtcacaatctactttggggcaaacttcgggtgtctatggtcagaaagagacatattttgtgtctataatatttgaggttgaaacccgacgaagtctgatgtttcgataaaagcaaatccctttcagctaagcgcacgctgaagactggcgcatttctccagttcttggctgtggcccaatttgtcagcactgtagcagcatagaccagagaaacgcagtgcaccagtgcattttgcagccgcctttgtttccctttaggcagcaggtcggcagcctagcaaatcgacgggccaaggcagaatcgaagactcaccactacacaaaggcgccattaggttttcgaatgggaccaatgaaaggcgcaaatgttgtagggacagttttactataagtacagatagctccatcgattccgcttgattttcttctgttcctctacttaggtatcttagtatccatcattcttgacctactttacgtccatcatcatgtttggagccagtgtgcccgtggcctcttcggagagcattattgagaatgttcacgttgaccattcttgcgaatatcgcattcgtgatcttgccacgcgctctgtgactttgttcccatccaccgcccagattgttagaaatattgccaacgtcacactcaagaccggtacaaaccaagtgattatcaaaggtctgtcgccaactgtgatttctgactcaatcaaagttgaaggcacgggatctgctgtcatcactgatctcgctgtcgagctcctacccaacagggagatattcgaagaagtgtaccctgagacagatgacgaggacagtgtatctgacagtagttctgctgatgacgatgaccgtgacttttccaatgtgcctgatatcaaagatgtccgggacagaatccgtcagctagaggacgaaagaaaggtcgcatcagaggctgttcgaagtgccgagagccgcatgaagcttctggatgcacatggcggctcagttgcgaaagatcgcgagaacaaggtagatattaccgaagctctcgaaacgtaccgcattgagcgagagaaagtttttcgcgaccatttatcaggcaatgcaaaggacgctgaacttcgtgacaagattgcgtcactgaataaagaagaaagacgtcttatcaagcgtaccagcaaggatcgtgcgaaagctcgattagccaagaacaagatagtcgaaaaacagcgtcgcaaagaagatgagacgctcaaagagagacgccgtatccgttgggaaagagaatctttctggccaaggaaagtctacactgtaaaactgacgcttgaagttgccggcttcacaccttccacctctcgtcgtagctcaatcgcaagtgacattgcaaagcctgtgatagagatgccatcccaggatagcccagccaatgtcgaaaatgtcaactgcgatctgactttgagttatgtgactagctctgcattttggtcccctacttatgacctcgcgctgtcaacgaccaatggctctggcgttttgtactttgatgctcatttgacgaacaagacatcggaaaaatgggaagcctgcaaaatcatcctatctacttctcagaccgagtcttcgagtcttgcggaggccattccggagcttaagccatggcatgttcgtctggctgggaagggtaactttgcaaacgaggatgttttgtattctcgtgatgaagccttgcacacaggtctgatgaaacaacacaacgtgcaacactcaaagcagccacgatctgagttgtttggtttaggcaattctaaaagtcctttcagtcaaacactacaaatgcagaagcctcagactgctgctggtggtctcttcggtatgcaaacccagaaaaccagcgggtttggtaccagtcaacccaatcaagctcctcatccggtatcactgtttggcaactccggtaatcctccaatatctggacagccgcatgtacccgcagttgcatcggctctttttgggagcagtaccaatgccacaactgcggcgttcggatcatcgacttctacttcaagaagtggcgggggacttttcggtagtgctccagctagcagaccagcagaagtccacttgcctgctgaacatgatgacaacgtgcaagatagaaatgagcgtgttgctgataaaggcctcagagaaatcgacgaggccactcttgctgagccgcaaccggacctagaatttgaggagagtgttgtgggagaaacaggactcacgacgacatatgatctaccaggcgtacgatctctaccgccatcctcgacagtctcaaaacaacgtgttgttcgcatgacttattcaaatgttgtgttcaaacatgtcgttgtcgccaagcataggaaagcagcatttttgaaaacaagcgtgcgcaacagcagtaagcttactctattgaagggccagactagcctgacgctcgacggtagtttcttcgatcgaactatcctacctcgatgcagcccaggtgaatcgtttactctatcactcggagttgatccatccatacgcgtgacttattccaagccagaggtgaagcgcagctcgtcgtccatgttctcattgtcaaaagataatagcactctttacactcgtgtggtcacccttatgaatactcgaaccgatgcggaaggaaaacctgcacacattacattgttagaccagatacctgtcagcgaagatgagcaacttacaattgatctcctcaagcctaaaggacttgtgctcgatgggcctagagtcagttgtggtgaagacgcgcaaggctctacgtctactgcatggggcaaagccgacactcgcctcaaagccggcggcgaggtgttgtgggatgtcaaattgaatgcaggtaaaggcgtcaaatttgctcttgaatatacatgcacagtgccagcctttaatcaagccatcaacgcatgatgtctgctgactctatgtattcgccaccgtgattcacttgattactgttttgtttgactagagcgcggaaaaaagaaagaaaaggagatattgggcatgggaggacaacatggaagagaagagaagatgggaggaaatgaaaccaaacaaagaggaataggaatcgtgccaatctcgcagatagttcgcatcatgtaatgactctttttcaccattcttcgacaatcgtaatacatatcgaaggcagagtcttacccttgagttagtctctagctgtgaacgactgagtatcttgaagagaaaacataattgtgagcgcagaacacacttcccgtctacgtacacagacaacctaaccattcaccctcatcatacagaatagatagcttagtaat

SEQ ID NO: 23172 - DNA, 1314 bp, Muscodor strobelii
  misc_feature: SGI cDNA ID NO. 567880
  misc_feature: Encodes the peptide sequence at SEQ ID NO 23173
atggatcgctattcacctggaagtcagaggcatggtgagtacatgatgttcggagcactgaatgatgacaaccatcgaagtcagagaaccccatcaagttatcacagatctctatattacgacttccttcaactgcctcgcccggccgcaagcatcgatgactcagatgaccctaacgactacgaggcattgcggcaaatatatttcttgtggtcagattttccctctgctgccaataaccctcctcgaacagcagcatcgtccactgtcgaaagtgttccgcgctcggcattttcaaacccaggatctccaccggtttctaggaacttcactgcaagacgaccccaatctccagtcaggccccattcatatcgttttccagcgatatatccgctttcgccaaatcttccccaggtgtctccttcacgacaaccaccagtgcgctttgcatcgtcagcccaaggtcctccccgatctccttctccaccgaacgtgcgattcgacggacctccctcgcctccgtttccatatcccccaccacctgatccaggaagccccggaccgggcggcccaccacctccacggggaccagaccccagaagatactggcctaacggtcctccatcccatcccttttatttccacctgaacatgtcttcgtctctgcagaatttatctctcattcgagaccgtccggtcattgtgatgctccggccgggagcccgaggctacatctgcaaccgcgccgatataatcgagcacctacccaacacccgctcaacgcccttcggccgcaactttcgcccccagatcgcataccaaaacatggggcctagcgtcctcgaagccctcgaggctcttttcagcggtcttgagcggtatcggacaacaggtcagaccttgtatctcttcgaaaccgcacggcattgtctcttcaacgacaataaccgggcatttcccaagtgctacgagttcttcgtcggggcctgcaatgcgctcgactctgagtacgggttaggatgtagtgaggcgctgctacagcagatcgatgacttcgctattgatctgatgtattctcacgatatcggccattttaataaggagaggcttgtcactttcttcatggcgtactcaaaggtctttcagcctagtacgcagaggcatatggatacactacggcagctgtataattccgtgccggtgcagattaggtctggattggtagcgcggttggcgggttatttggatgttaggagtcagaggagtaatccgaatgttatgtttcgggctatgagggatatgggtatggcttga

SEQ ID NO: 23173 - protein, 437 aa, Muscodor strobelii
  misc_feature: SGI Peptide ID NO. 567880
MDRYSPGSQRHGEYMMFGALNDDNHRSQRTPSSYHRSLYYDFLQLPRPAASIDDSDDPNDYEALRQIYFLWSDFPSAANNPPRTAASSTVESVPRSAFSNPGSPPVSRNFTARRPQSPVRPHSYRFPAIYPLSPNLPQVSPSRQPPVRFASSAQGPPRSPSPPNVRFDGPPSPPFPYPPPPDPGSPGPGGPPPPRGPDPRRYWPNGPPSHPFYFHLNMSSSLQNLSLIRDRPVIVMLRPGARGYICNRADIIEHLPNTRSTPFGRNFRPQIAYQNMGPSVLEALEALFSGLERYRTTGQTLYLFETARHCLFNDNNRAFPKCYEFFVGACNALDSEYGLGCSEALLQQIDDFAIDLMYSHDIGHFNKERLVTFFMAYSKVFQPSTQRHMDTLRQLYNSVPVQIRSGLVARLAGYLDVRSQRSNPNVMFRAMRDMGMA

SEQ ID NO: 23174 - DNA, 1955 bp, Muscodor strobelii
  misc_feature: SGI EST ID NO. CUFF.54535.0
  misc_feature: Variant of the nucleotide sequence at SEQ ID NO 23172
gttgttggccaggtcggtcagcgcgttgtagaagctgtcgccaaacacctggctcacgaacaacaatgggcagcaacacttcaatggccctgcgcagaggttggcctcgcaatgcaagcacaggtgcccagataagaacctgaggcgaagattacgaacggatcgccacggtactaaagcgaactttggcattagaactgccaggttcgtatcaatagatgaattcggtatatgaatcgggaggctgtacagctctggaaccaaacttagtcttccaggcgtggacaaatacacatgtcccacaatcagaagcaaactttctccatccccgaacagttgcttgctccaatgaagcggcaagctcaaatggagcaaattcttagagtattaaaaaggatctctttcatattggtcctgatgtattgaaacaataccagcaaatccaaattgccgacatggatcgctattcacctggaagtcagaggcatggtgagtacatgatgttcggagcactgaatgatgacaaccatcgaagtcagagaaccccatcaagttatcacagatctctatattacgacttccttcaactgcctcgcccggccgcaagcatcgatgactcagatgaccctaacgactacgaggcattgcggcaaatatatttcttgtggtcagattttccctctgctgccaataaccctcctcgaacagcagcatcgtccactgtcgaaagtgttccgcgctcggcattttcaaacccaggatctccaccggtttctaggaacttcactgcaagacgaccccaatctccagtcaggccccattcatatcgttttccagcgatatatccgctttcgccaaatcttccccaggtgtctccttcacgacaaccaccagtgcgctttgcatcgtcagcccaaggtcctccccgatctccttctccaccgaacgtgcgattcgacggacctccctcgcctccgtttccatatcccccaccacctgatccaggaagccccggaccgggcggcccaccacctccacggggaccagaccccagaagatactggcctaacggtcctccatcccatcccttttatttccacctgaacatgtcttcgtctctgcagaatttatctctcattcgagaccgtccggtcattgtgatgctccggccgggagcccgaggctacatctgcaaccgcgccgatataatcgagcacctacccaacacccgctcaacgcccttcggccgcaactttcgcccccagatcgcataccaaaacatggggcctagcgtcctcgaagccctcgaggctcttttcagcggtcttgagcggtatcggacaacaggtcagaccttgtatctcttcgaaaccgcacggcattgtctcttcaacgacaataaccgggcatttcccaagtgctacgagttcttcgtcggggcctgcaatgcgctcgactctgagtacgggttaggatgtagtgaggcgctgctacagcagatcgatgacttcgctattgatctgatgtattctcacgatatcggccattttaataaggagaggcttgtcactttcttcatggcgtactcaaaggtctttcagcctagtacgcagaggcatatggatacactacggcagctgtataattccgtgccggtgcagattaggtctggattggtagcgcggttggcgggttatttggatgttaggagtcagaggagtaatccgaatgttatgtttcgggctatgagggatatgggtatggcttgatagcggattttgtcgatgggggtttgttggcgcggtttgtactttgggaacgcttatcggcatagatgttatagccgaaaaatactgggcgattgggagaactgttgacctcagttgtaagtacggcttagattacattccagagtgaaaatttgaatagtcatccatgaaagaccattctctcag

SEQ ID NO: 23175 - DNA, 777 bp, Muscodor strobelii
  misc_feature: SGI cDNA ID NO. 567881
  misc_feature: Encodes the peptide sequence at SEQ ID NO 23176
atggtcttccaacaaccccaaaccccaacgccctccctcccgctaacatccgctccccaaactctaccgggctccttcccaacctccttcccaaccgccttcccagaccaaccccaagcacagtcacaatcacagatccaatcacgaatagagcgaccaccagcgatagagagaccaatagtgatagagcgtcccatagctccctcccccttcatagggagcgacataaagtccctacgcacagcatgcgaattctcactccgcgaactcgtgacgctgcagaagcggcgtcacgagaacatgacgagcgaagagcggctgagagcacaggccggtatcgcggttagtgacttgagggctttgaagagtcttgttgcggggttggttaagagtgctgagggtaaacggggcgggaagtggattttgggggttgctatcgcggcgataatcccaggggtccgtaaactattccggcgttcctcagatgctgaatcacagacttctgccaacgacactgaatacgcgtttaagaagagtaagacactcatctcaaggatcaaagactcaatacatgggacgtcgaggttagccagcatcgccatgtttgtattggctgtgctgtatgtgtttcagagtgaggtttcgttgagagttgctaggactatgaataagaggcttaagaagttggtgggcaagatagaacggggcgagggagatgtgaaagaggaggatgtgaagattttaggcggttggcggtggaggatcttgctttggtga

SEQ ID NO: 23176 - protein, 258 aa, Muscodor strobelii
  misc_feature: SGI Peptide ID NO. 567881
  misc_feature (3)..(258): NCBI GI: 256725598 Blast Desc: NECHADRAFT_61815 [Nectria haematococca mpVI 77-13-4]
  misc_feature (12)..(258): NCBI GI: 46116714 Blast Desc: FG04199.1 [Gibberella zeae PH-1]
  misc_feature (9)..(257): NCBI GI: 261359881 Blast Desc: conserved [Verticillium albo-atrum VaMs.102]
  misc_feature (104)..(258): NCBI GI: 116196730 Blast Desc: CHGG_04963 [Chaetomium globosum CBS 148.51] gi|88180876|gb|EAQ88344.1| CHGG_04963 [Chaetomium globosum CBS 148.51]
  misc_feature (69)..(256): NCBI GI: 171676878 Blast Desc: protein product [Podospora anserina] gi|170936506|emb|CAP61166.1| protein product [Podospora anserina]
  misc_feature (75)..(256): NCBI GI: 85104619 Blast Desc: NCU06515 [Neurospora crassa OR74A] gi|28923344|gb|EAA32536.1| NCU06515 [Neurospora crassa OR74A]
  misc_feature (75)..(256): NCBI GI: 145602735 Blast Desc: MGG_14162 [Magnaporthe grisea 70-15] gi|145011126|gb|EDJ95782.1| MGG_14162 [Magnaporthe grisea 70-15]
MVFQQPQTPTPSLPLTSAPQTLPGSFPTSFPTAFPDQPQAQSQSQIQSRIERPPAIERPIVIERPIAPSPFIGSDIKSLRTACEFSLRELVTLQKRRHENMTSEERLRAQAGIAVSDLRALKSLVAGLVKSAEGKRGGKWILGVAIAAIIPGVRKLFRRSSDAESQTSANDTEYAFKKSKTLISRIKDSIHGTSRLASIAMFVLAVLYVFQSEVSLRVARTMNKRLKKLVGKIERGEGDVKEEDVKILGGWRWRILLW

SEQ ID NO: 23177 - DNA, 2146 bp, Muscodor strobelii
  misc_feature: SGI EST ID NO. CUFF.54581.0
  misc_feature: Variant of the nucleotide sequence at SEQ ID NO 23175
cgactcaccgacttcagctcatactgatactcatacctaactttctctcttaacagaaaacattacacatattcacatcagaccccaattgtgaagcaaactaacaccacaatcacatctccatcacaccatctcagtcccacaacggcccggaccgcacccgtgtacataatatccgcccctcccccacgtttcgtcttggggcaacactcaatactcacaaaccacatcctcaccatccaaatggtcttccaacaaccccaaaccccaacgccctccctcccgctaacatccgctccccaaactctaccgggctccttcccaacctccttcccaaccgccttcccagaccaaccccaagcacagtcacaatcacagatccaatcacgaatagagcgaccaccagcgatagagagaccaatagtgatagagcgtcccatagctccctcccccttcatagggagcgacataaagtccctacgcacagcatgcgaattctcactccgcgaactcgtgacgctgcagaagcggcgtcacgagaacatgacgagcgaagagcggctgagagcacaggccggtatcgcggttagtgacttgagggctttgaagagtcttgttgcggggttggttaagagtgctgagggtaaacggggcgggaagtggattttgggggttgctatcgcggcgataatcccaggggtccgtaaactattccggcgttcctcagatgctgaatcacagacttctgccaacgacactgaatacgcgtttaagaagagtaagacactcatctcaaggatcaaagactcaatacatgggacgtcgaggttagccagcatcgccatgtttgtattggctgtgctgtatgtgtttcagagtgaggtttcgttgagagttgctaggactatgaataagaggcttaagaagttggtgggcaagatagaacggggcgagggagatgtgaaagaggaggatgtgaagattttaggcggttggcggtggaggatcttgctttggtgagggatggcatgttgttatctgttgcgttttggtatagagtgaacatttatgtttgtgttttggtctttggcattagactttgctccatagatctgtcatacggcataagatctacgtgacacgatacatacgctgtgatagcaggccttccagtccaacccaaggggaccggtatatctatacaacgccattccgaactcgtgatcataatacaaggcccacaccatttgtttgccagtctcactcttccgtgactcctcaaactgggtatctacatcgttacacaaccaacttgctcttcagacacaggctaataatggccattggtatcatggttcatgaagtcacctaactgcaaccttgtcatgccttccctgacgctccctacatcgcccgcgactcggagaataccctgctcaaagtctctcaagacagccaccaactcttgtatcttctcgtctgagctcgtcgttccattgttcttagtcgccatcagtctcgccagttgttcgttgagattatctgccacgccgtgtgtatgtaactctatttccgtcaagttgttctcgtacttcttcatctgctctgccatctcgtcggctgtcttggagaagaagccgaccagatcttgcccgtcggtctcggtattagcgttactcgacgaaggctgtcttgccgaccagaagccggaagtgtgatactgctgggggagcttcatgttgtcgatagcacggaagctgaggcgtgcattatcagcgtcttggttgactaggagcctagcggcctcgatggactgggcagcagattcgagcgcgtttcgggcgccgtcatatttcctcgtcacgaacttgacgtcctcgggaatgctctcgagcatctgctggtgtccggggagaaaggagtcgatctcgttcttcctcgagatctgggctaggatgaactcgtctgacttctctattatcttctgcagatcctcctgcaaatcattgaagcgagtggtccccttaagattgctgacatcaatgcgtacacctggaacactgggctgggcattctgctgacccatggtcaacccgatcccgcccagactcatggatggctgtggctgtggctgctgctgtgcttg

SEQ ID NO: 23178 - DNA, 1230 bp, Muscodor strobelii
  misc_feature: SGI cDNA ID NO. 567882
  misc_feature: Encodes the peptide sequence at SEQ ID NO 23179
atgttccagcgttcagccagcggcccagcaggaggcttgagtatcaacaccggctctgcaaatatgtttggctcttcgacagctcagcaacctgcctctggcggcttgtttggtagcaccgcccagtccacaaacacaaccgccccgaagccaggcggtctctttggcaactctctctccgtcccgaccgccacccaacctcagcagaccagcaacggggaggaggagggctttttcggtggtggcgcttccaatactgctgctgctcagccaagtactgctcccactggtggcttatttggtggtctctcttccactgctcagcccgctcaacctgctatgggaggcggtttgctcggccaacccacacaacagcagccgagtgcctttggtggtttcgggagcacattgggtcaagcacagcagcagccacagccacagccatccatgagtctgggcgggatcgggttgaccatgggtcagcagaatgcccagcccagtgttccaggtgtacgcattgatgtcagcaatcttaaggggaccactcgcttcaatgatttgcaggaggatctgcagaagataatagagaagtcagacgagttcatcctagcccagatctcgaggaagaacgagatcgactcctttctccccggacaccagcagatgctcgagagcattcccgaggacgtcaagttcgtgacgaggaaatatgacggcgcccgaaacgcgctcgaatctgctgcccagtccatcgaggccgctaggctcctagtcaaccaagacgctgataatgcacgcctcagcttccgtgctatcgacaacatgaagctcccccagcagtatcacacttccggcttctggtcggcaagacagccttcgtcgagtaacgctaataccgagaccgacgggcaagatctggtcggcttcttctccaagacagccgacgagatggcagagcagatgaagaagtacgagaacaacttgacggaaatagagttacatacacacggcgtggcagataatctcaacgaacaactggcgagactgatggcgactaagaacaatggaacgacgagctcagacgagaagatacaagagttggtggctgtcttgagagactttgagcagggtattctccgagtcgcgggcgatgtagggagcgtcagggaaggcatgacaaggttgcagttaggtgacttcatgaaccatgataccaatggccattattag

SEQ ID NO: 23179 - protein, 409 aa, Muscodor strobelii
  misc_feature: SGI Peptide ID NO. 567882
  misc_feature (1)..(403): NCBI GI: 171688120 Blast Desc: protein product [Podospora anserina] gi|170944022|emb|CAP70132.1| protein product [Podospora anserina]
  misc_feature (4)..(400): NCBI GI: 154317677 Blast Desc: BC1G_03190 [Botryotinia fuckeliana B05.10] gi|150844364|gb|EDN19557.1| BC1G_03190 [Botryotinia fuckeliana B05.10]
  misc_feature (156)..(403): NCBI GI: 145616595 Blast Desc: MGG_10698 [Magnaporthe grisea 70-15] gi|145009412|gb|EDJ94112.1| MGG_10698 [Magnaporthe grisea 70-15]
  misc_feature (19)..(400): NCBI GI: 156031273 Blast Desc: SS1G_14058 [Sclerotinia sclerotiorum 1980] gi|154699460|gb|EDN99198.1| SS1G_14058 [Sclerotinia sclerotiorum 1980]
  misc_feature (1)..(403): NCBI GI: 258572658 Blast Desc: conserved [Uncinocarpus reesii 1704] gi|237905361|gb|EEP79762.1| conserved [Uncinocarpus reesii 1704]
  misc_feature (1)..(403): NCBI GI: 240108863 Blast Desc: CPC735_023680 [Coccidioides posadasii C735 delta SOWgp]
  misc_feature (1)..(403): NCBI GI: 119175734 Blast Desc: CIMG_09669 [Coccidioides immitis RS]
  misc_feature (9)..(398): NCBI GI: 121699824 Blast Desc: nucleoporin NUP49/NSP49, [Aspergillus clavatus NRRL 1] gi|119396319|gb|EAW06751.1| nucleoporin NUP49/NSP49, [Aspergillus clavatus NRRL 1]
  misc_feature (28)..(398): NCBI GI: 159124529 Blast Desc: nucleoporin NUP49/NSP49, [Aspergillus fumigatus A1163]
  misc_feature (1)..(398): NCBI GI: 239614812 Blast Desc: nucleoporin NUP49/NSP49 [Ajellomyces dermatitidis ER-3]
MFQRSASGPAGGLSINTGSANMFGSSTAQQPASGGLFGSTAQSTNTTAPKPGGLFGNSLSVPTATQPQQTSNGEEEGFFGGGASNTAAAQPSTAPTGGLFGGLSSTAQPAQPAMGGGLLGQPTQQQPSAFGGFGSTLGQAQQQPQPQPSMSLGGIGLTMGQQNAQPSVPGVRIDVSNLKGTTRFNDLQEDLQKIIEKSDEFILAQISRKNEIDSFLPGHQQMLESIPEDVKFVTRKYDGARNALESAAQSIEAARLLVNQDADNARLSFRAIDNMKLPQQYHTSGFWSARQPSSSNANTETDGQDLVGFFSKTADEMAEQMKKYENNLTEIELHTHGVADNLNEQLARLMATKNNGTTSSDEKIQELVAVLRDFEQGILRVAGDVGSVREGMTRLQLGDFMNHDTNGHY

SEQ ID NO: 23180 - DNA, 2980 bp, Muscodor strobelii
  misc_feature: SGI EST ID NO. CUFF.54582.1
  misc_feature: Variant of the nucleotide sequence at SEQ ID NO 23178
ctttccgcctggaatgataggtaacttgattcagaaatgcattgaaggagtgctatccccaaaccagtgccgaccgtccaaacaacagctagccgtcgattgagccaaacactccaccctaccctgtaccaccctctgcgtttgtcgattgccatagtagtcgagttgcacagctgcccgagctgtcgctacccatctcggccatgttccagcgttcagccagcggcccagcaggaggcttgagtatcaacaccggctctgcaaatatgtttggctcttcgacagctcagcaacctgcctctggcggcttgtttggtagcaccgcccagtccacaaacacaaccgccccgaagccaggcggtctctttggcaactctctctccgtcccgaccgccacccaacctcagcagaccagcagtctgttcgcatctacagcaacccccgcttccacagcccaggcgcccaagtccctcttcggcgctgcagcgccaacccagtctcaacccgccgccccaacctctagtctcttcggatcctccgccgcccctgcccagacggggaggaggagggctttttcggtggtggcgcttccaatactgctgctgctcagccaagtactgctcccactggtggcttatttggtggtctctcttccactgctcagcccgctcaacctgctatgggaggcggtttgctcggccaacccacacaacagcagccgagtgcctttggtggtttcgggagcacattgggtcaagcacagcagcagccacagccacagccatccatgagtctgggcgggatcgggttgaccatgggtcagcagaatgcccagcccagtgttccaggtgtacgcattgatgtcagcaatcttaaggggaccactcgcttcaatgatttgcaggaggatctgcagaagataatagagaagtcagacgagttcatcctagcccagatctcgaggaagaacgagatcgactcctttctccccggacaccagcagatgctcgagagcattcccgaggacgtcaagttcgtgacgaggaaatatgacggcgcccgaaacgcgctcgaatctgctgcccagtccatcgaggccgctaggctcctagtcaaccaagacgctgataatgcacgcctcagcttccgtgctatcgacaacatgaagctcccccagcagtatcacacttccggcttctggtcggcaagacagccttcgtcgagtaacgctaataccgagaccgacgggcaagatctggtcggcttcttctccaagacagccgacgagatggcagagcagatgaagaagtacgagaacaacttgacggaaatagagttacatacacacggcgtggcagataatctcaacgaacaactggcgagactgatggcgactaagaacaatggaacgacgagctcagacgagaagatacaagagttggtggctgtcttgagagactttgagcagggtattctccgagtcgcgggcgatgtagggagcgtcagggaaggcatgacaaggttgcagttaggtgacttcatgaaccatgataccaatggccattattagcctgtgtctgaagagcaagttggttgtgtaacgatgtagatacccagtttgaggagtcacggaagagtgagactggcaaacaaatggtgtgggccttgtattatgatcacgagttcggaatggcgttgtatagatataccggtccccttgggttggactggaaggcctgctatcacagcgtatgtatcgtgtcacgtagatcttatgccgtatgacagatctatggagcaaagtctaatgccaaagaccaaaacacaaacataaatgttcactctataccaaaacgcaacagataacaacatgccatccctcaccaaagcaagatcctccaccgccaaccgcctaaaatcttcacatcctcctctttcacatctccctcgccccgttctatcttgcccaccaacttcttaagcctcttattcatagtcctagcaactctcaacgaaacctcactctgaaacacatacagcacagccaatacaaacatggcgatgctggctaacctcgacgtcccatgtattgagtctttgatccttgagatgagtgtcttactcttcttaaacgcgtattcagtgtcgttggcagaagtctgtgattcagcatctgaggaacgccggaatagtttacggacccctgggattatcgccgcgctggtgtttgtgtaagtaagtatagtgtcgtcgtcttctttcttcacattggcgtgcggcatattcacaaatatactcacatagcaacccccaaaatccacttcccgccccgtttaccctcagcactcttaaccaaccccgcaacaagactcttcaaagccctcaagtcactaaccgcgataccggcctgtgctctcagccgctcttcgctcgtcatgttctcgtgacgccgcttctgcagcgtcacgagttcgcggagtgagaattcgcatgctgtgcgtagggactttatgtcgctccctatgaagggggagggagctatgggacgctctatcactattggtctctctatcgctggtggtcgctctattcgtgattggatctgtgattgtgactgtgcttggggttggtctgggaaggcggttgggaaggaggttgggaaggagcccggtagagtttggggagcggatgttagcgggagggagggcgttggggtttggggttgttggaagaccatttggatggtgaggatgtggtttgtgagtattgagtgttgccccaagacgaaacgtgggggaggggcggatattatgtacacgggtgcggtccgggccgttgtgggactgagatggtgtgatggagatgtgattgtggtgttagtttgcttcacaattggggtctgatgtgaatatgtgtaatgttttctgttaagagagaaagttaggtatgagtatcagtatgagctgaagtcggtgagtcg

SEQ ID NO: 23181 - DNA, 966 bp, Muscodor strobelii
  misc_feature: SGI cDNA ID NO. 567883
  misc_feature: Encodes the peptide sequence at SEQ ID NO 23182
atggagatcgacgatgacgatgatttctacgcccctgaggagcctaccacagcagccgctgaagctgcacaggctgcccaggctgcccaggcaaatgctgctgcccacactgcagctgcgcaccacgatgaggatctagaggagggcgaagaggaggaggatggggctgagatggaagactctgactctgacatcgacattatcacagagcgcaaggacggcactaatgcgccgccgcccacacaatcacgatatagcgacatcagaaatattccccagcgatcgacgtccaccgacacatccacaaaggcgccagtcaagaaagaacagccctctaaaagcacccctaccgccgagctgccacctgtctcaacatctaagatagatgtccatgcgatccccatccacaaagccacaggcaagcccatcacacaggtcaacattgacacagatctcccagacaacgacaagccttggagaaagcccggcaccgacctcagcgactatttcaattatggctttgatgagttcacctgggcactctacgccgccaagcaggacaacgtgcgcggcgagtttagccaagatgccattgctcagaataacaagaagatgatggaggagatgcagatgatgatgatgggtggcatgcccatgggtggagccggggcgggcagcgccatgcagagtatgcccggcatggacggaatgcctcctgagttccaggccatgatgcagcagatgatggcatcgggtatggatcccagccagatggacccttcagccatgtcggccatgttcgctggcatgcaaggtggcggcgctggagccggtcagggacagaaccagaacttcggccagggtggcaaccagggccagaactttggatacgatggacaaggaatgggcggcggccgtggtggaggctttggcggtcgtggccgtcgcggtgggagaaactggtga

SEQ ID NO: 23182 - protein, 321 aa, Muscodor strobelii
  misc_feature: SGI Peptide ID NO. 567883
  misc_feature (144)..(206): Pfam Id: PF05182 Pfam Desc: Fip1 motif
  misc_feature (156)..(206): Pfam Id: PF05182 Pfam Desc: Fip1 motif
  misc_feature (1)..(270): NCBI GI: 256725620 Blast Desc: NECHADRAFT_81518 [Nectria haematococca mpVI 77-13-4]
  misc_feature (1)..(270): NCBI GI: 46116644 Blast Desc: FG04164.1 [Gibberella zeae PH-1] gi|126247216|sp|Q4IF44.1|FIP1_GIBZE RecName: Full=Pre-mRNA polyadenylation factor FIP1
  misc_feature (80)..(267): NCBI GI: 171688122 Blast Desc: protein product [Podospora anserina] gi|170944023|emb|CAP70133.1| protein product [Podospora anserina]
  misc_feature (1)..(261): NCBI GI: 156031271 Blast Desc: SS1G_14057 [Sclerotinia sclerotiorum 1980] gi|154699459|gb|EDN99197.1| SS1G_14057 [Sclerotinia sclerotiorum 1980]
  misc_feature (69)..(209): NCBI GI: 85109156 Blast Desc: NCU07654 [Neurospora crassa OR74A] gi|74617275|sp|Q7SAX8.1|FIP1_NEUCR RecName: Full=Pre-mRNA polyadenylation factor fip-1 gi|28924414|gb|EAA33545.1| crassa
  misc_feature (69)..(209): NCBI GI: 116197058 Blast Desc: CHGG_05127 [Chaetomium globosum CBS 148.51] gi|88181040|gb|EAQ88508.1| CHGG_05127 [Chaetomium globosum CBS 148.51]
  misc_feature (1)..(270): NCBI GI: 145616597 Blast Desc: MGG_14293 [Magnaporthe grisea 70-15] gi|145009413|gb|EDJ94113.1| MGG_14293 [Magnaporthe grisea 70-15]
  misc_feature (65)..(263): NCBI GI: 255956579 Blast Desc: Pc21g20550 [Penicillium chrysogenum Wisconsin 54-1255] gi|211590753|emb|CAP96952.1| Pc21g20550 [Penicillium chrysogenum Wisconsin 54-1255]
  misc_feature (65)..(260): NCBI GI: 119471605 Blast Desc: cleavage and polyadenylylation specificity factor subunit Fip1, [Neosartorya fischeri NRRL 181] gi|119406346|gb|EAW16297.1| cleavage and polyadenylylation factor
  misc_feature (64)..(260): NCBI GI: 70992217 Blast Desc: cleavage and polyadenylylation specificity factor subunit Fip1, [Aspergillus fumigatus Af293] gi|74670644|sp|Q4WM95.1|FIP1_ASPFU RecName: Full=Pre-mRNA factor
MEIDDDDDFYAPEEPTTAAAEAAQAAQAAQANAAAHTAAAHHDEDLEEGEEEEDGAEMEDSDSDIDIITERKDGTNAPPPTQSRYSDIRNIPQRSTSTDTSTKAPVKKEQPSKSTPTAELPPVSTSKIDVHAIPIHKATGKPITQVNIDTDLPDNDKPWRKPGTDLSDYFNYGFDEFTWALYAAKQDNVRGEFSQDAIAQNNKKMMEEMQMMMMGGMPMGGAGAGSAMQSMPGMDGMPPEFQAMMQQMMASGMDPSQMDPSAMSAMFAGMQGGGAGAGQGQNQNFGQGGNQGQNFGYDGQGMGGGRGGGFGGRGRRGGRNW

SEQ ID NO: 23183 - DNA, 1810 bp, Muscodor strobelii
  misc_feature: SGI EST ID NO. CUFF.54539.0
  misc_feature: Variant of the nucleotide sequence at SEQ ID NO 23181
gtcgacaatacaggtatcgtagcagcttcaagccatcgcaatcaacacattccagcctcacatccgcgactgtaaacctgaagcctccaaatcatctcaactgtcaattcctgcatgctagtgatagtacgttataaatcacaccaccatggagatcgacgatgacgatgatttctacgcccctgaggagcctaccacagcagccgctgaagctgcacaggctgcccaggctgcccaggcaaatgctgctgcccacactgcagctgcgcaccacgatgaggatctagaggagggcgaagaggaggaggatggggctgagatggaagactctgactctgacatcgacattatcacagagcgcaaggacggcactaatgcgccgccgcccacacaatcacgatatagcgacatcagaaatattccccagcgatcgacgtccaccgacacatccacaaaggcgccagtcaagaaagaacagccctctaaaagcacccctaccgccgagctgccacctgtctcaacatctaagatagatgtccatgcgatccccatccacaaagccacaggcaagcccatcacacaggtcaacattgacacagatctcccagacaacgacaagccttggagaaagcccggcaccgacctcagcgactatttcaattatggctttgatgagttcacctgggcactctacgccgccaagcaggacaacgtgcgcggcgagtttagccaagatgccattgctcagaataacaagaagatgatggaggagatgcagatgatgatgatgggtggcatgcccatgggtggagccggggcgggcagcgccatgcagagtatgcccggcatggacggaatgcctcctgagttccaggccatgatgcagcagatgatggcatcgggtatggatcccagccagatggacccttcagccatgtcggccatgttcgctggcatgcaaggtggcggcgctggagccggtcagggacagaaccagaacttcggccagggtggcaaccagggccagaactttggatacgatggacaaggaatgggcggcggccgtggtggaggctttggcggtcgtggccgtcgcggtgggagaaactggtgatagaggctccgggttctgcctttctacctaaccagtctcaggtagcgacagtggcgaaccatctgcagactgcgagccatcgcctttgcgtgcgacgaggagcctcaatgagatgaattttcgccaacgtggtacgaggacgactgcacccagaaggctgtactgttcagacaccgaacattcttcaaacccgggtgccgctgctcagagagagtcgccatcatctcagagctggcgactaccgatgttattcgtcttgcagattctataacgacttttttgtcatataggtgctcgtggtcaactaagaggaagagcagctcattggtctgccattagggtttgcatcgtcgagtcatgagtatgctacgagcactctggatgaaatggctcggcgcgataggtttctcctatcttcacctcgatgaggaggtgtgttccactttcacgagatgggttaatgccatcatgctttcacgccggccttgcctctaggtcctcaattagacatatacaaatgataccaagtgaacttgagccgacaaagattcacgaccagccaccgttaatcatcatgctatgtgatacaattcccctgtcttcttatgttcgtgcagtctggtcgtgaccattttaagctcttgttagagcatatagcaggaaacatgccacaacctcaggaatccaacaatagcg

SEQ ID NO: 23184 - DNA, 489 bp, Muscodor strobelii
  misc_feature: SGI cDNA ID NO. 567884
  misc_feature: Encodes the peptide sequence at SEQ ID NO 23185
atgcgatcaatatcaatacaccagatacttgcagtatcgtggggatgcataaccctcaccgccgcccaaccaaccccagattcccaatctctcgacaagcgttcaataacatgtctaaaaatcggcgccatagcaacagcgagctggacaaatgcagccggccagtcatgcacattcaaaggcgtagtcggtagtaattacgggacgaacgcagcaggaggggaattcttgaatagttactcatgcaacggccgctgcggcgcaggatgtagcgggacagcgttaggaaacgtgtatacgcaagattgtttctcgcatgatatctgttcgtacttcaacaacgccagcggtggcgctagcgacgcaaactgcggcgcagcctataacgcagcagtagacgacacgctcggtggtctcgtagcaggctgctcgcaaactaatccatcgaacgtagcatcgccgccttcgagttcgcctgtttgtatctaa

SEQ ID NO: 23185 - protein, 162 aa, Muscodor strobelii
  misc_feature: SGI Peptide ID NO. 567884
  misc_feature (28)..(161): NCBI GI: 189210026 Blast Desc: conserved [Pyrenophora tritici-repentis Pt-1C-BFP] gi|187977438|gb|EDU44064.1| conserved [Pyrenophora tritici-repentis Pt-1C-BFP]
  misc_feature (9)..(161): NCBI GI: 67515477 Blast Desc: AN0020.2 [Aspergillus nidulans FGSC A4] gi|40746183|gb|EAA65339.1| AN0020.2 [Aspergillus nidulans FGSC A4] gi|259489796|tpe|CBF90363.1| TPA: conserved [Aspergillus FGSC
  misc_feature (17)..(162): NCBI GI: 46114984 Blast Desc: FG03334.1 [Gibberella zeae PH-1]
  misc_feature (32)..(161): NCBI GI: 70988591 Blast Desc: conserved [Aspergillus fumigatus Af293] gi|66846786|gb|EAL87117.1| conserved [Aspergillus fumigatus Af293] gi|159128572|gb|EDP53686.1| conserved [Aspergillus A1163]
  misc_feature (28)..(161): NCBI GI: 145251511 Blast Desc: An15g07480 [Aspergillus niger] gi|134082803|emb|CAK48577.1| protein product [Aspergillus niger]
  misc_feature (16)..(118): NCBI GI: 145602157 Blast Desc: MGG_12930 [Magnaporthe grisea 70-15] gi|145010587|gb|EDJ95243.1| MGG_12930 [Magnaporthe grisea 70-15]
  misc_feature (6)..(161): NCBI GI: 169772177 Blast Desc: [Aspergillus oryzae RIB40] gi|83768417|dbj|BAE58556.1| protein product [Aspergillus oryzae]
  misc_feature (30)..(119): NCBI GI: 154298437 Blast Desc: BC1G_11403 [Botryotinia fuckeliana B05.10] gi|150857999|gb|EDN33191.1| BC1G_11403 [Botryotinia fuckeliana B05.10]
  misc_feature (6)..(146): NCBI GI: 238485206 Blast Desc: conserved [Aspergillus flavus NRRL3357] gi|220698720|gb|EED55059.1| conserved [Aspergillus flavus NRRL3357]
  misc_feature (30)..(97): NCBI GI: 156042311 Blast Desc: SS1G_11706 [Sclerotinia sclerotiorum 1980] gi|154696089|gb|EDN95827.1| SS1G_11706 [Sclerotinia sclerotiorum 1980]
MRSISIHQILAVSWGCITLTAAQPTPDSQSLDKRSITCLKIGAIATASWTNAAGQSCTFKGVVGSNYGTNAAGGEFLNSYSCNGRCGAGCSGTALGNVYTQDCFSHDICSYFNNASGGASDANCGAAYNAAVDDTLGGLVAGCSQTNPSNVASPPSSSPVCI

SEQ ID NO: 23186 - DNA, 494 bp, Muscodor strobelii
  misc_feature: SGI EST ID NO. CUFF.54543.0
  misc_feature: Variant of the nucleotide sequence at SEQ ID NO 23184
ctcatgcaacggccgctgcggcgcaggatgtagcgggacagcgttaggaaacgtgtatacgcaagattgtttctcgcatgatatctgttcgtacttcaacaacgccagcggtggcgctagcgacgcaaactgcggcgcagcctataacgcagcagtagacgacacgctcggtggtctcgtagcaggctgctcgcaaactaatccatcgaacgtagcatcgccgccttcgagttcgcctgtttgtatctaaacacgcagccacgatcaagttgttgtaatgggaggatatggcatgagacgtagtgtaaagttccgctgaactgatgtcatcatgtaatccaaggaacacttaataaacggccagattatcatgaagctgagaatcaagagtcgtagtccttctggtcaggtgatgcttagtcgttcagatataagctaagggcgagatcttttatcctcattagacgcgagtagggggtatacgtatttacgcc

SEQ ID NO: 23187 - DNA, 1185 bp, Muscodor strobelii
  misc_feature: SGI cDNA ID NO. 567885
  misc_feature: Encodes the peptide sequence at SEQ ID NO 23188
atgaatgctgccaacgcacccggcgcgcatgcgcaaaacggccagcctggcattacgccggcagtcctgggctcaatcctgacccagctctccgctgcttgcgaccgacctggggcaaccccaaaccagcttcggctggtcattgagcggttcgaggctgttgccacgcggcctggtggtgttacagccggccaactcacgggagccctggggaacgttattgagcaggtccttccgcagaatggccccacgtgggatctcctcgtggatgaccaaggccactacaaagttgccatccagagtcctgaggatgctgcccgccgacgggtcctctatctggcgcgccgagatgaggtcctggagcggcctgctccagatgttccagcacctggagacaacgcccagcgaaagatctctgcagccgccctgaaggctgcgattctcagtcgggatacggttcctgaaaaccaacgcaaagatgccttcaagcatcttttcttggaccgtcgatggtgcgatgcagagatcgacgatcttacgtggaatctccttaaacattgcgaggctgctgctaagggcaaatgtcagattcctgactgtcacgaagcaaagccgacaccgtataaggaattcgacacccaccaagatcgacttgaagccatgagaagtgtcctgctggaggacaagatggtcgtagagtcttgtttcaagaatgatgctttctgcgcgcgctttgcatggaatccccgcaatgagcagaagaggaagaacgccaaccgtgacgtcaatgaatcgcggtcaaacacagtcaaagctcagaagcaagcagagccgcagcagcaaggactcgacgcacccgccggaggagagagctctgagatggcggcaagtcgtgctgttggtgatggcgaagcccagggtagttctgccaatactcgaaacgcccaacgaagcctcgccacagcacctcttgctggaccgtctagctcatctcatccaggcaatctccagcagaacatgggtaggcaattgagcggaggaatggcccagccacagcgcacgattccctcgcttcctgctcaacaaggagaaccggtgaacgatccgggttctctacaggaagactacgcggcctcccagaatagtccggagcgcctgcataagagcagaaagacgactcgatag

SEQ ID NO: 23188 - protein, 394 aa, Muscodor strobelii
  misc_feature: SGI Peptide ID NO. 567885
MNAANAPGAHAQNGQPGITPAVLGSILTQLSAACDRPGATPNQLRLVIERFEAVATRPGGVTAGQLTGALGNVIEQVLPQNGPTWDLLVDDQGHYKVAIQSPEDAARRRVLYLARRDEVLERPAPDVPAPGDNAQRKISAAALKAAILSRDTVPENQRKDAFKHLFLDRRWCDAEIDDLTWNLLKHCEAAAKGKCQIPDCHEAKPTPYKEFDTHQDRLEAMRSVLLEDKMVVESCFKNDAFCARFAWNPRNEQKRKNANRDVNESRSNTVKAQKQAEPQQQGLDAPAGGESSEMAASRAVGDGEAQGSSANTRNAQRSLATAPLAGPSSSSHPGNLQQNMGRQLSGGMAQPQRTIPSLPAQQGEPVNDPGSLQEDYAASQNSPERLHKSRKTTR

SEQ ID NO: 23189 - DNA, 1527 bp, Muscodor strobelii
  misc_feature: SGI cDNA ID NO. 567886
  misc_feature: Encodes the peptide sequence at SEQ ID NO 23190
atgagtaatcccaataaccagcttccgaagccctttaaagaggcgaaggaaatgggacctgtttctccatcctctagctatcctaccggaggtgttccaagcagctacctgaccgagttcaccggcgtcgtcttccctcctgtagcagcttcatcctactcagctggccctaggacttctagttatctggctggcggtccattccctactagctacggtactgctcctgctcctgcttcctctggctatccacttgcctttgctagatctattcccacctccgctggcccgtctaccgcggcggggcaggcattcgccggcttcacacaaaagtcgaccgaatacacgcaactccttgacgacaagaagcaatttcgtaccccaattaccaactacgagactctccaacgatacaaaaatgcgtatctcgcaaagaacaaccaagaggtcacatggccattggatctgcccagaagctggaacgaccgccaagcggaggcgaacaggttcctaaaggcattcactttcttcgatgccgatcccaacgtaaaatatccggatcctcccgaccaagcctgcaccaatctcggacgccgagggtccgttcgcttcggtcacgacgaaatggaactcagaagctgggatcttcaggaggctaccgaaaatgcttcgaagggaatctgcaagattcccgagatcaggggaagtaagttcccgaaatatgagacttttggcactcatggcgaacgtgtcgattgctgtgttcggatccttgaactgaacaagaaggctgtcatgaatgtcttaacaaaaccagaataccttgtacgattcccatgggatccaaaggcggaggatgttaaaatcgaacagaacgcgacgagtgctttcaacaaaaagaaaagagttcagccagcaaataccacggccggagttgaagcagagaactcaggcgatgaagaggatcaatcttcgcctagttctacaccggctgagcctgtcaacaaacgagccaggacatatcttagccaagaattagcgggccctaccggaaacccctcgactggagcaagcctgcagactcctatcaaccaacctgctcgccgcgagcaagagtctctcggcttcggcaatccgggaccctcatacgggtacggatctggacgttatccgatttttcagcctctgagtcttgaacgccagccttttggtttcgcgcctccggatcctagttacgggggcaattacactactcatcagcctgctcgtcaaccacgacagtcttttggcttagggcctcctggtccactctacgaacctgggaataacgatgattcccagactcctcgcaatgcgcaacggtctcaagatttgctgcttccgcaaatgtcttacggacccggtgatgacactgttgacgaagctcgtcatgaagagaaccagagtcaagtgtttacaccggacatgctacactgggaagactatgtcaatttccccgatgaaaatgatgccgagagtcatcaataa

SEQ ID NO: 23190 - protein, 508 aa, Muscodor strobelii
  misc_feature: SGI Peptide ID NO. 567886
MSNPNNQLPKPFKEAKEMGPVSPSSSYPTGGVPSSYLTEFTGVVFPPVAASSYSAGPRTSSYLAGGPFPTSYGTAPAPASSGYPLAFARSIPTSAGPSTAAGQAFAGFTQKSTEYTQLLDDKKQFRTPITNYETLQRYKNAYLAKNNQEVTWPLDLPRSWNDRQAEANRFLKAFTFFDADPNVKYPDPPDQACTNLGRRGSVRFGHDEMELRSWDLQEATENASKGICKIPEIRGSKFPKYETFGTHGERVDCCVRILELNKKAVMNVLTKPEYLVRFPWDPKAEDVKIEQNATSAFNKKKRVQPANTTAGVEAENSGDEEDQSSPSSTPAEPVNKRARTYLSQELAGPTGNPSTGASLQTPINQPARREQESLGFGNPGPSYGYGSGRYPIFQPLSLERQPFGFAPPDPSYGGNYTTHQPARQPRQSFGLGPPGPLYEPGNNDDSQTPRNAQRSQDLLLPQMSYGPGDDTVDEARHEENQSQVFTPDMLHWEDYVNFPDENDAESHQ

SEQ ID NO: 23191 - DNA, 1458 bp, Muscodor strobelii
  misc_feature: SGI cDNA ID NO. 567887
  misc_feature: Encodes the peptide sequence at SEQ ID NO 23192
atggatcccagcgctatggatgttgatgcgatgaactccccggtcacggatcctgatgaccccctgagtcccgccaatgcagggaacggcattaacaaccatggcggcacgttccagagcctccttgacgtcgacaatgattttgacccacagatcatgagctatgacatgctgagccatcatcatgaagcatatctcgcaaagaatagtgtggacatcgaggcgccacaggaccttccgcttttcgatgcgcatcgagtagaactcgcacataggctatatatggccttcgttcatcttgagcctggtcaggaatacccaatcgatcaagcctacaagcacgtctttggggaaccagagagtaacaagatgccgcgcttcagacgttttgataggcgtatgaagtcctggatgcttctctgggccatcgagaatgcctctcaaggcatatgtaggatagccgagatgcatgaagccacgtttccgaggtacgaaaagtttgacagcttcaatgctcgttttaaccggatcgtattcctgattgagcgtcagaagaggttcgtcaacaacattctgacgtcgagcacataccaccatcgttttgcatgggctccgactgcagaggagaagcgagttgggctcaatggagctagcgcagccaagaagaaggatgagtatgaggcgggcaaggccaaaagaaaccatggtgacgattcgtcctctactgctagcactcaggaaagtcttcaatctgccactttccagcctggcgcagggggtggttttcaactcggtacacagctttatccccaagtcgctacgcctcgtaatcttcatgctggcatgccgagtggtctccaaccaggaacccagcgtaatgttcagcccggcgcccagcgtcccatctatcctacaacaggatatggggtctatcccggcacgtcgtatggtttcaaacctggcgtgaagatgggcccgcattccagtacaccacgctatatcgagcccaacacgacgggtagtccacaggccagcacaaaccttggcttccattcgggcacttcacgtggtccccattcaggcatgccgagtagtcttcaacccggcgcacagcacagtctccgcgttcctccttcgagtggtctccaccaaggcgcagacaaagagtctactccggcccacagaatcgttcgttatctcgactacgtaaatcagtatacggggcccaacgcttattcggcttatggtcaacctggcacagccgcaacttacgagccgccgcagcaacagcttgttgcgccaggttcgtacttgatgagacctcatggacagccaggacaaggtcattctggttctccactgctagctccgtcacagagaagcgagccggacggcgacaccatcatagtgcatgacggcaagcctagctccacccaggaggaatctccagacaagtga

SEQ ID NO: 23192 - protein, 485 aa, Muscodor strobelii
  misc_feature: SGI Peptide ID NO. 567887
MDPSAMDVDAMNSPVTDPDDPLSPANAGNGINNHGGTFQSLLDVDNDFDPQIMSYDMLSHHHEAYLAKNSVDIEAPQDLPLFDAHRVELAHRLYMAFVHLEPGQEYPIDQAYKHVFGEPESNKMPRFRRFDRRMKSWMLLWAIENASQGICRIAEMHEATFPRYEKFDSFNARFNRIVFLIERQKRFVNNILTSSTYHHRFAWAPTAEEKRVGLNGASAAKKKDEYEAGKAKRNHGDDSSSTASTQESLQSATFQPGAGGGFQLGTQLYPQVATPRNLHAGMPSGLQPGTQRNVQPGAQRPIYPTTGYGVYPGTSYGFKPGVKMGPHSSTPRYIEPNTTGSPQASTNLGFHSGTSRGPHSGMPSSLQPGAQHSLRVPPSSGLHQGADKESTPAHRIVRYLDYVNQYTGPNAYSAYGQPGTAATYEPPQQQLVAPGSYLMRPHGQPGQGHSGSPLLAPSQRSEPDGDTIIVHDGKPSSTQEESPDK

SEQ ID NO: 23193 - DNA, 1068 bp, Muscodor strobelii
  misc_feature: SGI cDNA ID NO. 567888
  misc_feature: Elevated expression when VOC is produced
  misc_feature: Encodes the peptide sequence at SEQ ID NO 23194
atgtcttcatcagattcacgcttcacgtcgcaaaataagacgactcaggagcgcatatccagcaatacagtcggtctcgtcgccctgtctgactttcgcaagcgccgcgctgaggttcttgaacaacaagagcgcgaagctcgtgaagctgccattgctgcctcccagaacgccacccccgatcgctccctcgcctcgaccccagacaacgcgacagaatccgctgctccgcgcaagaagaagaagaaagctgcgcgaaacacgaagctctcgtttgcaggagacgatgatgacgatgatggagagaactcagaagagacaggaggagagtcatcgactggcgatagcaaggctggtgacaaggtgaagagcaagttaaaagccaattcgtctgtctctatggtgcctcgtgtggtgactaagtctgcgatgagacgcgaggcggctgagcgagatgtcttgcgaagacagtttttgcaacgacaggaggcggtcaagatcactgagattgccataccgttcgtgttttacgatggctccaacatccctggtggcactgtccgtctgaaaaaaggcgacttcatatggcagttcctcgaccgaagcaggaaagtcggtgctgatctcggcgttggagagaaagcaaatgctcgtagggaatgggctcgagtgggtgttgacgatttgatgatggttcgaggcaatgttatcatccctcatcattacgactttctgttcttcatcatgaacaagaccgtcggccccaatggcactcttctcttcggctatgatgccgaggtgccaaagctatcttcccaacctgcaggtcagaatgcccaggccgaagtctcgcccatctcggtcccttcggctcctccgaaaatcccggtcgagtctctcgagggtgcatctgatgaccctacagcaacaaaggtggtggataggagatggtatgagcgcaataagcacatctaccccgccagtatgtggcaagaatttgatcctgagaaggactacgagaaggaagtcaggcgtgacccaggtggcaatacattcttctattcctga

SEQ ID NO: 23194 - protein, 355 aa, Muscodor strobelii
  misc_feature: SGI Peptide ID NO. 567888
  misc_feature (78)..(345): Pfam Id: PF04921 Pfam Desc: XAP5 protein
  misc_feature (309)..(345): Pfam Id: PF04921 Pfam Desc: XAP5 protein
  misc_feature (3)..(355): NCBI GI: 46116738 Blast Desc: FG04211.1 [Gibberella zeae PH-1]
  misc_feature (2)..(355): NCBI GI: 116196960 Blast Desc: CHGG_05078 [Chaetomium globosum CBS 148.51] gi|88180991|gb|EAQ88459.1| CHGG_05078 [Chaetomium globosum CBS 148.51]
  misc_feature (3)..(347): NCBI GI: 261359882 Blast Desc: XAP5 domain-containing protein [Verticillium albo-atrum VaMs.102]
  misc_feature (6)..(355): NCBI GI: 154317695 Blast Desc: BC1G_03199 [Botryotinia fuckeliana B05.10] gi|150844373|gb|EDN19566.1| BC1G_03199 [Botryotinia fuckeliana B05.10]
  misc_feature (6)..(355): NCBI GI: 156031259 Blast Desc: SS1G_14051 [Sclerotinia sclerotiorum 1980] gi|154699453|gb|EDN99191.1| SS1G_14051 [Sclerotinia sclerotiorum 1980]
  misc_feature (2)..(355): NCBI GI: 164424089 Blast Desc: NCU07604 [Neurospora crassa OR74A] gi|157070368|gb|EAA33748.2| conserved [Neurospora crassa OR74A]
  misc_feature (6)..(355): NCBI GI: 39964066 Blast Desc: MGG_09811 [Magnaporthe grisea 70-15] gi|145011113|gb|EDJ95769.1| MGG_09811 [Magnaporthe grisea 70-15]
  misc_feature (2)..(355): NCBI GI: 189210826 Blast Desc: XAP5 domain containing protein [Pyrenophora tritici-repentis Pt-1C-BFP] gi|187977837|gb|EDU44463.1| XAP5 domain containing protein [Pyrenophora tritici-repentis
  misc_feature (5)..(355): NCBI GI: 169623600 Blast Desc: SNOG_15043 [Phaeosphaeria nodorum SN15] gi|111056466|gb|EAT77586.1| SNOG_15043 [Phaeosphaeria nodorum SN15]
  misc_feature (2)..(354): NCBI GI: 238840393 Blast Desc: FAM50A [Microsporum canis CBS 113480]
  misc_feature: Useful for introducing or modulating the production of volatile compounds
MSSSDSRFTSQNKTTQERISSNTVGLVALSDFRKRRAEVLEQQEREAREAAIAASQNATPDRSLASTPDNATESAAPRKKKKKAARNTKLSFAGDDDDDDGENSEETGGESSTGDSKAGDKVKSKLKANSSVSMVPRVVTKSAMRREAAERDVLRRQFLQRQEAVKITEIAIPFVFYDGSNIPGGTVRLKKGDFIWQFLDRSRKVGADLGVGEKANARREWARVGVDDLMMVRGNVIIPHHYDFLFFIMNKTVGPNGTLLFGYDAEVPKLSSQPAGQNAQAEVSPISVPSAPPKIPVESLEGASDDPTATKVVDRRWYERNKHIYPASMWQEFDPEKDYEKEVRRDPGGNTFFYS

SEQ ID NO: 23195 - DNA, 2431 bp, Muscodor strobelii
  misc_feature: SGI EST ID NO. CUFF.54634.1
  misc_feature: Variant of the nucleotide sequence at SEQ ID NO 23193
ctgaagtcctcgtcttcggtgtttccaacatcgaacttcaccaattttcgactcggattctttgtccgttgttctcaagccgagctatgaataacgccgtgtgatattagagcgaatagagatcaaatttgcagcggcgcatcaccgcgcaccctggtcaatcgccatgtcttcatcagattcacgcttcacgtcgcaaaataagacgactcaggagcgcatatccagcaatacagtcggtctcgtcgccctgtctgactttcgcaagcgccgcgctgaggttcttgaacaacaagagcgcgaagctcgtgaagctgccattgctgcctcccagaacgccacccccgatcgctccctcgcctcgaccccagacaacgcgacagaatccgctgctccgcgcaagaagaagaagaaagctgcgcgaaacacgaagctctcgtttgcaggagacgatgatgacgatgatggagagaactcagaagagacaggaggagagtcatcgactggcgatagcaaggctggtgacaaggtgaagagcaagttaaaagccaattcgtctgtctctatggtgcctcgtgtggtgactaagtctgcgatgagacgcgaggcggctgagcgagatgtcttgcgaagacagtttttgcaacgacaggaggcggtcaagatcactgagattgccataccgttcgtgttttacgatggctccaacatccctggtggcactgtccgtctgaaaaaaggcgacttcatatggcagttcctcgaccgaagcaggaaagtcggtgctgatctcggcgttggagagaaagcaaatgctcgtagggaatgggctcgagtgggtgttgacgatttgatgatggttcgaggcaatgttatcatccctcatcattacgactttctgttcttcatcatgaacaagaccgtcggccccaatggcactcttctcttcggctatgatgccgaggtgccaaagctatcttcccaacctgcaggtcagaatgcccaggccgaagtctcgcccatctcggtcccttcggctcctccgaaaatcccggtcgagtctctcgagggtgcatctgatgaccctacagcaacaaaggtggtggataggagatggtatgagcgcaataagcacatctaccccgccagtatgtggcaagaatttgatcctgagaaggactacgagaaggaagtcaggcgtgacccaggtggcaatacattcttctattcctgagacgtcacttcgagcttcgaaccttggcatcgtatactgccggcttcaggaatgaaatcggtattgagttgactgaatgtctcaacttgacagtattagcacgcatttaccactcgagctgttatcattgcgataatactaacttgagaagtgtccatgcgaggaatcacccaacagatattgagatcatgaaggctaagcaacctaggatgatccagcctggccaaaaaattaccaaaaacagattgttgccgcccccgccgaggatcaatgtgaagaactcgaatacaagcttcttccttagacgcctgacaggtctcgtattccacaacatacgagtagtcgacgtcgaagcttgtatgaggctgtatgagaactccgtggtcaatttgaacgattgtaaggcagctactttgcctatgcataaagacgctgacgcgattatgcaaatctggaaaatgaagggccagaatattctaccgatccacccgccacattgaagcgctcgccgcaacagaggtactgcagcagcgaatggttgagatttatcgagtattcccgctggccgcttggtaggcgcggctaggacgtcaacgttggcgaaggatacggccatgattcctacgagagccctctcttgctactaggtcgaaagagccacaacgcaggaatctgcctgatgttcgcaggtaaagtcgaggtagttcgttctcatggacatacgtcggacccaaagttatatggctgtagaagagcggcagcagacggtaaggcgtgtaatgtctcagccactggttcgtgacgtgttaccagggccaaccagctgacatgaactactggtgttctgttttatagactggatagcatcccttcctccatttagggactgaggaccaggccgatacttcgactccatagtatacacacgtgaatgaacctattcgcagatatcgggacccttactgtaacaatgaatcgcgggaagataagccagtacagaatatactaaaatgtaacaacacacaaggggcaatagtgatagtggggtgagaagccgtgttgtgcacgagggctagatcctcaaaacccctcaccgtggtcatctgcccctcgcggagcattgcgagtcacgatattgcgatcgctggattccatggatatgttgcacaggtacctcgtggactaagagtagacgtg

SEQ ID NO: 23196 - DNA, 1158 bp, Muscodor strobelii
  misc_feature: SGI cDNA ID NO. 567889
  misc_feature: Encodes the peptide sequence at SEQ ID NO 23197
atgcgttaccaggatgctccgaatttcaagcacaaggcgtgggacaccctttggcgaagcaatattcccagcctcatcgccttgagaaaggaaactcagtgcactttcattgccatagactttgaaggcgcgcagaacagaagcgaaatcgcggttggccaaatcggcattgccgtacttcctccaccagctatagacataaatctcctttcccggcccgactacattaaaggcgagtcactcaatgtctttgcgacgcggaattctattacaagctattgtctaaatatacgtggtgccttgcgaggtggaaagaagaaccttacggaaagttttcgtttcggccagactcaggagatcgaggcagcgcaggctgaggagacgatggtcggtttacttgacgcgattcatacccgttttccgggtcccttagtactagtcggattcgatctcgtcttcgaaattacttctatcgcatcacatatgtctcgcatcatgcagcacttctcatcgtgggtagatctacaagagattgtctatgatgttctagatccgaacatgctttggaagccacgactcggcgacacgctttgcgctatgggttacgatctcgagcaatgggccggcaaatcatgttcgcacaacgctggaaacgacacggtccggcaactcgcagttcttgcctacctattgtattcggacaagaaactgatcatcaattgccctaccaaggaagcaaatgctgagttaaccctgatgaaatatttcaacaaacgcccacatcctcgcagaaagtatcctttcgcggcaaaagttcatattgagggggaaagtccaggagcgttctgtaaattacaagatctttcccgtctatttgctagctacgaacccactgctgtagggttactaggctctgggaaatgcggttggatctgtttgcccagtgtagaaaggttatatcagtttgtatcagagctcgatgggcagacgtgccatggacaggtctggaaagtggccagtgattacgatcctatgtctatgccccagaatcgtcttacccctctacaattatctaaagtcaggcgagccaaggcggagtctcaaagcgaggagaaacaaagggcacggcgtgaaaagaaaaagatatgcaaggcatag

SEQ ID NO: 23197 - protein, 385 aa, Muscodor strobelii
  misc_feature: SGI Peptide ID NO. 567889
  misc_feature (20)..(321): NCBI GI: 85096723 Blast Desc: NCU07131 [Neurospora crassa OR74A] gi|28921801|gb|EAA31078.1| [Neurospora crassa OR74A]
  misc_feature (35)..(344): NCBI GI: 169597907 Blast Desc: SNOG_01746 [Phaeosphaeria nodorum SN15] gi|160707616|gb|EAT91395.2| SNOG_01746 [Phaeosphaeria nodorum SN15]
MRYQDAPNFKHKAWDTLWRSNIPSLIALRKETQCTFIAIDFEGAQNRSEIAVGQIGIAVLPPPAIDINLLSRPDYIKGESLNVFATRNSITSYCLNIRGALRGGKKNLTESFRFGQTQEIEAAQAEETMVGLLDAIHTRFPGPLVLVGFDLVFEITSIASHMSRIMQHFSSWVDLQEIVYDVLDPNMLWKPRLGDTLCAMGYDLEQWAGKSCSHNAGNDTVRQLAVLAYLLYSDKKLIINCPTKEANAELTLMKYFNKRPHPRRKYPFAAKVHIEGESPGAFCKLQDLSRLFASYEPTAVGLLGSGKCGWICLPSVERLYQFVSELDGQTCHGQVWKVASDYDPMSMPQNRLTPLQLSKVRRAKAESQSEEKQRARREKKKICKA

SEQ ID NO: 23198 - DNA, 219 bp, Muscodor strobelii
  misc_feature: SGI EST ID NO. CUFF.54607.0
  misc_feature: Variant of the nucleotide sequence at SEQ ID NO 23196
acatgctttggaagccacgactcggcgacacgctttgcgctatgggttacgatctcgagcaatgggccggcaaatcatgttcgcacaacgctggaaacgacacggtccggcaactcgcagttcttgcctacctattgtattcggacaagaaactgatcatcaattgccctaccaaggaagcaaatgctgagttaaccctgatgaaatatttcaacaaac

SEQ ID NO: 23199 - DNA, 1461 bp, Muscodor strobelii
  misc_feature: SGI cDNA ID NO. 567890
  misc_feature: Reduced expression when VOC is produced
  misc_feature: Encodes the peptide sequence at SEQ ID NO 23200
atggcgggagcaggcgaggactcaagctccagcgatgaaagactggctatagacatcgagaaacagcgcagtcaagaagagtctggaataaacccacacaaagtcgaggaagattcgatttcggattatgccaacatcgacgatggacctgaacctgactttctcaaccctaatgcagaaggggctgcgggtacccttggtcgagttctgagcaggatctcgacgaatatcagtcaaaatccaggaccaccaccggacgggggtttgaaggcctggacgatggttctttgcggccatctcattgttacgaacacatggggatttatcaattcatttggagtttttcagacttactacacagaattactcaatcgcccaccatcggatatatcatggattggtagcataacagtctggctgaccttcttcattggcacatttgccggtcgtgctatcgatgctggctttatgagacctgtcttatacgttggcaccttcttcctcacacttggcattttcacgacttccgcggcaaccgagtattaccaacttcttcttgcccaaggtttcacccttggtattggatgcggcttcctattttgttcggctatatcgactgttgcaacgtatttcagcacaaaacggtcctttgcgcttgggataactgcatctggctctgttacaggaggtctaatctatcctgccatggcgcgccaattacttcccagtgttgggtttgggtggacaatacgtgccatggggttcgtaatgctcggaaccatgatctttgtgctgatcttcatgcactcgcgtctgcctccacgaaaagcgggagcactagtggaatgggctgcgttccgtgagcttgaatacaccttctacgcgatcgggatgttctttaacttctggggcttatactttgtgttctactatctcgggtcctacagtcgaagcgagttcatccatccgcagctgacatattccagctcgttgaacttgctcctaatcttaaacggcgtgggtctcgctggtcgtctcgggcccaatttcctcgctgatcatattggcccggtcaacatgatgtttcctgcggcacttttcgccagtgttacgctattcgcttggatggctatagacacaccaacaaaactgtatgcctgggccgctttctacggcattgcggcgggtggcttgcagagtctctttccggcggctctgagctcattgactacggatcccagaaagcagggcactcgcattggcatggtgtttactattgtcagcttcgcgacgctcacggggaatccaatcgctggcgctatcattacggccaacggtgggaaatataccggtgctcaagcattcacaggcacgattctactaatcggcgcgtcgttcgtattttcggcccgaatcgttcgaatgagaaagactggagcaggatggggcgtgaagatttga

SEQ ID NO: 23200 - protein, 486 aa, Muscodor strobelii
  misc_feature: SGI Peptide ID NO. 567890
  misc_feature (95)..(435): Pfam Id: PF07690 Pfam Desc: Major Facilitator Superfamily
  misc_feature (32)..(476): NCBI GI: 46127413 Blast Desc: FG08084.1 [Gibberella zeae PH-1]
  misc_feature (7)..(486): NCBI GI: 261358925 Blast Desc: conserved [Verticillium albo-atrum VaMs.102]
  misc_feature (5)..(486): NCBI GI: 116178914 Blast Desc: CHGG_00085 [Chaetomium globosum CBS 148.51] gi|88184382|gb|EAQ91850.1| CHGG_00085 [Chaetomium globosum CBS 148.51]
  misc_feature (40)..(486): NCBI GI: 256726236 Blast Desc: NECHADRAFT_44133 [Nectria haematococca mpVI 77-13-4]
  misc_feature (57)..(485): NCBI GI: 171680544 Blast Desc: protein product [Podospora anserina] gi|170939899|emb|CAP65125.1| protein product [Podospora anserina]
  misc_feature (19)..(475): NCBI GI: 119493378 Blast Desc: MFS monocarboxylate transporter, [Neosartorya fischeri NRRL 181] gi|119412039|gb|EAW21982.1| MFS monocarboxylate transporter, [Neosartorya fischeri NRRL 181]
  misc_feature (1)..(475): NCBI GI: 169779904 Blast Desc: [Aspergillus oryzae RIB40] gi|238506080|ref|XP_002384242.1| MFS monocarboxylate transporter, [Aspergillus flavus NRRL3357] gi|83773156|dbj|BAE63283.1| protein
  misc_feature (57)..(479): NCBI GI: 256733805 Blast Desc: NECHADRAFT_35599 [Nectria haematococca mpVI 77-13-4]
  misc_feature (7)..(475): NCBI GI: 159128049 Blast Desc: MFS monocarboxylate transporter, [Aspergillus fumigatus A1163]
  misc_feature (7)..(475): NCBI GI: 71000707 Blast Desc: MFS monocarboxylate transporter [Aspergillus fumigatus Af293] gi|66852672|gb|EAL92997.1| MFS monocarboxylate transporter, [Aspergillus fumigatus Af293]
  misc_feature: Useful for introducing or modulating the production of volatile compounds
MAGAGEDSSSSDERLAIDIEKQRSQEESGINPHKVEEDSISDYANIDDGPEPDFLNPNAEGAAGTLGRVLSRISTNISQNPGPPPDGGLKAWTMVLCGHLIVTNTWGFINSFGVFQTYYTELLNRPPSDISWIGSITVWLTFFIGTFAGRAIDAGFMRPVLYVGTFFLTLGIFTTSAATEYYQLLLAQGFTLGIGCGFLFCSAISTVATYFSTKRSFALGITASGSVTGGLIYPAMARQLLPSVGFGWTIRAMGFVMLGTMIFVLIFMHSRLPPRKAGALVEWAAFRELEYTFYAIGMFFNFWGLYFVFYYLGSYSRSEFIHPQLTYSSSLNLLLILNGVGLAGRLGPNFLADHIGPVNMMFPAALFASVTLFAWMAIDTPTKLYAWAAFYGIAAGGLQSLFPAALSSLTTDPRKQGTRIGMVFTIVSFATLTGNPIAGAIITANGGKYTGAQAFTGTILLIGASFVFSARIVRMRKTGAGWGVKI

SEQ ID NO: 23201 - DNA, 2761 bp, Muscodor strobelii
  misc_feature: SGI EST ID NO. CUFF.54683.1
  misc_feature: Variant of the nucleotide sequence at SEQ ID NO 23199
gttacagtcagcggtgtctcttctccgccttatacccggtactgcattctccttcgtcgtcatatagcttcgttttgaccgatttgcctccctcgttgattctcgcaatgtgaaggcgagaaagacagtgattacaatatgtgtttttttctcagacttactaaggcgccgatagtacttgcaatttctaccatcacatggagaacatgactgctaagataagaacaagggagtagacagaagtctcagtctcaacccactaaatgccaaataagaagtcataggtaaacttcgagatatttacagacagttctaatcagagtactattgtcttagcccgacggggatacctgctacatcttataaagctttgtctcctctgacaggagccatccggtgacatggtgacgatgatcgagagaggcgctaccctcggcaaagaagcgctagtaacaaccagcaattcagaacaccagtgactatttctcgcgtcttcgcgctctgcttggaactaaaaaggtttctctatctctatgccaaccccgctttatttccaattgggaagtcaaaatcggaagagtggatttgagccgggttattattacctgattttgctgcattttcatgtgtcaaaagggcgtacagcttctattctagcgtgttgggagtcattctaccctccgaggaaatattttccgcctgcttgtagcttttgttattaagcatcatactccttcatcagctaatatctaagttcagtcaccttgaggcctatatttataattgcctctcaatttgttttacctcatcaattttcaattgggattcattgacgagatcgcgcagaacgagcatttcactcgatacccgcctatctaccagtcattgtcgtcatctgctataacaatattctatccatattcaacttaacccgtggtatgatcaattggtagtggtgttcaaggcaaagcagccatacaaacacacgagagttggttcgggagtagggacagtccggcacgaagctatggcgggagcaggcgaggactcaagctccagcgatgaaagactggctatagacatcgagaaacagcgcagtcaagaagagtctggaataaacccacacaaagtcgaggaagattcgatttcggattatgccaacatcgacgatggacctgaacctgactttctcaaccctaatgcagaaggggctgcgggtacccttggtcgagttctgagcaggatctcgacgaatatcagtcaaaatccaggaccaccaccggacgggggtttgaaggcctggacgatggttctttgcggccatctcattgttacgaacacatggggatttatcaattcatttggagtttttcagacttactacacagaattactcaatcgcccaccatcggatatatcatggattggtagcataacagtctggctgaccttcttcattggcacatttgccggtcgtgctatcgatgctggctttatgagacctgtcttatacgttggcaccttcttcctcacacttggcattttcacgacttccgcggcaaccgagtattaccaacttcttcttgcccaaggtttcacccttggtattggatgcggcttcctattttgttcggctatatcgactgttgcaacgtatttcagcacaaaacggtcctttgcgcttgggataactgcatctggctctgttacaggaggtctaatctatcctgccatggcgcgccaattacttcccagtgttgggtttgggtggacaatacgtgccatggggttcgtaatgctcggaaccatgatctttgtgctgatcttcatgcactcgcgtctgcctccacgaaaagcgggagcactagtggaatgggctgcgttccgtgagcttgaatacaccttctacgcgatcgggatgttctttaacttctggggcttatactttgtgttctactatctcgggtcctacagtcgaagcgagttcatccatccgcagctgacatattccagctcgttgaacttgctcctaatcttaaacggcgtgggtctcgctggtcgtctcgggcccaatttcctcgctgatcatattggcccggtcaacatgatgtttcctgcggcacttttcgccagtgttacgctattcgcttggatggctatagacacaccaacaaaactgtatgcctgggccgctttctacggcattgcggcgggtggcttgcagagtctctttccggcggctctgagctcattgactacggatcccagaaagcagggcactcgcattggcatggtgtttactattgtcagcttcgcgacgctcacggggaatccaatcgctggcgctatcattacggccaacggtgggaaatataccggtgctcaagcattcacaggcacgattctactaatcggcgcgtcgttcgtattttcggcccgaatcgttcgaatgagaaagactggagcaggatggggcgtgaagatttgatcgagatgatagaatgagcttgactccctccggcgtcttctcatttttatattcattacagcgttggcgttgaagcctggatatacgcatgttaaagtatagaccattcggctactcgtttataagtcataatcggaaatagatagcgcaagatacgaagtctaaactggaattgttgtctatccacatcgcttgctagaatgcttagagtgacgatcgttgctcaatttccagtgcccgcggacaaataaatatcaagatcctctgataagc

SEQ ID NO: 23202 - DNA, 843 bp, Muscodor strobelii
  misc_feature: SGI cDNA ID NO. 567891
  misc_feature: Reduced expression when VOC is produced
  misc_feature: Encodes the peptide sequence at SEQ ID NO 23203
atggctagccacgatggcgatacggtgaggacgggcaatagccacaaccacgatatggagaaaggtctactacatcgtaccgagacagccgtcaccatgcctccagaactttttgaaaagctatacctcacacccaaggtcccccatgtcggagataacctgcaacgatttgcgaacccaacagcactcggcttcgtcgggttcgtgatctcgacattcaccttctcgatggtgctgatgggctggggcggcgccgaaggatttgccccggtagtcggtatattctttttcaccggtcctttactgctcacgttcgcgatggtattcgaatggatcatgggtaatttcttcgcgatgatggtaatgggtctcttcgccgtattctgggccagcttcggggtcctccaactgcccaccctcaatctcggattagcctatgccacttcgcaagacccaacaggcttgacatccgtcgcgtataataccgacatcgcgttatacctcgtcgtctggggctttgccttattcacatacttcatcttcacgtgcaagatcaacgctgtattcgccgctatctttgggctcgtttccgctgcttcttgggtcctagccggagcttacttcaaagtagccgccggcgattataccaccgcgctacgtctccagaaggccggaggcgcactcctcttcgtagtagcagcactgggctggtacatgacattcatcataatggcaggcgagatgcgcatcacgctcaagctgcccgtcggagacctgagccgtttctggccgcgaaccgatgttcagcttgcgtctgctcccgcaagagaacacggtgactga

SEQ ID NO: 23203 - protein, 280 aa, Muscodor strobelii
  misc_feature: SGI Peptide ID NO. 567891
  misc_feature (18)..(223): NCBI GI: 171683171 Blast Desc: protein product [Podospora anserina] gi|170941545|emb|CAP67197.1| protein product [Podospora anserina]
  misc_feature (18)..(278): NCBI GI: 116193981 Blast Desc: CHGG_06708 [Chaetomium globosum CBS 148.51] gi|88182621|gb|EAQ90089.1| CHGG_06708 [Chaetomium globosum CBS 148.51]
  misc_feature (10)..(278): NCBI GI: 189192568 Blast Desc: plasma membrane ammonium transporter (Ato3) [Pyrenophora tritici-repentis Pt-1C-BFP] gi|187974229|gb|EDU41728.1| plasma membrane ammonium transporter
  misc_feature (1)..(278): NCBI GI: 169625228 Blast Desc: SNOG_15881 [Phaeosphaeria nodorum SN15] gi|111055599|gb|EAT76719.1| SNOG_15881 [Phaeosphaeria nodorum SN15]
  misc_feature (14)..(260): NCBI GI: 224775803 Blast Desc: TPA: TPA_inf: GPR1/FUN34/YaaH-class plasma membrane protein [Phaeosphaeria nodorum]
  misc_feature (2)..(260): NCBI GI: 169618990 Blast Desc: SNOG_12687 [Phaeosphaeria nodorum SN15] gi|160703723|gb|EAT79985.2| SNOG_12687 [Phaeosphaeria nodorum SN15]
  misc_feature (1)..(108): NCBI GI: 224775783 Blast Desc: TPA: TPA_inf: GPR1/FUN34/YaaH-class plasma membrane protein [Chaetomium globosum]
  misc_feature (1)..(265): NCBI GI: 90110826 Blast Desc: TPA: TPA_inf: AlcS [Aspergillus fumigatus]
  misc_feature (1)..(265): NCBI GI: 224775799 Blast Desc: TPA: TPA_inf: GPR1/FUN34/YaaH-class plasma membrane protein [Neosartorya fischeri]
  misc_feature (1)..(280): NCBI GI: 224775773 Blast Desc: TPA: TPA_inf: GPR1/FUN34/YaaH-class plasma membrane protein [Aspergillus oryzae]
  misc_feature: Useful for introducing or modulating the production of volatile compounds
MASHDGDTVRTGNSHNHDMEKGLLHRTETAVTMPPELFEKLYLTPKVPHVGDNLQRFANPTALGFVGFVISTFTFSMVLMGWGGAEGFAPVVGIFFFTGPLLLTFAMVFEWIMGNFFAMMVMGLFAVFWASFGVLQLPTLNLGLAYATSQDPTGLTSVAYNTDIALYLVVWGFALFTYFIFTCKINAVFAAIFGLVSAASWVLAGAYFKVAAGDYTTALRLQKAGGALLFVVAALGWYMTFIIMAGEMRITLKLPVGDLSRFWPRTDVQLASAPAREHGD

SEQ ID NO: 23204 - DNA, 2231 bp, Muscodor strobelii
  misc_feature: SGI EST ID NO. CUFF.54667.0
  misc_feature: Variant of the nucleotide sequence at SEQ ID NO 23202
atccgctatcctggtatggcgggatgacatgcactaccattaatactccaacactaaaattacgacgaaaatgacttacactccaaaaatgcccaatcgttcgaaatgccacgttgctgtgagccccaacaacagcaaagacgcacctgaaaacgcgtcatgacatctgcagcaatcgcttatcccaacatcaccaacctgcatgccgtagcgagaacacattctcggtgtcatcctccgaacatcacggcgggctgctccaaagctcaattgaccaaccagatagcacctcgtcatctcatccgccctgcttaataagttattgcgcaagcagacgtgtccagggatgccgcactcgaccccgcatccaaggtcgtatttataaacccgggcccgacgcaacaagggcaactgcacgttatatcatgtacgttatatgtcgaaagggctaagacaatcaagggtgcgtgctgtcatggtgctacgatgaggcttggcggcgccggcagaaaccacgtcgactcgtgtgccttaagctgtagctgtagctgagcgccaacaatgcgtaccgaacgtaacgctatgtgccgtggtcgaccattcgagatttcctttctggaacacggttgcatcggctgggggaaaataacctgtacgggtatatgtgggacattggcgtccgaactctcgacctctgccaaaatgcgtatatgtgccaaaccaaagaaagagagcgccgagacgacctggtgtgagaaaggaaggcaagtgacacggcacagtcgtacggctgcgcctatgagatcgttgcgtgacaaacatgttatgcctaggtacccttgcatcgcgatcttgcatcaaggttgtacgccacggcaacgattggccatgcccatttgctaaatgaggttatataagtcttgtttgtcgtcgcctccaagtggacgggacgacgtcggtacgactcgtctcttcttttgagtgcagatctgaccacgcgacttgaaaattgcgactccggcgaactattgatacttataagagtttgatacgacgtagttcagagcgtcatggctagccacgatggcgatacggtgaggacgggcaatagccacaaccacgatatggagaaaggtctactacatcgtaccgagacagccgtcaccatgcctccagaactttttgaaaaggttcgaagagatgccttctttaagcatacatatcctcgtctcaatcgtctctactagcatgtctagcgaatcaactaacggatacacaaagctatacctcacacccaaggtcccccatgtcggagataacctgcaacgatttgcgaacccaacagcactcggcttcgtcgggttcgtgatctcgacattcaccttctcgatggtgctgatgggctggggcggcgccgaaggatttgccccggtagtcggtatattctttttcaccggtcctttactgctcacgttcgcgatggtattcgaatggatcatgggtaatttcttcgcgatgatggtaatgggtctcttcgccgtattctgggccagcttcggggtcctccaactgcccaccctcaatctcggattagcctatgccacttcgcaagacccaacaggcttgacatccgtcgcgtataataccgacatcgcgttatacctcgtcgtctggggctttgccttattcacatacttcatcttcacgtgcaagatcaacgctgtattcgccgctatctttgggctcgtttccgctgcttcttgggtcctagccggagcttacttcaaagtagccgccggcgattataccaccgcgctacgtctccagaaggccggaggcgcactcctcttcgtagtagcagcactgggctggtacatgacattcatcataatggcaggcgagatgcgcatcacgctcaagctgcccgtcggagacctgagccgtttctggccgcgaaccgatgttcagcttgcgtctgctcccgcaagagaacacggtgactgagcgcgagacgggaaaaggatttcatgttggcgcgaaggatgctttgattgccaacccggggcagcgtagaacgaattttttaggaagtgaggactgcggaaaggctagggagcgacggcgatcttcggtattcatgtacaatagtatatctcacagaggtaagactagtaatcgtggaagcttacggatatgctgtaaacgctcatgtgcgaagagtaataatggga

SEQ ID NO: 23205 - DNA, 2085 bp, Muscodor strobelii
  misc_feature: SGI cDNA ID NO. 567892
  misc_feature: Reduced expression when VOC is produced
  misc_feature: Encodes the peptide sequence at SEQ ID NO 23206
atggctctgacggcggtgctcaccactggcgctgatagcccctcggcccctccttctggcagcagcccacctgaaccattcaccacccaccgtcctgcaaaggttcctgctgctgctcttcactaccaagtgcaccaccacgattaccaactcctccacgaccgccatcgtctccttcctcgtcgccaacaaccacaatcctcttccactcttcctcactcgtctcggccgccgcagcacctgctcccgcctgcaccaaagcgcactcaccagcaatcaccccctcccgactctgctctgcggcacgaccgcggcctctctctgcccacgaggcaccctccttccgcgatggccgactaccgccatgtgaggtccggtagcctcaacatcccctccgcgaaccccatgggccccgcgtccgccgcgcctgcacatggccatggccgcttcgacggccctcgtagccctccaaacacatcccacgttccatgcaagttcttccgtcaaggcacctgccaggccgggtccgcctgccccttcagccacgacctcggtgtcgcttccgagacaatatgcaagtactttgccaagggcaattgcaaattcggtcccaaatgcgctaacgtccacgtccttgccgacggcagacgcatcaactacagcaagaacggcatcaccatcggccaacccttgcacctgggcaatcgcatcaatcccaccgcctaccccaactccaacagtgctctcaccaattccttcatgcacgccgatgccgctgccccctacggcccgtcctacggctatcctatctcgcccgctgagccctaccagaccctcgatcgccgtccgagtctcgagaacgtccctaccatcgacaccacctactctcacaccagctccggctacggctcaccacgtgaagaagaacccacacgactgggcttgggcttgtcgccgatcgccggaaaggggctctctgtgctcgatgcgccactgccggcttccttcgactcgaatggaatatcccacgctgccagatatcctgcgggaccctggccctcgtccgttccttcacagttcggtatcgagtctccctcgccgtccttaaatgccgccaaggacactcgcacctccgaggctctcaagctactgcaccattctgcttttggcagcaatgaccacctctcatctcacatggctggctcatcgcctccagcccagccctccgacgaatacttcgggcgcagacagatgcattcgagccgttatgctaagcccaaactgctcagtagcagtgcaccccgcgccattgctggtgctattgaccgtgattgggagactgaattccctttcctggaggaggactatgtacctgacaatctaaaagatctattgacacccgccgagaaggcccgacgtggttcccgcgctgccgacgacgaaatgaacggccagagtcgattttcggccactctcatgggtaccagcgggactggcacccccaatgtggattcgagttccaagttcggaagtcctttggcttcgagccctagtcgctggggacctctttttcaacgccagcaggaggaacatgaagctaagagaaatcatgttgcggctagcgcgggtgcatttggccatgtcggcagtcctctccgtcaatccagcctgagtgccgatgtgatgcgcccccgtgttgcgagtcgttctggcagcctcgagggactaagtgaccagttacaccgaactcgaatcgacggcaacggcagcggaggagaatctcctctacttcacccccacgcacacctgcccagaccctctggacgaaatggcgaacgacatgtgagcacaagttctatcagttctagcgcacgatacacgacccctattggcgaagaggatggtgattttgtcttcaagatggacgaagatggagagagagacagcaccatccgcgctcgtaagcgtacctcgggtgtcggcacagctatgagcgcttggggacccaattacgccaatgcagccggcggaaacaaaaaagacgatggctcgtcgagaattattgacagtgtcggtggtcgctga

SEQ ID NO: 23206 - protein, 694 aa, Muscodor strobelii
  misc_feature: SGI Peptide ID NO. 567892
  misc_feature (159)..(184): Pfam Id: PF00642 Pfam Desc: Zinc finger C-x8-C-x5-C-x3-H type (and similar)
  misc_feature (187)..(212): Pfam Id: PF00642 Pfam Desc: Zinc finger C-x8-C-x5-C-x3-H type (and similar)
  misc_feature (117)..(676): NCBI GI: 46126973 Blast Desc: FG07864.1 [Gibberella zeae PH-1]
  misc_feature (108)..(684): NCBI GI: 116178842 Blast Desc: CHGG_00049 [Chaetomium globosum CBS 148.51] gi|88184346|gb|EAQ91814.1| CHGG_00049 [Chaetomium globosum CBS 148.51]
  misc_feature (119)..(683): NCBI GI: 256724541 Blast Desc: NECHADRAFT_12933 [Nectria haematococca mpVI 77-13-4]
  misc_feature (115)..(694): NCBI GI: 171680658 Blast Desc: protein product [Podospora anserina] gi|170939956|emb|CAP65182.1| protein product [Podospora anserina]
  misc_feature (119)..(656): NCBI GI: 261361284 Blast Desc: conserved [Verticillium albo-atrum VaMs.102]
  misc_feature (116)..(650): NCBI GI: 85076493 Blast Desc: NCU05007 [Neurospora crassa OR74A] gi|28916967|gb|EAA26698.1| conserved [Neurospora crassa OR74A]
  misc_feature (121)..(677): NCBI GI: 156050651 Blast Desc: SS1G_07913 [Sclerotinia sclerotiorum 1980] gi|154692313|gb|EDN92051.1| SS1G_07913 [Sclerotinia sclerotiorum 1980]
  misc_feature (230)..(681): NCBI GI: 145616218 Blast Desc: MGG_03480 [Magnaporthe grisea 70-15] gi|145009969|gb|EDJ94625.1| MGG_03480 [Magnaporthe grisea 70-15]
  misc_feature (121)..(677): NCBI GI: 154308675 Blast Desc: BC1G_07760 [Botryotinia fuckeliana B05.10] gi|150852711|gb|EDN27903.1| BC1G_07760 [Botryotinia fuckeliana B05.10]
  misc_feature (143)..(644): NCBI GI: 255945161 Blast Desc: Pc20g08250 [Penicillium chrysogenum Wisconsin 54-1255] gi|211588083|emb|CAP86154.1| Pc20g08250 [Penicillium chrysogenum Wisconsin 54-1255]
  misc_feature: Useful for introducing or modulating the production of volatile compounds
MALTAVLTTGADSPSAPPSGSSPPEPFTTHRPAKVPAAALHYQVHHHDYQLLHDRHRLLPRRQQPQSSSTLPHSSRPPQHLLPPAPKRTHQQSPPPDSALRHDRGLSLPTRHPPSAMADYRHVRSGSLNIPSANPMGPASAAPAHGHGRFDGPRSPPNTSHVPCKFFRQGTCQAGSACPFSHDLGVASETICKYFAKGNCKFGPKCANVHVLADGRRINYSKNGITIGQPLHLGNRINPTAYPNSNSALTNSFMHADAAAPYGPSYGYPISPAEPYQTLDRRPSLENVPTIDTTYSHTSSGYGSPREEEPTRLGLGLSPIAGKGLSVLDAPLPASFDSNGISHAARYPAGPWPSSVPSQFGIESPSPSLNAAKDTRTSEALKLLHHSAFGSNDHLSSHMAGSSPPAQPSDEYFGRRQMHSSRYAKPKLLSSSAPRAIAGAIDRDWETEFPFLEEDYVPDNLKDLLTPAEKARRGSRAADDEMNGQSRFSATLMGTSGTGTPNVDSSSKFGSPLASSPSRWGPLFQRQQEEHEAKRNHVAASAGAFGHVGSPLRQSSLSADVMRPRVASRSGSLEGLSDQLHRTRIDGNGSGGESPLLHPHAHLPRPSGRNGERHVSTSSISSSARYTTPIGEEDGDFVFKMDEDGERDSTIRARKRTSGVGTAMSAWGPNYANAAGGNKKDDGSSRIIDSVGGR

SEQ ID NO: 23207 - DNA, 4248 bp, Muscodor strobelii
  misc_feature: SGI EST ID NO. CUFF.54961.0
  misc_feature: Variant of the nucleotide sequence at SEQ ID NO 23205
ttttgttaggcgtgatttgggattcgactcgaatgtccccagtggatgtgtataacaccacatactccgacataatatcccctacttttggccaccgatcatgcagacacatgcaggaggtgttgggaagaaaatcacggtctataaggtatattcaacatggaagggtcatgattgagtgtaactcaggtgtcagtctgggaagcacaagcgagtcgtgcatttcgagcttgactgcgcaaccccccaagagtttagccccctttgaaacgcaaaagtccaaaagacctacgtgtactccaactttccccccttctgatgactgatgtttgagtctccaaatgcccatggtaggactggatcgaccgggatgtctcgatgggtaggttcacaatatcacttaaaatgccatggacccctccatagcttgcgtagcagcagctaatttcctctcattccccacgttcgggagcattgttctgtgcctctcgtcatctcatctcgacattttttgttcaagttcagactcgagccaaacaccaggtggcattgcccagaaggagttttgaatcaacctaatgataacagacagaaagatatttttagtctgacctatacaccgcctgacagattctccgaatgtgacatcagcacgcgcagcagttcggacgggctgctcggatacaagtagagtatctgtgatcctgcaaggctggaatgtggtctacatgaggtacctgcatcgatcaccaccaaccaacttgctctatttcaatgagatagagagcctcatagatgttctttcatctttctgtatgctcgatagaataacttgaatggtctcagaacgcttgcggtcttataattcagcttacgactttgggttatctgtcgaggcgacgacttagtagtatctgtttggggcgtccaaagattgttactcgagcgaacatatactccgtacctgctgagaaagacgaattggttgagtgagagagccactgcatctgcacctgcgcttggggcctgggcagcgactacctgatcccagtaggctggaaaggagcctgacatgccgagtgacctgcctaggaggcagctaagaggcaaccctggcccactatttggcagcactgggaaagagcccccaaaacaggcacactagtgggcacaggcagcttccaagattgccagctagagaccccactagccaatgggcatggctctgacggcggtgctcaccactggcgctgatagcccctcggcccctccttctggcagcagcccacctgaaccattcaccacccaccgtcctgcaaaggttcctgctgctgctcttcactaccaagtgcaccaccacgattaccaactcctccacgaccgccatcgtctccttcctcgtcgccaacaaccacaatcctcttccactcttcctcactcgtctcggccgccgcagcacctgctcccgcctgcaccaaagcgcactcaccagcaatcaccccctcccgactctgctctgcggcacgaccgcggcctctctctgcccacgaggcaccctccttccgcgatggccgactaccgccatgtgaggtccggtagcctcaacatcccctccgcgaaccccatgggccccgcgtccgccgcgcctgcacatggccatggccgcttcgacggccctcgtagccctccaaacacatcccacgttccatgcaagttcttccgtcaaggcacctgccaggccgggtccgcctgccccttcagccacgacctcggtgtcgcttccgagacaatatgcaagtactttgccaaggtacgcaatctagattcctcttgtcctctccgtcacacatcttgaacctggagcccggtctccttcaattcccgcttcactcagacccacgcccccggtcatgcatgcataccccgcgagcgccgcgataagctcgaatcccacgacaaaccttcgggcagcagcgtcgcaagactcacaactgcctgccgcatgagctgacttgtgctgaacaacgcagggcaattgcaaattcggtcccaaatgcgctaacgtccacgtccttgccgacggcagacgcatcaactacagcaagaacggcatcaccatcggccaacccttgcacctgggcaatcgcatcaatcccaccgcctaccccaactccaacagtgctctcaccaattccttcatgcacgccgatgccgctgccccctacggcccgtcctacggctatcctatctcgcccgctgagccctaccagaccctcgatcgccgtccgagtctcgagaacgtccctaccatcgacaccacctactctcacaccagctccggctacggctcaccacgtgaagaagaacccacacgactgggcttgggcttgtcgccgatcgccggaaaggggctctctgtgctcgatgcgccactgccggcttccttcgactcgaatggaatatcccacgctgccagatatcctgcgggaccctggccctcgtccgttccttcacagttcggtatcgagtctccctcgccgtccttaaatgccgccaaggacactcgcacctccgaggctctcaagctactgcaccattctgcttttggcagcaatgaccacctctcatctcacatggctggctcatcgcctccagcccagccctccgacgaatacttcgggcgcagacagatgcattcgagccgttatgctaagcccaaactgctcagtagcagtgcaccccgcgccattgctggtgctattgaccgtgattgggagactgaattccctttcctggaggaggactatgtacctgacaatctaaaagatctattgacacccgccgagaaggcccgacgtggttcccgcgctgccgacgacgaaatgaacggccagagtcgattttcggccactctcatgggtaccagcgggactggcacccccaatgtggattcgagttccaagttcggaagtcctttggcttcgagccctagtcgctggggacctctttttcaacgccagcaggaggaacatgaagctaagagaaatcatgttgcggctagcgcgggtgcatttggccatgtcggcagtcctctccgtcaatccagcctgagtgccgatgtgatgcgcccccgtgttgcgagtcgttctggcagcctcgagggactaagtgaccagttacaccgaactcgaatcgacggcaacggcagcggaggagaatctcctctacttcacccccacgcacacctgcccagaccctctggacgaaatggcgaacgacatgtgagcacaagttctatcagttctagcgcacgatacacgacccctattggcgaagaggatggtgattttgtcttcaagatggacgaagatggagagagagacagcaccatccgcgctcgtaagcgtacctcgggtgtcggcacagctatgagcgcttggggacccaattacgccaatgcagccggcggaaacaaaaaagacgatggctcgtcgagaattattgacagtgtcggtggtcgctgaacggctttcctgagtgtggaagcgctgcatctcgagaccgatacatcacttggtttacgacatggtgcatgttctgagctgttacttggagaaacttgtgccttggtgatgcattgttgactgacgagctatgattgatgcttaataggcgactaacccaacatcttagatgatggagacatcatctttccacaagtcgctgtacatgtgaagctgagcaaagagttcatgagctacggtggatagacgacacgaatcattggtatccacgaggtacatcccaccaaaaacgcatttacaacacgaaaagcagcattctagcaagggaagatgagatgcgactaggtaaaaaggagttggctggcaaaacattctgctgttttcgattactgtctatatcaacattagaccctgcagggctttgttctactaggaggattataccgatggaggagttacggcgctgctttgatggctgtttcttgcttcttattgctgattctgggtgtcccgacatccgagcatgacgaaactatttctactgtacaaattactgttgctttcttcgctcacacctgctgatccagctctccttttttttcattttaggaagaacatgtccactcggcacacctcaccttgcatatagctgttgcgatacgaaatcaaattgatcatttcgatagatcaaatacaaaaattgctaatacgatttgtacccaca

SEQ ID NO: 23208 - DNA, 402 bp, Muscodor strobelii
  misc_feature: SGI cDNA ID NO. 567893
  misc_feature: Encodes the peptide sequence at SEQ ID NO 23209
atgcgcccccgtgttgcgagtcgttctggcagcctcgagggactaagtgaccagttacaccgaactcgaatcgacggcaacggcagcggaggagaatctcctctacttcacccccacgcacacctgcccagaccctctggacgaaatggcgaacgacatgtgagcacaagttctatcagttctagcgcacgatacacgacccctattggcgaagaggatggtgattttgtcttcaagatggacgaagatggagagagagacagcaccatccgcgctcgtaagcgtacctcgggtgtcggcacagctatgagcgcttggggacccaattacgccaatgcagccggcggaaacaaaaaagacgatggctcgtcgagaattattgacagtgtcggtggtcgctga

SEQ ID NO: 23209 - protein, 133 aa, Muscodor strobelii
  misc_feature: SGI Peptide ID NO. 567893
  misc_feature (11)..(123): NCBI GI: 116178842 Blast Desc: CHGG_00049 [Chaetomium globosum CBS 148.51] gi|88184346|gb|EAQ91814.1| CHGG_00049 [Chaetomium globosum CBS 148.51]
  misc_feature (8)..(115): NCBI GI: 46126973 Blast Desc: FG07864.1 [Gibberella zeae PH-1]
  misc_feature (12)..(133): NCBI GI: 171680658 Blast Desc: protein product [Podospora anserina] gi|170939956|emb|CAP65182.1| protein product [Podospora anserina]
  misc_feature (7)..(95): NCBI GI: 261361284 Blast Desc: conserved [Verticillium albo-atrum VaMs.102]
  misc_feature (3)..(120): NCBI GI: 145616218 Blast Desc: MGG_03480 [Magnaporthe grisea 70-15] gi|145009969|gb|EDJ94625.1| MGG_03480 [Magnaporthe grisea 70-15]
  misc_feature (8)..(116): NCBI GI: 156050651 Blast Desc: SS1G_07913 [Sclerotinia sclerotiorum 1980] gi|154692313|gb|EDN92051.1| SS1G_07913 [Sclerotinia sclerotiorum 1980]
  misc_feature (8)..(122): NCBI GI: 256724541 Blast Desc: NECHADRAFT_12933 [Nectria haematococca mpVI 77-13-4]
MRPRVASRSGSLEGLSDQLHRTRIDGNGSGGESPLLHPHAHLPRPSGRNGERHVSTSSISSSARYTTPIGEEDGDFVFKMDEDGERDSTIRARKRTSGVGTAMSAWGPNYANAAGGNKKDDGSSRIIDSVGGR

SEQ ID NO: 23210 - DNA, 4248 bp, Muscodor strobelii; identical to SEQ ID NO: 23207
  misc_feature: SGI EST ID NO. CUFF.54961.0
  misc_feature: Variant of the nucleotide sequence at SEQ ID NO 23208

SEQ ID NO: 23211 - DNA, 1035 bp, Muscodor strobelii
  misc_feature: SGI cDNA ID NO. 567894
  misc_feature: Encodes the peptide sequence at SEQ ID NO 23212
atgacgctctctttcgatctgggaccacccaccgaaacacccggacaacttttctttaagtcacaattccgctcacctgtccaatggccgcccagtaacactcgagttgatggccaagttgccatcgtgacaggagcaacacgtggtctgggacttgaggcatctcggcagctcctcgcaattggtttatcgactcttattctcgccgtccgatccactacaaagggcgaggaggttgctgcggacttccgtactcagcatcccgaatgcgatattgaggtctggtcgctggatatggacgactatgaatctatacagacattcgcacaacaagctgagagtactctaacacgtctcgatattgttattctcaatgcaggagtacaaaatagcaagttcctgacaaacccgacgacgggacatgagtcgaacatccaagtcaactatctatccacgatgctcctaggtatcctccttctacctattctcaaggcgaagtctgctcaaagcaggttaggtcgcttgaccattgtcaactcaggaacagcacggggggcttcgctatctggtccgaagggagatccaatcatcccctttctagacgacaaatcgcgtccatgggaccctgtggggcggtatggtgttagcaagatgcttgcccatttgtttataattgagctggccaagcgcattacggccgagcacggcgttgtcgtcaatctggccgaccccggactaacaaaaggaaccaatttgcagggcggacatccgtggcctgtcatcgcttttttcgcagtctataagtccattctggctagaagcttgcttgtgggcgcttccacatacattgacgctgccgtggtcaaggatgcgcagtctcacggttgctacgtggccaattggaagatctctgcatatgcggcgttcgtatatacaccggaaggagaggcagctcgaaaacaattatgggaagagaccatggatgagtttagttttgcggatgcgagagggattttacaggctttagcaagataa

SEQ ID NO: 23212 - protein, 344 aa, Muscodor strobelii
  misc_feature: SGI Peptide ID NO. 567894
  misc_feature (39)..(186): Pfam Id: PF00106 Pfam Desc: short chain dehydrogenase
  misc_feature (39)..(138): Pfam Id: PF00106 Pfam Desc: short chain dehydrogenase
  misc_feature (1)..(344): NCBI GI: 256720619 Blast Desc: NECHADRAFT_50449 [Nectria haematococca mpVI 77-13-4]
  misc_feature (1)..(344): NCBI GI: 238505799 Blast Desc: short-chain dehydrogenase/reductase family protein, [Aspergillus flavus NRRL3357] gi|220690218|gb|EED46568.1| short-chain dehydrogenase/reductase family protein, [Aspergillus
  misc_feature (9)..(342): NCBI GI: 145233707 Blast Desc: An02g10970 [Aspergillus niger] gi|134057159|emb|CAK48762.1| protein product [Aspergillus niger]
  misc_feature (1)..(303): NCBI GI: 169780140 Blast Desc: [Aspergillus oryzae RIB40] gi|83773274|dbj|BAE63401.1| protein product [Aspergillus oryzae]
  misc_feature (1)..(342): NCBI GI: 256730051 Blast Desc: NECHADRAFT_82657 [Nectria haematococca mpVI 77-13-4]
  misc_feature (18)..(342): NCBI GI: 242773363 Blast Desc: short-chain dehydrogenase/reductase family protein, [Talaromyces stipitatus ATCC 10500] gi|218721844|gb|EED21262.1| short-chain dehydrogenase/reductase family protein, [Talaromyces
  misc_feature (11)..(344): NCBI GI: 46139917 Blast Desc: FG11473.1 [Gibberella zeae PH-1]
  misc_feature (4)..(342): NCBI GI: 212529584 Blast Desc: short-chain dehydrogenase/reductase family protein, [Penicillium marneffei ATCC 18224] gi|210074347|gb|EEA28434.1| short-chain dehydrogenase/reductase family protein, [Penicillium
  misc_feature (18)..(343): NCBI GI: 256735657 Blast Desc: NECHADRAFT_90563 [Nectria haematococca mpVI 77-13-4]
  misc_feature (17)..(304): NCBI GI: 256727323 Blast Desc: NECHADRAFT_34006 [Nectria haematococca mpVI 77-13-4]
  misc_feature (39)..(256): SWISSPROT Homolog: EC 1.3.1.33 Protochlorophyllide reductase
MTLSFDLGPPTETPGQLFFKSQFRSPVQWPPSNTRVDGQVAIVTGATRGLGLEASRQLLAIGLSTLILAVRSTTKGEEVAADFRTQHPECDIEVWSLDMDDYESIQTFAQQAESTLTRLDIVILNAGVQNSKFLTNPTTGHESNIQVNYLSTMLLGILLLPILKAKSAQSRLGRLTIVNSGTARGASLSGPKGDPIIPFLDDKSRPWDPVGRYGVSKMLAHLFIIELAKRITAEHGVVVNLADPGLTKGTNLQGGHPWPVIAFFAVYKSILARSLLVGASTYIDAAVVKDAQSHGCYVANWKISAYAAFVYTPEGEAARKQLWEETMDEFSFADARGILQALAR

SEQ ID NO: 23213 - DNA, 449 bp, Muscodor strobelii
  misc_feature: SGI EST ID NO. CUFF.54655.0
  misc_feature: Variant of the nucleotide sequence at SEQ ID NO 23211
gcaagatgcttgcccatttgtttataattgagctggccaagcgcattacggccgagcacggcgttgtcgtcaatctggccgaccccggactaacaaaaggaaccaatttgcagggcggacatccgtggcctgtcatcgcttttttcgcagtctataagtccattctggctagaagcttgcttgtgggcgcttccacatacattgacgctgccgtggtcaaggatgcgcagtctcacggttgctacgtggccaattggaagatctctgcatatgcggcgttcgtatatacaccggaaggagaggcagctcgaaaacaattatgggaagagaccatggatgagtttagttttgcggatgcgagagggattttacaggctttagcaagataagctttctcgaagagtctccgcgaatcattacactacttttataagggctgcgccttcata

SEQ ID NO: 23214 - DNA, 1410 bp, Muscodor strobelii
  misc_feature: SGI cDNA ID NO. 567895
  misc_feature: Reduced expression when VOC is produced
  misc_feature: Encodes the peptide sequence at SEQ ID NO 23215
atgtatagcggaccctactctgtgggaatcgtcgatatcgaggttcccgtgtcaccgcgcgtcatagtagatactgcgcggtacaaaagatcagggaagaatgcttttgagatcgaaaccgttctattttctttatactatcccgcaactcagggcaaaagtgatcaatcgaaacactactgggtcgataaaccggtctctgtcaccgcgaaggggtatgcgaaatttgcccacgtcagcagtgtcgttaccgatgccatcttcactggcgccgttcgtactctagttggcggcgttgagattcccgcaaaagtcgacatgccgctagccgacctggcgcctcctatttccagccaccctgataccgatgaagatgagcagaaggaaaaggtgatcgttaccgaaatacagggttaccgtgtcattgtcttttctcacggcatggcatcttcccgcacggattatacgcattacgctggcgagctggcatcgcgaggctacattgttgccatgatagagcaccgcgatggatcttgtccgggatctgttatctctcaagatggggaaccaaatcagaaaaaatacacttttcgaatgtccgaggtcgaaactacagatggtcagaagctagaggttgacgaattcaagcgggcgcagttgaatttccgtgaagccgaaatcgaagagacagttaatgttttgaggcaaattaatgatggaaagggagacgaagtgttccagaataactctcggaaagagggttcccaacttagtgactgggcagggaggctcaatatcaatgagatgatcatggcaggtcatagttatggtgctactggagctctccaggctttgaagaatagtccaaatgaaaaacgaccattcattggcggcatagtgttggatccgggaaagcagagcggcagattgaacgacgatatcagcgtaccgatcatggttatacacagcaattcctggagcagcaagcacagtctcttctacggaagaccccatttcagcgttgtccgcgagcttgttgaaaagaataacgatcatggtcacccatcttggttcgtcacttcgcttggtacatctcatccctcggtaacggatgcgccaatactggaaccaacacttctgagttggacaacaggtgcgaaaatcgatgtatatgagggattacggcagtatgtccacgtgtctgaggacttcctttgcttcttgacacaaggcgagatgcggaatttacttgcggaaaaagccgagtttcctgaatatgatgccggtaagggatttggcaaatggaagccgagccaaggtcacgaggatataaaagacgaatggtgggactggaggcggtattggcaagttcatgtttcccctaacaaagaacgaatcactaccgaataa

SEQ ID NO: 23215 - protein, 469 aa, Muscodor strobelii
  misc_feature: SGI Peptide ID NO. 567895
  misc_feature (2)..(421): Pfam Id: PF03403 Pfam Desc: Platelet-activating factor acetylhydrolase, plasma/intracellular isoform II
  misc_feature (138)..(178): Pfam Id: PF03403 Pfam Desc: Platelet-activating factor acetylhydrolase, plasma/intracellular isoform II
  misc_feature (2)..(461): NCBI GI: 171678909 Blast Desc: protein product [Podospora anserina] gi|170937525|emb|CAP62183.1| protein product [Podospora anserina]
  misc_feature (2)..(464): NCBI GI: 256731953 Blast Desc: NECHADRAFT_61471 [Nectria haematococca mpVI 77-13-4]
  misc_feature (2)..(465): NCBI GI: 46105132 Blast Desc: FG00194.1 [Gibberella zeae PH-1]
  misc_feature (2)..(464): NCBI GI: 67527758 Blast Desc: AN4154.2 [Aspergillus nidulans FGSC A4] gi|40740225|gb|EAA59415.1| AN4154.2 [Aspergillus nidulans FGSC A4] gi|259481250|tpe|CBF74595.1| TPA: conserved [Aspergillus FGSC
  misc_feature (2)..(464): NCBI GI: 67537978 Blast Desc: AN5159.2 [Aspergillus nidulans FGSC A4] gi|40743150|gb|EAA62340.1| AN5159.2 [Aspergillus nidulans FGSC A4] gi|259484612|tpe|CBF80984.1| TPA: conserved [Aspergillus FGSC
  misc_feature (2)..(463): NCBI GI: 169612407 Blast Desc: SNOG_09326 [Phaeosphaeria nodorum SN15] gi|111062398|gb|EAT83518.1| SNOG_09326 [Phaeosphaeria nodorum SN15]
  misc_feature (2)..(417): NCBI GI: 189190294 Blast Desc: PAF-acetylhydrolase family member [Pyrenophora tritici-repentis Pt-1C-BFP] gi|187973092|gb|EDU40591.1| PAF-acetylhydrolase family member [Pyrenophora tritici-repentis
  misc_feature (2)..(405): NCBI GI: 154296382 Blast Desc: BC1G_13017 [Botryotinia fuckeliana B05.10] gi|150843378|gb|EDN18571.1| BC1G_13017 [Botryotinia fuckeliana B05.10]
  misc_feature (2)..(405): NCBI GI: 156054668 Blast Desc: SS1G_06182 [Sclerotinia sclerotiorum 1980] gi|154703962|gb|EDO03701.1| SS1G_06182 [Sclerotinia sclerotiorum 1980]
  misc_feature (3)..(409): NCBI GI: 189197169 Blast Desc: conserved [Pyrenophora tritici-repentis Pt-1C-BFP] gi|187980870|gb|EDU47496.1| conserved [Pyrenophora tritici-repentis Pt-1C-BFP]
  misc_feature (38)..(405): SWISSPROT Homolog: EC 3.1.1.47 1-alkyl-2-acetylglycerophosphocholine esterase
  misc_feature: Useful for introducing or modulating the production of volatile compounds
MYSGPYSVGIVDIEVPVSPRVIVDTARYKRSGKNAFEIETVLFSLYYPATQGKSDQSKHYWVDKPVSVTAKGYAKFAHVSSVVTDAIFTGAVRTLVGGVEIPAKVDMPLADLAPPISSHPDTDEDEQKEKVIVTEIQGYRVIVFSHGMASSRTDYTHYAGELASRGYIVAMIEHRDGSCPGSVISQDGEPNQKKYTFRMSEVETTDGQKLEVDEFKRAQLNFREAEIEETVNVLRQINDGKGDEVFQNNSRKEGSQLSDWAGRLNINEMIMAGHSYGATGALQALKNSPNEKRPFIGGIVLDPGKQSGRLNDDISVPIMVIHSNSWSSKHSLFYGRPHFSVVRELVEKNNDHGHPSWFVTSLGTSHPSVTDAPILEPTLLSWTTGAKIDVYEGLRQYVHVSEDFLCFLTQGEMRNLLAEKAEFPEYDAGKGFGKWKPSQGHEDIKDEWWDWRRYWQVHVSPNKERITTE

SEQ ID NO: 23216 - DNA, 1911 bp, Muscodor strobelii
  misc_feature: SGI EST ID NO. CUFF.54664.0
  misc_feature: Variant of the nucleotide sequence at SEQ ID NO 23214
agaataccaagtttatctgatttgtgaacagtcccaaccgccaactcttgggtgaccttgaaaccccatgtaaactattgacagaactggttgcacgatgcgcccatttccagaagctccgtacgcgactggtcgatctccaatgcgttggaggatcccacccattctccgtccaaggttgacttcttggaaatatcttctgagttccaccatcgtactttacgtgatatattgttacgtcttctcattgcctcttttctgtaaccctttgccaatgtatagcggaccctactctgtgggaatcgtcgatatcgaggttcccgtgtcaccgcgcgtcatagtagatactgcgcggtacaaaagatcagggaagaatgcttttgagatcgaaaccgttctattttctttatactatcccgcaactcagggcaaaagtgatcaatcgaaacactactgggtcgataaaccggtctctgtcaccgcgaaggggtatgcgaaatttgcccacgtcagcagtgtcgttaccgatgccatcttcactggcgccgttcgtactctagttggcggcgttgagattcccgcaaaagtcgacatgccgctagccgacctggcgcctcctatttccagccaccctgataccgatgaagatgagcagaaggaaaaggtgatcgttaccgaaatacagggttaccgtgtcattgtcttttctcacggcatggcatcttcccgcacggattatacgcattacgctggcgagctggcatcgcgaggctacattgttgccatgatagagcaccgcgatggatcttgtccgggatctgttatctctcaagatggggaaccaaatcagaaaaaatacacttttcgaatgtccgaggtcgaaactacagatggtcagaagctagaggttgacgaattcaagcgggcgcagttgaatttccgtgaagccgaaatcgaagagacagttaatgttttgaggcaaattaatgatggaaagggagacgaagtgttccagaataactctcggaaagagggttcccaacttagtgactgggcagggaggctcaatatcaatgagatgatcatggcaggtcatagttatggtgctactggagctctccaggctttgaagaatagtccaaatgaaaaacgaccattcattggcggcatagtgttggatccgggaaagcagagcggcagattgaacgacgatatcagcgtaccgatcatggttatacacagcaattcctggagcagcaagcacagtctcttctacggaagaccccatttcagcgttgtccgcgagcttgttgaaaagaataacgatcatggtcacccatcttggttcgtcacttcgcttggtacatctcatccctcggtaacggatgcgccaatactggaaccaacacttctgagttggacaacaggtgcgaaaatcgatgtatatgagggattacggcagtatgtccacgtgtctgaggacttcctttgcttcttgacacaaggcgagatgcggaatttacttgcggaaaaagccgagtttcctgaatatgatgccggtaagggatttggcaaatggaagccgagccaaggtcacgaggatataaaagacgaatggtgggactggaggcggtattggcaagttcatgtttcccctaacaaagaacgaatcactaccgaataatagacaagactatggaacgaaagagtataccaatcggcctgaatgatgtccagagctttgaagatagaatatgtgcaatttagaatacatgtacattagagtcgacataagagaaatgagccacttcgtcctaattggacgactccctgagcaaataaatgcaatttagatcatgtttttgcatctaagagaatctggaaagtcagattggcgattacaatatgctg

SEQ ID NO: 23217 - DNA, 594 bp, Muscodor strobelii
  misc_feature: SGI cDNA ID NO. 567896
  misc_feature: Encodes the peptide sequence at SEQ ID NO 23218
atgccgacaactcgacgttcttccgccgggcgtccggccgcaaaacaagcgaccctatcattcaaccaccgagtcaccaagtccgttcctaaatccgccaaagacctttcctcaacacccgtcaagcaaagtccgctatctaagaacgtcacaaccgcagaggtcaaagacgagcctgacactgacgaggaagccaccatcctacaagatgttgagcctgcaacggagcttaaggtagaacccgaggcggagcccgagaagacagaggcagagctccgcgcagagaagatctcaagcaagcaagtcagctcctactggcgcaagatcgagagcgagcgcagaaccaagagagtgcaccaggaggacctgaccttggcggagaagattctgcgatattgggatgtcagctcgcagtacgggccttgtgtcggaatcacgcgcatgaagcgctggcagcgcgcggacaaattgggtctcaatccccctctggaggtccttgccgtgctgatgaaagaggaaagcaacggaactaagggtactaagaatgctcatatggacgatatcctcaactcaactgccgttggagccggatag

SEQ ID NO: 23218 - protein, 197 aa, Muscodor strobelii
  misc_feature: SGI Peptide ID NO. 567896
  misc_feature (54)..(184): Pfam Id: PF04081 Pfam Desc: DNA polymerase delta, subunit 4
  misc_feature (78)..(184): Pfam Id: PF04081 Pfam Desc: DNA polymerase delta, subunit 4
  misc_feature (1)..(197): NCBI GI: 39977693 Blast Desc: MGG_06731 [Magnaporthe grisea 70-15] gi|145013749|gb|EDJ98390.1| MGG_06731 [Magnaporthe grisea 70-15]
  misc_feature (1)..(194): NCBI GI: 46123309 Blast Desc: FG06032.1 [Gibberella zeae PH-1]
  misc_feature (1)..(196): NCBI GI: 261357005 Blast Desc: conserved [Verticillium albo-atrum VaMs.102]
  misc_feature (1)..(196): NCBI GI: 256733002 Blast Desc: NECHADRAFT_78869 [Nectria haematococca mpVI 77-13-4]
  misc_feature (1)..(196): NCBI GI: 116199801 Blast Desc: CHGG_08056 [Chaetomium globosum CBS 148.51] gi|88179335|gb|EAQ86803.1| CHGG_08056 [Chaetomium globosum CBS 148.51]
  misc_feature (87)..(195): NCBI GI: 85081895 Blast Desc: NCU03528 [Neurospora crassa OR74A] gi|16944541|emb|CAB98245.2| conserved [Neurospora crassa] gi|28917885|gb|EAA27571.1| [Neurospora crassa OR74A]
  misc_feature (1)..(195): NCBI GI: 171688876 Blast Desc: protein product [Podospora anserina] gi|170944400|emb|CAP70510.1| protein product [Podospora anserina]
  misc_feature (1)..(190): NCBI GI: 121699790 Blast Desc: DNA polymerase delta subunit 4, [Aspergillus clavatus NRRL 1] gi|119396302|gb|EAW06734.1| DNA polymerase delta subunit 4, [Aspergillus clavatus NRRL 1]
  misc_feature (1)..(190): NCBI GI: 119471517 Blast Desc: DNA polymerase delta subunit 4, [Neosartorya fischeri NRRL 181] gi|119406334|gb|EAW16285.1| DNA polymerase delta subunit 4, [Neosartorya fischeri NRRL 181]
  misc_feature (1)..(190): NCBI GI: 70992191 Blast Desc: DNA polymerase delta subunit 4 [Aspergillus fumigatus Af293] gi|66848577|gb|EAL88906.1| DNA polymerase delta subunit 4, [Aspergillus fumigatus Af293] gi|159124513|gb|EDP49631.1| DNA 4,
MPTTRRSSAGRPAAKQATLSFNHRVTKSVPKSAKDLSSTPVKQSPLSKNVTTAEVKDEPDTDEEATILQDVEPATELKVEPEAEPEKTEAELRAEKISSKQVSSYWRKIESERRTKRVHQEDLTLAEKILRYWDVSSQYGPCVGITRMKRWQRADKLGLNPPLEVLAVLMKEESNGTKGTKNAHMDDILNSTAVGAG

SEQ ID NO: 23219 - DNA, 1935 bp, Muscodor strobelii
  misc_feature: SGI EST ID NO. CUFF.54745.0
  misc_feature: Variant of the nucleotide sequence at SEQ ID NO 23217
tagcgcaagtgtttgggccctgcacatcactcacgtcattccagccagttcccactctgaccatctgtttagcacccatattcgaccaattcggtaccacaatcaagcattgcgcatagggaaatcgcagctttacactgcagtctcaagcaacagcatcatcattcttactcctccacaatgccgacaactcgacgttcttccgccgggcgtccggccgcaaaacaagcgaccctatcattcaaccaccgagtcaccaagtccgttcctaaatccgccaaagacctttcctcaacacccgtcaagcaaagtccgctatctaagaacgtcacaaccgcagaggtcaaagacgagcctgacactgacgaggaagccaccatcctacaagatgttgagcctgcaacggagcttaaggtagaacccgaggcggagcccgagaagacagaggcagagctccgcgcagagaagatctcaagcaagcaagtcagctcctactggcgcaagatcgagagcgagcgcagaaccaagagagtgcaccaggaggacctgaccttggcggagaagattctgcgatattgggatgtcagctcgcagtacgggccttgtgtcggaatcacgcgcatgaagcgctggcagcgcgcggacaaattgggtctcaatccccctctggaggtccttgccgtgctgatgaaagaggaaagcaacggaactaagggtactaagaatgctcatatggacgatatcctcaactcaactgccgttggagccggatagatttgcacttctacatatttgggcagaaagtaggagttgggtgccgctaggttgaggtgatctggccgggatcaatgttgcatatacgacatgctgcttctgagcgtttggcttcattgtgtttttatggcgtctggagttgagagggctatactcaatggatataacaattgctttgcagtatctgttcctttctctcaattttcatcggtgcgttcagtatatgccgtgctcaagagtatatgcccccttcaacgaaatctgcttgcactaattgccatgatattatcaacacgatgaatcgtggattccgcccagtcaatgctagtaccaaatgcttcgcgtgcggtgatgcggaatcacatcccttccctcggcttccattgccttcatggtatcatataagaaaaagtctatcaaaatggcgttgaccactgtatcggggtgttgacgtttgatctcacgcctgatgagctcaacacaccagatgctacaagctgcgcatcatacatattgattagtgtgagcgggtggagatgctggctccgggactaacaactcacctcgaagctgcatttcgtaactgcttccgctttctatgagctcttgcctggttatcagcgactgtaacggcgggctatatccaatacagccgagtgtggccaggatctgtggtacgcggtaatcggcaaacatggtgattttatcgatgtctcggaaagaaccgtagtcctcgccgttgaagcacgcccatacgtctgcaaccaagatctgggctcgtttgaggaagcggataggcttgcgccgtcctcgaaatgcaaattcgtcgttaaaacaagcgaagtcgcgggcgagcaggttgacaagtccggcagccgatccattggcagcttctatgcagtttgtgaaactacagttatatttctgcaaagccacgctttgtgttggtaatagttccatttcggagcttttatacttctgggttctgaggcaagcaagggaaattcaacctacttcgtatagaacttgtccggcttctcgtagacaagtgagacgggcttcgataagtggcatttcctcatccgtggatgagcggaagacatgccgtagggaatctacagtgcattcatcttcgttttgccagtagtgagggtcggtaat

SEQ ID NO: 23220 - DNA, 1101 bp, Muscodor strobelii
  misc_feature: SGI cDNA ID NO. 567897
  misc_feature: Encodes the peptide sequence at SEQ ID NO 23221
atgtctgatgatgaggccgaccccgagctgctcgccctgctacggcagcatctcgagggcaagttgaatctaagcgaggagcccgagacaggagtgctcgagggagccgaatatgtctacgacaattccatcgatgtcgcgttggacatgagagccaccaagaacgccgctgcttttatctatgatcaaatgcagcaaaaacaattctcaaccgagagttgggctgagcacgaactccatccaaagactaaagacgaatctgccctcgctttcatcttcacaatggatttactcaacttttctttctggtcataccgcccagagggcaagcgttttgctgtctcataccgagacaagacttggaccgggtattggagtttagttgcttctttacaaagagctttagaagaaggcatacccattaccgaccctcactactggcaaaacgaagatgaatgcactgtagattccctacggcatgtcttccgctcatccacggatgaggaaatgccacttatcgaagcccgtctcacttgtctacgagaagccggacaagttctatacgaaaaatataactgtagtttcacaaactgcatagaagctgccaatggatcggctgccggacttgtcaacctgctcgcccgcgacttcgcttgttttaacgacgaatttgcatttcgaggacggcgcaagcctatccgcttcctcaaacgagcccagatcttggttgcagacgtatgggcgtgcttcaacggcgaggactacggttctttccgagacatcgataaaatcaccatgtttgccgattaccgcgtaccacagatcctggccacactcggctgtattggatatagcccgccgttacagtcgctgataaccaggcaagagctcatagaaagcggaagcagttacgaaatgcagcttcgagcttgtagcatctggtgtgttgagctcatcaggcgtgagatcaaacgtcaacaccccgatacagtggtcaacgccattttgatagactttttcttatatgataccatgaaggcaatggaagccgagggaagggatgtgattccgcatcaccgcacgcgaagcatttggtactag

SEQ ID NO: 23221 - protein, 366 aa, Muscodor strobelii
  misc_feature: SGI Peptide ID NO. 567897
  misc_feature (1)..(366): NCBI GI: 116199803 Blast Desc: CHGG_08057 [Chaetomium globosum CBS 148.51] gi|88179336|gb|EAQ86804.1| CHGG_08057 [Chaetomium globosum CBS 148.51]
  misc_feature (3)..(366): NCBI GI: 85081891 Blast Desc: NCU03527 [Neurospora crassa OR74A] gi|9368586|emb|CAB98246.1| conserved [Neurospora crassa] gi|28917884|gb|EAA27570.1| conserved [Neurospora crassa OR74A]
  misc_feature (1)..(366): NCBI GI: 145606008 Blast Desc: MGG_06732 [Magnaporthe grisea 70-15] gi|145013748|gb|EDJ98389.1| MGG_06732 [Magnaporthe grisea 70-15]
  misc_feature (1)..(366): NCBI GI: 171688878 Blast Desc: protein product [Podospora anserina] gi|170944401|emb|CAP70511.1| protein product [Podospora anserina]
  misc_feature (1)..(366): NCBI GI: 145243082 Blast Desc: An11g00780 [Aspergillus niger] gi|134078755|emb|CAK40552.1| protein product [Aspergillus niger]
  misc_feature (1)..(366): NCBI GI: 169772657 Blast Desc: [Aspergillus oryzae RIB40] gi|83768658|dbj|BAE58795.1| protein product [Aspergillus oryzae]
  misc_feature (1)..(366): NCBI GI: 189189614 Blast Desc: conserved [Pyrenophora tritici-repentis Pt-1C-BFP] gi|187972752|gb|EDU40251.1| conserved [Pyrenophora tritici-repentis Pt-1C-BFP]
  misc_feature (1)..(366): NCBI GI: 256732560 Blast Desc: [Nectria haematococca mpVI 77-13-4]
  misc_feature (2)..(366): NCBI GI: 121699774 Blast Desc: conserved [Aspergillus clavatus NRRL 1] gi|119396294|gb|EAW06726.1| conserved [Aspergillus clavatus NRRL 1]
  misc_feature (9)..(366): NCBI GI: 238840412 Blast Desc: MCYG_02893 [Microsporum canis CBS 113480]
MSDDEADPELLALLRQHLEGKLNLSEEPETGVLEGAEYVYDNSIDVALDMRATKNAAAFIYDQMQQKQFSTESWAEHELHPKTKDESALAFIFTMDLLNFSFWSYRPEGKRFAVSYRDKTWTGYWSLVASLQRALEEGIPITDPHYWQNEDECTVDSLRHVFRSSTDEEMPLIEARLTCLREAGQVLYEKYNCSFTNCIEAANGSAAGLVNLLARDFACFNDEFAFRGRRKPIRFLKRAQILVADVWACFNGEDYGSFRDIDKITMFADYRVPQILATLGCIGYSPPLQSLITRQELIESGSSYEMQLRACSIWCVELIRREIKRQHPDTVVNAILIDFFLYDTMKAMEAEGRDVIPHHRTRSIWY

SEQ ID NO: 23222 - DNA, 2531 bp, Muscodor strobelii
  misc_feature: SGI EST ID NO. CUFF.54746.1
  misc_feature: Variant of the nucleotide sequence at SEQ ID NO 23220
gggtgataagacaaggagatcctacatttgcagccaaatgcactttagtagctttagatacatcactcaaaggcttgcgacatctttaacgaaagagggattgtttggcttgaatgctgtgttcctctgtggacgtcaacaattcgttccctttaggttcaattcatttgtttctgggcgctctagttgacttaacttcctgcagtgcccctccaaggctcaggacaggcaatttttcaaaactacctacttgtaccgaaactcgcctcatgtctgatgatgaggccgaccccgagctgctcgccctgctacggcagcatctcgagggcaagttgaatctaagcgaggagcccgagacaggagtgctcgagggagccgaatatgtctacgacaattccatcgatgtcgcgttggacatgagagccaccaagaacgccgctgcttttatctatgatcaaatgcagcaaaaacaattctcaaccgagagttgggctgagcacgaactccatccaaagactaaagacgaatctgccctcgctttcatcttcacaatggatttactcaacttttctttctggtcataccgcccagagggcaagcgttttgctgtctcataccgagacaagacttggaccgggtattggagtttagttgcttctttacaaagagctttagaagaaggcatacccattaccgaccctcactactggcaaaacgaagatgaatgcactgtagattccctacggcatgtcttccgctcatccacggatgaggaaatgccacttatcgaagcccgtctcacttgtctacgagaagccggacaagttctatacgaaaaatataactgtagtttcacaaactgcatagaagctgccaatggatcggctgccggacttgtcaacctgctcgcccgcgacttcgcttgttttaacgacgaatttgcatttcgaggacggcgcaagcctatccgcttcctcaaacgagcccagatcttggttgcagacgtatgggcgtgcttcaacggcgaggactacggttctttccgagacatcgataaaatcaccatgtttgccgattaccgcgtaccacagatcctggccacactcggctgtattggatatagcccgccgttacagtcgctgataaccaggcaagagctcatagaaagcggaagcagttacgaaatgcagcttcgagcttgtagcatctggtgtgttgagctcatcaggcgtgagatcaaacgtcaacaccccgatacagtggtcaacgccattttgatagactttttcttatatgataccatgaaggcaatggaagccgagggaagggatgtgattccgcatcaccgcacgcgaagcatttggtactagcattgactgggcggaatccacgattcatcgtgttgataatatcatggcaattagtgcaagcagatttcgttgaagggggcatatactcttgagcacggcatatactgaacgcaccgatgaaaattgagagaaaggaacagatactgcaaagcaattgttatatccattgagtatagccctctcaactccagacgccataaaaacacaatgaagccaaacgctcagaagcagcatgtcgtatatgcaacattgatcccggccagatcacctcaacctagcggcacccaactcctactttctgcccaaatatgtagaagtgcaaatctatccggctccaacggcagttgagttgaggatatcgtccatatgagcattcttagtacccttagttccgttgctttcctctttcatcagcacggcaaggacctccagagggggattgagacccaatttgtccgcgcgctgccagcgcttcatgcgcgtgattccgacacaaggctgtcatatttattagcatcactgaggattgccaagtcagatagagggaaggatgctacataccccgtactgcgagctgacatcccaatatcgcagaatcttctccgccaaggtcaggtcctcctggtgcactctcttggttctgcgctcgctctcgatcttgcgccagtaggagctgacttgcttgcttgagatcttctctgcgcggagctctgcctctgtcttctcgggctccgcctcgggttctaccttaagctccgttgcaggctcaacatcttgtaggatggtggcttcctcgtcagtgtcaggctcgtctttgacctctgcggttgtgacgttcttagatagcggactttgcttgacgggtgttgaggaaaggtctttggcggatttaggaacggacttggtgactcggtggttgaatgatagggtcgcttgttttgcggccggacgcccggcggaagaacgtcgagttgtcggcattgtggaggagtaagaatgatgatgctgttgcttgagactgcagtgtaaagctgcgatttccctatgcgcaatgcttgattgtggtaccgaattggtcgaatatgggtgctaaacagatggtcagagtgggaactggctggaatgacgtgagtgatgtgcagggcccaaacacttgcgcta

SEQ ID NO: 23223 - DNA, 1902 bp, Muscodor strobelii
  misc_feature: SGI cDNA ID NO. 567898
  misc_feature: Reduced expression when VOC is produced
  misc_feature: Encodes the peptide sequence at SEQ ID NO 23224
atggcgctccatcgcgataccttcaacctgcagtccttcgggccctctctcaatgcgagcgtcaagcagtcggttgtcctcatggtaggcgcaggtggaatcggctgcgaactcctcaagaacttggccctcactggcttcggcgagatccacatcgtcgacctagatacgatcgatcttagcaacctcaatcgccaattcctcttcagacatgagcatattaaaaaatcaaaagctctggttgcgaaggaggctgccgagagattcaaccccaatgtcaggatcgaagcccatcatgcgaatatcaaggatgcccaatttaacctgcaatggttcaaaaagttcaacatagtattcaatgctctcgacaacctcgaagcaagacgccatgtgaacaggatgtgcctggcagccgatgtccccctgatcgagagcggaaccactggattcaacggacaggtacaggtcatcaagaagggtgtcaccgcctgctacgattgcactgcaaaggaagtgcccaaatcctttcccgtctgcaccatccgaagcacaccgagtcagcccatacattgtatagtttggggcaagagctacctcctgaacgagattttcggtacaagtgaagaccaggccgctcttgatacatcagagaacgaagaaaacgcggaggagatagcagaactgaagaaggaatcacatgcactgcgagcaatccgagactcggctggcacagaggatttccagaggatgcttttcgacaaagtcttcaatcaagacatcttaaggttacagtcgatggaggacatgtggaagtccagaactcctcccgcacccctcgagtacgatgaggtgatgaaacgggtgaccgaagctggcatctcaaaagaatctattcttgaagatgggcagaagacctggtccctggaggagaatcttgtcgttttcaacgacagtgccgaccgtttgagcaaacgcctttcggacctgaagcaaattcatggcgaagattctacccaagcatcgatatcgtttgacaaggatgatgaagatacactggacttcgtagccgcaagtgctaatgttcgatcatacgtatttggtattgaacgcaaatctcgatttgacatcaagcaaatggcaggcaacatcatccctgctatagcaacaacaaatgcaatcgtggcaggtctgtgcgttctcgaatctttcaaggtccttagaggggaatttgataaggcgcaagaggtctttctgtcaccctttgcccctcaaagactcctggctacggacagaccccgtgaacccaatccgaattgcccaatatgcagtaactaccagatcagcatatatgtcgatctttcgcgagcgactctgaacgaccttgtggaggattttgtcaagttacagctcggattcggcgaacgcgagtttgcagtcaataccgacaaagggttgctgtatgatcctgacgaaagtgacaacttgggcaaattgctcagtgaactagaaatcaaccagaacagcttcgtcactatagttgacgaggaggaggaagacacaatgattaacgtcgttctcaacatacaagaagctaccttagagtcgtccgagaagccgatcaaaggtcttggaccagataaatcaccagatatcccacgaaaacctaggtcagagccggccgtagagagcaacggagtcgagcaagtcaatggcaagacagatgggcttgtcgcagaacccgtattagaggcggccgccggagtctccaagcccgatctcaagcgccgccgtgatgacgacgagaccgggatcacattagtcaagcgaaccaagacgggtgatgatgtagttgtcgtagccgatgatgccggcacgggggcaattgtgatcgacgatgattag

SEQ ID NO: 23224 - protein, 633 aa, Muscodor strobelii
  misc_feature: SGI Peptide ID NO. 567898
  misc_feature (22)..(157): Pfam Id: PF00899 Pfam Desc: ThiF family
  misc_feature (343)..(409): Pfam Id: PF02134 Pfam Desc: Repeat in ubiquitin-activating (UBA) protein
  misc_feature (3)..(632): NCBI GI: 238490570 Blast Desc: ubiquitin-like activating enzyme (UbaB), [Aspergillus flavus NRRL3357] gi|220696935|gb|EED53276.1| ubiquitin-like activating enzyme (UbaB), [Aspergillus flavus NRRL3357]
  misc_feature (5)..(632): NCBI GI: 240108834 Blast Desc: ThiF family protein [Coccidioides posadasii C735 delta SOWgp]
  misc_feature (24)..(632): NCBI GI: 169772655 Blast Desc: [Aspergillus oryzae RIB40] gi|83768657|dbj|BAE58794.1| protein product [Aspergillus oryzae]
  misc_feature (5)..(632): NCBI GI: 119175861 Blast Desc: CIMG_09705 [Coccidioides immitis RS]
  misc_feature (3)..(633): NCBI GI: 67523989 Blast Desc: AN2450.2 [Aspergillus nidulans FGSC A4] gi|40745000|gb|EAA64156.1| AN2450.2 [Aspergillus nidulans FGSC A4] gi|259487865|tpe|CBF86880.1| TPA: ubiquitin-like activating
  misc_feature (3)..(632): NCBI GI: 119471507 Blast Desc: ubiquitin-like activating enzyme (UbaB), [Neosartorya fischeri NRRL 181] gi|119406329|gb|EAW16280.1| ubiquitin-like activating enzyme (UbaB), [Neosartorya fischeri NRRL 181]
  misc_feature (6)..(633): NCBI GI: 261190634 Blast Desc: ubiquitin-like activating enzyme UbaB [Ajellomyces dermatitidis SLH14081] gi|239591149|gb|EEQ73730.1| ubiquitin-like activating enzyme UbaB [Ajellomyces dermatitidis SLH14081]
  misc_feature (6)..(633): NCBI GI: 239614836 Blast Desc: ubiquitin-activating enzyme [Ajellomyces dermatitidis ER-3]
  misc_feature (6)..(633): NCBI GI: 226278549 Blast Desc: ubiquitin-activating enzyme [Paracoccidioides brasiliensis Pb01]
  misc_feature (3)..(633): NCBI GI: 145243080 Blast Desc: An11g00770 [Aspergillus niger] gi|134078754|emb|CAK40551.1| protein product [Aspergillus niger]
  misc_feature: Useful for introducing or modulating the production of volatile compounds
MALHRDTFNLQSFGPSLNASVKQSVVLMVGAGGIGCELLKNLALTGFGEIHIVDLDTIDLSNLNRQFLFRHEHIKKSKALVAKEAAERFNPNVRIEAHHANIKDAQFNLQWFKKFNIVFNALDNLEARRHVNRMCLAADVPLIESGTTGFNGQVQVIKKGVTACYDCTAKEVPKSFPVCTIRSTPSQPIHCIVWGKSYLLNEIFGTSEDQAALDTSENEENAEEIAELKKESHALRAIRDSAGTEDFQRMLFDKVFNQDILRLQSMEDMWKSRTPPAPLEYDEVMKRVTEAGISKESILEDGQKTWSLEENLVVFNDSADRLSKRLSDLKQIHGEDSTQASISFDKDDEDTLDFVAASANVRSYVFGIERKSRFDIKQMAGNIIPAIATTNAIVAGLCVLESFKVLRGEFDKAQEVFLSPFAPQRLLATDRPREPNPNCPICSNYQISIYVDLSRATLNDLVEDFVKLQLGFGEREFAVNTDKGLLYDPDESDNLGKLLSELEINQNSFVTIVDEEEEDTMINVVLNIQEATLESSEKPIKGLGPDKSPDIPRKPRSEPAVESNGVEQVNGKTDGLVAEPVLEAAAGVSKPDLKRRRDDDETGITLVKRTKTGDDVVVVADDAGTGAIVIDDD

SEQ ID NO: 23225 - DNA, 3668 bp, Muscodor strobelii
  misc_feature: SGI EST ID NO. CUFF.54962.0
  misc_feature: Variant of the nucleotide sequence at SEQ ID NO 23223
gaaagtcgcacctcagatccagactttcatcttcatgttgcaacatccttgcagactgatctatcaacatcaatcggctgcacaacagcttgcgcttttccacttgaagcacattggatctgtaaacctgctacagaacacccacgtgcctcgagcccggccatcgcgacttgccccccttcctcgacgctcttaacagctccgtaaagggaagaagttccaccgaggctgagaagcaagcgcaaaccacacgatcctccttctaaacccaaactgacccggcccttcctttcgactgtcgacttccatccatccaaataacaccgaattaactgctccctccatatcgagctcattcgacactccactccgaaactcgctaggcagtctgtccgaagatatatccgatttgctgtgcaccttcggctcctgcacgtcatacatgcctcgacgaatctcttctccgtgacgacatccccggatcggtctcgaccatggcgctccatcgcgataccttcaacctgcagtccttcgggccctctctcaatgcgagcgtcaagcagtcggttgtcctcatggtaggcgcaggtggaatcggctgcgaactcctcaagaacttggccctcactggcttcggcgagatccacatcgtcgacctagatacgatcgatcttagcaacctcaatcgccaattcctcttcagacatgagcatattaaaaaatcaaaagctctggttgcgaaggaggctgccgagagattcaaccccaatgtcaggatcgaagcccatcatgcgaatatcaaggatgcccaatttaacctgcaatggttcaaaaagttcaacatagtattcaatgctctcgacaacctcgaagcaagacgccatgtgaacaggatgtgcctggcagccgatgtccccctgatcgagagcggaaccactggattcaacggacaggtacaggtcatcaagaagggtgtcaccgcctgctacgattgcactgcaaaggaagtgcccaaatcctttcccgtctgcaccatccgaagcacaccgagtcagcccatacattgtatagtttggggcaagagctacctcctgaacgagattttcggtacaagtgaagaccaggccgctcttgatacatcagagaacgaagaaaacgcggaggagatagcagaactgaagaaggaatcacatgcactgcgagcaatccgagactcggctggcacagaggatttccagaggatgcttttcgacaaagtcttcaatcaagacatcttaaggttacagtcgatggaggacatgtggaagtccagaactcctcccgcacccctcgagtacgatgaggtgatgaaacgggtgaccgaagctggcatctcaaaagaatctattcttgaagatgggcagaagacctggtccctggaggagaatcttgtcgttttcaacgacagtgccgaccgtttgagcaaacgcctttcggacctgaagcaaattcatggcgaagattctacccaagcatcgatatcgtttgacaaggatgatgaagatacactggacttcgtagccgcaagtgctaatgttcgatcatacgtatttggtattgaacgcaaatctcgatttgacatcaagcaaatggcaggcaacatcatccctgctatagcaacaacaaatgcaatcgtggcaggtctgtgcgttctcgaatctttcaaggtccttagaggggaatttgataaggcgcaagaggtctttctgtcaccctttgcccctcaaagactcctggctacggacagaccccgtgaacccaatccgaattgcccaatatgcagtaactaccagatcagcatatatgtcgatctttcgcgagcgactctgaacgaccttgtggaggattttgtcaagttacagctcggattcggcgaacgcgagtttgcagtcaataccgacaaagggttgctgtatgatcctgacgaaagtgacaacttgggcaaattgctcagtgaactagaaatcaaccagaacagcttcgtcactatagttgacgaggaggaggaagacacaatgattaacgtcgttctcaacatacaagaagctaccttagagtcgtccgagaagccgatcaaaggtcttggaccagataaatcaccagatatcccacgaaaacctaggtcagagccggccgtagagagcaacggagtcgagcaagtcaatggcaagacagatgggcttgtcgcagaacccgtattagaggcggccgccggagtctccaagcccgatctcaagcgccgccgtgatgacgacgagaccgggatcacattagtcaagcgaaccaagacgggtgatgatgtagttgtcgtagccgatgatgccggcacgggggcaattgtgatcgacgatgattaggccacggagtcaaccttatcaacgaactcggcgcgtggtcacgtagagctcaagccgccgtccaagttgagcacacagttgtgcgcatatgaattctgagccagaaacagtgcggcatcagcaacttcatcgacttttcctagacggcctaggggtatcgtatcgctgagctttccaccactgtccataccttcccgaagcttgtatattagtaatgctgcgttgtacaaaagcacagagagatgattgggagtgagacataaagagacgaacgggcatggggacgggaaagacccggcgcacctgatgtcatctcggtatcgatgtagcctgggagtaaaacattggcacggatgccaaaccttcctacttcccacgcgagagagcgtgtaaaagctagggattgcgttagagtatgcacgaataatgaaagagccacgaggcgcgatgatctcaccaacaatgccagcttttgaagcagcgtaaacggatgcgcccctcccaccgtgggtagcaagcatacttgagatattcactatgcaacctgctcggtcgacgtcagtgagtggctatgcccaattcggagagtgtgtccacgaacctgagttctgcttcatcatgagggggatcgcatgctggcaactcaacatggtccctactaggttgctgtctatgagattgcgcatatcgccagatttcaacctaaccaggaaggagttctgggccatgccagcggcattgaccaatatgtcaattttctccttggactgtgatggcggaagacatagtcaccccttagctctttacatctacaatcgattgactaattgttgccgagaaaggatgaataccttttttaactccccttgccattccttccaagctgcttcgcccactacgttgaatggtcgtaccgcgtgtgggcgatcattgtggatgggcagagtctcgaggccctgctcgagagtcgggcggttgcgggcaaccagagtgcaggatgcgccctcggcggcgaaacgttgggctatagctagtccaatgccccgactagccccggtgatgagacaattcttgccggcgagtgatagtggcgccttcatggcggtgcaaactggaaaggtgatgcgagttgatgaagaggtttcgtgaagatggactttttgggactctagtatggatcaaaatcgtcccaagctttgatcaatacttctaacatcacgccagatccctaagaaactacctagcaataacatcttgctttttttagtcttg

SEQ ID NO: 23226 - DNA, 684 bp, Muscodor strobelii
  misc_feature: SGI cDNA ID NO. 567899
  misc_feature: Encodes the peptide sequence at SEQ ID NO 23227
atgaaggcgccactatcactcgccggcaagaattgtctcatcaccggggctagtcggggcattggactagctatagcccaacgtttcgccgccgagggcgcatcctgcactctggttgcccgcaaccgcccgactctcgagcagggcctcgagactctgcccatccacaatgatcgcccacacgcgtccaaggagaaaattgacatattggtcaatgccgctggcatggcccagaactccttcctggttaggttgaaatctggcgatatgcgcaatctcatagacagcaacctagtagggaccatgttgagttgccagcatgcgatccccctcatgatgaagcagaactcaggttgcatagtgaatatctcaagtatgcttgctacccacggtgggaggggcgcatccgtttacgctgcttcaaaagctggcattgttgcttttacacgctctctcgcgtgggaagtaggaaggtttggcatccgtgccaatgttttactcccaggctacatcgataccgagatgacatcaggtatggacagtggtggaaagctcagcgatacgatacccctaggccgtctaggaaaagtcgatgaagttgctgatgccgcactgtttctggctcagaattcatatgcgcacaactgtgtgctcaacttggacggcggcttgagctctacgtga

SEQ ID NO: 23227 - protein, 227 aa, Muscodor strobelii
  misc_feature: SGI Peptide ID NO. 567899
  misc_feature (10)..(157): Pfam Id: PF00106 Pfam Desc: short chain dehydrogenase
  misc_feature (12)..(221): Pfam Id: PF01370 Pfam Desc: NAD dependent epimerase/dehydratase family
  misc_feature (67)..(157): Pfam Id: PF00106 Pfam Desc: short chain dehydrogenase
  misc_feature (10)..(34): Pfam Id: PF00106 Pfam Desc: short chain dehydrogenase
  misc_feature (5)..(226): NCBI GI: 261357002 Blast Desc: gluconate 5-dehydrogenase [Verticillium albo-atrum VaMs.102]
  misc_feature (9)..(225): NCBI GI: 224049721 Blast Desc: : carbonyl reductase 4 [Taeniopygia guttata]
  misc_feature (9)..(225): NCBI GI: 50746204 Blast Desc: : similar to Carbonyl reductase 4 [Gallus gallus]
  misc_feature (7)..(224): NCBI GI: 150015957 Blast Desc: 3-ketoacyl-(acyl-carrier-protein) reductase [Clostridium beijerinckii NCIMB 8052] gi|149902422|gb|ABR33255.1| 3-oxoacyl-(acyl-carrier-protein) reductase [Clostridium NCIMB
  misc_feature (5)..(225): NCBI GI: 83814928 Blast Desc: 3-oxoacyl-(acyl-carrier-protein) reductase [Salinibacter ruber DSM 13855] gi|83756322|gb|ABC44435.1| 3-oxoacyl-(acyl-carrier-protein) reductase [Salinibacter ruber
  misc_feature (5)..(224): NCBI GI: 257081566 Blast Desc: 3-oxoacyl-(acyl-carrier-protein) reductase [Enterococcus faecalis E1Sol] gi|256989596|gb|EEU76898.1| 3-oxoacyl-(acyl-carrier-protein) reductase [Enterococcus faecalis
  misc_feature (5)..(224): NCBI GI: 29377347 Blast Desc: 3-ketoacyl-(acyl-carrier-protein) reductase [Enterococcus faecalis V583] gi|227519395|ref|ZP_03949444.1| 3-ketoacyl-(acyl-carrier-protein) reductase [Enterococcus TX0104]
  misc_feature (5)..(224): NCBI GI: 256763443 Blast Desc: 3-oxoacyl-(acyl-carrier-protein) reductase [Enterococcus faecalis T3] gi|256854169|ref|ZP_05559534.1| 3-oxoacyl-(acyl-carrier-protein) reductase [Enterococcus faecalis
  misc_feature (5)..(224): NCBI GI: 257420205 Blast Desc: 3-oxoacyl-(acyl carrier protein) reductase [Enterococcus faecalis T11] gi|257162033|gb|EEU91993.1| 3-oxoacyl-(acyl carrier protein) reductase [Enterococcus faecalis
  misc_feature (5)..(224): NCBI GI: 256963929 Blast Desc: 3-oxoacyl-(acyl-carrier-protein) reductase [Enterococcus faecalis HIP11704] gi|256954425|gb|EEU71057.1| 3-oxoacyl-(acyl-carrier-protein) reductase [Enterococcus faecalis
  misc_feature (5)..(224): SWISSPROT Homolog: EC 1.1.1.100 3-oxoacyl-[acyl-carrier-protein] reductase
MKAPLSLAGKNCLITGASRGIGLAIAQRFAAEGASCTLVARNRPTLEQGLETLPIHNDRPHASKEKIDILVNAAGMAQNSFLVRLKSGDMRNLIDSNLVGTMLSCQHAIPLMMKQNSGCIVNISSMLATHGGRGASVYAASKAGIVAFTRSLAWEVGRFGIRANVLLPGYIDTEMTSGMDSGGKLSDTIPLGRLGKVDEVADAALFLAQNSYAHNCVLNLDGGLSST

SEQ ID NO: 23228 - DNA, 2891 bp, Muscodor strobelii
  misc_feature: SGI EST ID NO. CUFF.54963.3
  misc_feature: Variant of the nucleotide sequence at SEQ ID NO 23226
gtttcttagggatctggcgtgatgttagaagtattgatcaaagcttgggacgattttgatccatactagagtcccaaaaagtccatcttcacgaaacctcttcatcaactcgcatcacctttccagtttgcaccgccatgaaggcgccactatcactcgccggcaagaattgtctcatcaccggggctagtcggggcattggactagctatagcccaacgtttcgccgccgagggcgcatcctgcactctggttgcccgcaaccgcccgactctcgagcagggcctcgagactctgcccatccacaatgatcgcccacacgcggtacgaccattcaacgtagtgggcgaagcagcttggaaggaatggcaaggggagttaaaaaagtccaaggagaaaattgacatattggtcaatgccgctggcatggcccagaactccttcctggttaggttgaaatctggcgatatgcgcaatctcatagacagcaacctagtagggaccatgttgagttgccagcatgcgatccccctcatgatgaagcagaactcaggttgcatagtgaatatctcaagtatgcttgctacccacggtgggaggggcgcatccgtttacgctgcttcaaaagctggcattgttggtgagatcatcgcgcctcgtggctctttcattattcgtgcatactctaacgcaatccctagcttttacacgctctctcgcgtgggaagtaggaaggtttggcatccgtgccaatgttttactcccaggctacatcgataccgagatgacatcaggtgcgccgggtctttcccgtccccatgcccgttcgtctctttatgtctcactcccaatcatctctctgtgcttttgtacaacgcagcattactaatatacaagcttcgggaaggtatggacagtggtggaaagctcagcgatacgatacccctaggccgtctaggaaaagtcgatgaagttgctgatgccgcactgtttctggctcagaattcatatgcgcacaactgtgtgctcaacttggacggcggcttgagctctacgtgaccacgcgccgagttcgttgataaggttgactccgtggcctaatcatcgtcgatcacaattgcccccgtgccggcatcatcggctacgacaactacatcatcacccgtcttggttcgcttgactaatgtgatcccggtctcgtcgtcatcacggcggcgcttgagatcgggcttggagactccggcggccgcctctaatacgggttctgcgacaagcccatctgtcttgccattgacttgctcgactccgttgctctctacggccggctctgacctaggttttcgtgggatatctggtgatttatctggtccaagacctttgatcggcttctcggacgactctaaggtactaaaaatggaggttagtgagtgtgcaatatgttggatgtaataacactgtacgcttcttgtatgttgagaacgacgttaatcattgtgtcttcctcctcctcgtcaactatagtgacgaagctgttctggttgatttctgtgatatgttagagtaagatccgggtaacatggaggggacatgcctagttcactgagcaatttgcccaagttgtcactttcgtcaggatcatacagcaaccctttgtcggtattgactgcaaactcgcgttcgccgaatccgagctgtaacttgacaaaatcctccacaaggtcgttcagagtcgctcgcgaaagatcgacatatatgctgatctggtagttactgcatattgggcaattcggattgggttcacggggtctgtccgtagccaggagtctttgaggggcaaagggtgacagaaagacctgtcaagtcagtatatcatattcagtagtaagtgtcatcaagcttacctcttgcgccttatcaaattcccctctaaggaccttgaaagattcgagaacgcacagacctgccacgattgcatttgttgttgctatagcagggatgatgttgcctgccatttgcttgatgtcaaatcgagatttgcgttcaataccaaatacgtatgatcgaacattagcacttgcggctacgaagtccagtgtatcttcatcatccttgtcaaacgatatcgatgcttgggtagaatcttcgccatgaatttgcttcaggtccgaaaggcgtttgctcaaacggtcggcactgtcgttgaaaacgacaagattctcctccagggaccaggtcttctgcccatcttcaagaatagattcttttgagatgccagcttcggtcacccgtttcatcacctcatcgtactcgaggggtgcgggaggagttctggacttccacatgtcctccatcgactgtaaccttaagatgtcttgattgaagactttgtcgaaaagcatcctctggaaatcctctgtgccagccgagtctcggattgctcgcagtgcatgtgattccttcttcagttctgctatctcctccgcgttttcttcgttctctgatgtatcaagagcggcctggtcttcacttgtaccgaaaatctcgttcaggaggtagctcttgccccaaactatacaatgtatgggctgactcggtgtgcttcggatggtgcagacgggaaaggatttgggcacttcctttgcagtgcaatcgtagcaggcggtgacacccttcttgatgacctgtacctgtccgttgaatccagtggttccgctctcgatcagggggacatcggctgccaggcacatcctgttcacatggcgtcttgcttcgaggttgtcgagagcattgaatactatgttgaactttttgaaccattgcaggttaaattgggcatccttgatattcgcatgatgggcttcgatcctgacattggggttgaatctctcggca

SEQ ID NO: 23229 - DNA, 1692 bp, Muscodor strobelii
  misc_feature: SGI cDNA ID NO. 567900
  misc_feature: Encodes the peptide sequence at SEQ ID NO 23230
atgactacagcgtttccgcccttgcccaatggcatccacttcgacgaggacggcgtcaacggccatgtggtcaagacgagcgcaacgcccctcgttgttgatacaactgacaataagaaagaggaggaggaggtcatcatagacgctgggctgcggagtctcgaccactacaaacgcgcgctgcccagatggcgatacgacctgcgacagcgcacgctgcccttgatccgctgggagacgccctacctcgcctggatgcaggccaagctgcgcacgcccgccctcgacagctacttcgccatcaccgccaacctcggcacccacaccttcttcatgatcggcctgcccatcatgttctggtgcggctttgcctccttcggccagggcctcgtccacatcctcgcctcgggcgtcttcttcaccggcttcatcaaggacttcttctcgctgccgcgccccctgtccccgcccctgcaccgcatcaccatgtctggctctgccgccttggagtacgggtttccctcgacgcactccgccaacgctgtctccgttgctgtctacgcgcttctctgtcttcgctcgccagataataccttccaaccgaacaccaagttcgccctcgagtgtgtgtcttatttctacgccgtgagcatcgtgttcggtcgcctatactgtggtatgcatggctttttcgacgtcatcattggctcaatcatgggcgtcgtcattacgctcgtcgagttctactatgcgccagccctgaacgtctatctacaagaaaacggctgggcggccatctttgccgtcgtgctcaccatcattgttctagttcgtgtgcatcccgagcctgcagatgactgtccctgcttcgacgacagtgtatgtttcgccggtgtcatgattggcctggaattcgggctttggcacttcgctagatcgccctacgccgacgtaccctttgactttcgcgcgcttggctggcccgccgtgatagcccgggttcttttcggcgttttcgtcgtctttatctggcgcgaggtagccaagccaagtttgttgaaagcgctcccacacgtcttccggcttgtagagacgtggggccttagtctgcccagacgtttcttcatgcctgcgtccgaatacaagcaaattccgctgggcctgaaagtggacaacgtcatgcccaacgtaagtgatctgcctgggcttattactgccgttcgccaccccagacgcggtaggtccgtgtctattggcccacagagtgccgcagacgcgtacgagacactcgcgtatcgagagaggagaagaaaggagagcaatgctagcttgcgttcgaagaatagtatacaggatcttgggaaagatcagacagggctcagctctggcgttagcagtaagcaaggcaagccgagcgactttgagaagcagatgggtgagggtactgtcgtcgtgtcgcccattgatatgaagcaagttgacggcgagccggaattatatatcgggcaacaagacgagttaggtgaaaaggaggtgttctccaaattaattaggccgcgcgtcagatacgatgtcgaggtgataacaaaactcgtcgtatatactggcatcgcatggctcgcagtagaaggcgtacccatacttttcgagttcattcctggccttggcgctggccatttgcaattaagctga

SEQ ID NO: 23230 - protein, 563 aa, Muscodor strobelii
  misc_feature: SGI Peptide ID NO. 567900
  misc_feature (126)..(256): Pfam Id: PF01569 Pfam Desc: PAP2 superfamily
  misc_feature (27)..(560): NCBI GI: 171688884 Blast Desc: protein product [Podospora anserina] gi|170944404|emb|CAP70514.1| protein product [Podospora anserina]
  misc_feature (36)..(561): NCBI GI: 46123301 Blast Desc: FG06028.1 [Gibberella zeae PH-1]
  misc_feature (42)..(559): NCBI GI: 256733000 Blast Desc: [Nectria haematococca mpVI 77-13-4]
  misc_feature (26)..(521): NCBI GI: 164427451 Blast Desc: NCU03504 [Neurospora crassa OR74A] gi|157071748|gb|EAA26605.2| conserved [Neurospora crassa OR74A]
  misc_feature (19)..(523): NCBI GI: 145605563 Blast Desc: MGG_09184 [Magnaporthe grisea 70-15] gi|145013381|gb|EDJ98022.1| MGG_09184 [Magnaporthe grisea 70-15]
  misc_feature (48)..(550): NCBI GI: 238500351 Blast Desc: PAP2 domain protein [Aspergillus flavus NRRL3357] gi|220693163|gb|EED49509.1| PAP2 domain protein [Aspergillus flavus NRRL3357]
  misc_feature (48)..(556): NCBI GI: 239614005 Blast Desc: sphingosine-1-phosphate phosphohydrolase [Ajellomyces dermatitidis ER-3]
  misc_feature (48)..(556): NCBI GI: 261193323 Blast Desc: sphingosine-1-phosphate phosphohydrolase [Ajellomyces dermatitidis SLH14081] gi|239588672|gb|EEQ71315.1| sphingosine-1-phosphate phosphohydrolase [Ajellomyces SLH14081]
  misc_feature (48)..(556): NCBI GI: 121714144 Blast Desc: sphingosine-1-phosphate phosphohydrolase [Aspergillus clavatus NRRL 1] gi|119402836|gb|EAW13257.1| sphingosine-1-phosphate phosphohydrolase [Aspergillus clavatus 1]
  misc_feature (48)..(536): NCBI GI: 119477540 Blast Desc: sphingosine-1-phosphate phosphohydrolase [Neosartorya fischeri NRRL 181] gi|119407430|gb|EAW17379.1| sphingosine-1-phosphate phosphohydrolase [Neosartorya fischeri
MTTAFPPLPNGIHFDEDGVNGHVVKTSATPLVVDTTDNKKEEEEVIIDAGLRSLDHYKRALPRWRYDLRQRTLPLIRWETPYLAWMQAKLRTPALDSYFAITANLGTHTFFMIGLPIMFWCGFASFGQGLVHILASGVFFTGFIKDFFSLPRPLSPPLHRITMSGSAALEYGFPSTHSANAVSVAVYALLCLRSPDNTFQPNTKFALECVSYFYAVSIVFGRLYCGMHGFFDVIIGSIMGVVITLVEFYYAPALNVYLQENGWAAIFAVVLTIIVLVRVHPEPADDCPCFDDSVCFAGVMIGLEFGLWHFARSPYADVPFDFRALGWPAVIARVLFGVFVVFIWREVAKPSLLKALPHVFRLVETWGLSLPRRFFMPASEYKQIPLGLKVDNVMPNVSDLPGLITAVRHPRRGRSVSIGPQSAADAYETLAYRERRRKESNASLRSKNSIQDLGKDQTGLSSGVSSKQGKPSDFEKQMGEGTVVVSPIDMKQVDGEPELYIGQQDELGEKEVFSKLIRPRVRYDVEVITKLVVYTGIAWLAVEGVPILFEFIPGLGAGHLQLS

SEQ ID NO: 23231 - DNA, 3238 bp, Muscodor strobelii
  misc_feature: SGI EST ID NO. CUFF.55039.0
  misc_feature: Variant of the nucleotide sequence at SEQ ID NO 23229
tttagaaatgcgacccctgttcttatgccgtatggatctgtagtgagcacgtgtggctcttccagtgcgtcactgcgtcactgccctcgactgcgtgctgggagcagtgcgtacatgcctaccaagagctgaaatactaccagtcagctgagattttgaggcgcgtttgggggatgagcgctccaaagtttaattgatagagaatactggcgcaaaatgggacaatttctgggaagctaggcaattgcatccagtggaaaggagggagccaatgacaatacttcctgttcttgatttggattccatcgagttttaatttgctggaatctgcgaatcccatcccacatcttgacagttccatcatatcaacactctacttgatctctcgcttctctcattcattgccctcgaacgtacctacgaacatatttatatacacgtattcctgaatatctcttgcatcgttcgacaacgccgcctacctcgaagcctccccacgtcgctcaattccccacgacgacgaagtggccctggacttatcccggtagcgctccaacgctggaacgcagcccctccccctactctgctgtcgctacttgctgtcactctgtagtcagcaacctacagcctctgccgcccgcgattcgatgcgccaacggcctagtaaacagcgtctgtcgccgtcgtcgttcagttctcccttgatgctaccgactgtcccttgaatgccatgactacagcgtttccgcccttgcccaatggcatccacttcgacgaggacggcgtcaacggccatgtggtcaagacgagcgcaacgcccctcgttgttgatacaactgacaataagaaagaggaggaggaggtcatcatagacgctgggctgcggagtctcgaccactacaaacgcgcgctgcccagatggcgatacgacctgcgacagcgcacgctgcccttgatccgctgggagacgccctacctcgcctggatgcaggccaagctgcgcacgcccgccctcgacagctacttcgccatcaccgccaacctcggcacccacaccttcttcatgatcggcctgcccatcatgttctggtgcggctttgcctccttcggccagggcctcgtccacatcctcgcctcgggcgtcttcttcaccggcttcatcaaggacttcttctcgctgccgcgccccctgtccccgcccctgcaccgcatcaccatgtctggctctgccgccttggagtacgggtttccctcgacgcactccgccaacgctgtctccgttgctgtctacgcgcttctctgtcttcgctcgccagataataccttccaaccgaacaccaagttcgccctcgagtgtgtgtcttatttctacgccgtgagcatcgtgttcggtcgcctatactgtggtatgcatggctttttcgacgtcatcattggctcaatcatgggcgtcgtcattacgctcgtcgagttctactatgcgccagccctgaacgtctatctacaagaaaacggctgggcggccatctttgccgtcgtgctcaccatcattgttctagttcgtgtgcatcccgagcctgcagatgactgtccctgcttcgacgacagtgtatgtttcgccggtgtcatgattggcctggaattcgggctttggcacttcgctagatcgccctacgccgacgtaccctttgactttcgcgcgcttggctggcccgccgtgatagcccgggttcttttcggcgttttcgtcgtctttatctggcgcgaggtagccaagccaagtttgttgaaagcgctcccacacgtcttccggcttgtagagacgtggggccttagtctgcccagacgtttcttcatgcctgcgtccgaatacaagcaaattccgctgggcctgaaagtggacaacgtcatgcccaacgtaagtgatctgcctgggcttattactgccgttcgccaccccagacgcggtaggtccgtgtctattggcccacagagtgccgcagacgcgtacgagacactcgcgtatcgagagaggagaagaaaggagagcaatgctagcttgcgttcgaagaatagtatacaggatcttgggaaagatcagacagggctcagctctggcgttagcagtaagcaaggcaagccgagcgactttgagaagcagatgggtgagggtactgtcgtcgtgtcgcccattgatatgaagcaagttgacggcgagccggaattatatatcgggcaacaagacgagttaggtgaaaaggaggtgttctccaaattaattaggccgcgcgtcagatacgatgtcgaggtgataacaaaactcgtcgtatatactggcatcgcatggctcgcagtagaaggcgtacccatacttttcgagttcattcctggccttggcgctggccatttgcaattaagctgaaatacggcatagctcacgagaacacgcatttggagacctgggcatcgaagtataattccgcagcagtggatattagcccttcgcaaggcgttggtggttgcatcttacttctacccctatttgtcacatgatgtgacgagtgcggtgtctacttcttgtacatagactgaccttactaatcctacattcgtgtctataaatttcaagccatgcgattatgaccaaattgttatggcacatcttttaacgaatctatttccaaggaaagctttattagtccatattctacaagtgctacacctatgcctcaagccaaactatcaatcatacttctaattacttcttacttttcttcttctttggggtcatagcatcatcctgagcctcactgccatgttttacaccgacagagcccattgccatcgtctcccaccttgaatcccacatattccgcgaaaaggggatcgtatccggcgtctttgtcttatcccagttcggtttcctcccctgcgttgtcggcacccaaacacaagggacatccactttgagatcttttggtatatcatcccacttcaagcttgtccaaggctttttgcgatgagcttccggagaccagactaacagcggcgcgacctggtctgcgtccatctcccttcgggcttcgtgcttaggtggtttcggagtacggaagtggacgttgccgaccctcataaacccgagactagtgaagaattcctcccatcccggatccgcaagatggtaaacgaagatattctgctgcgtcgcgttgtctaggccagcttgtaccagtttctt

SEQ ID NO: 23232 - DNA, 840 bp, Muscodor strobelii
  misc_feature: SGI cDNA ID NO. 567901
  misc_feature: Encodes the peptide sequence at SEQ ID NO 23233
atggaaaaccaactcagcaatgacgcaaaatccagcaaagagggcgtcatcaacatccacggccgcccggtgcgaatcttcacaccgacgaatcaaagaagagtccgcaagcacaggttcacagatcaaatgacctgggatatcgagaaattccacctctcccccgagctcagacagataatccgcatcgagctcgcgagtaaattgagaaatcacccggattgcaagatcgaaacgaaagagcagtatttgcacaaatggatgcatccagatcgatatcagggatgtcaccctttgcctcgtatttggggtattgggcagctgacagcacgcccctattacgacgacaaggaccagatgaagaaactggtacaagctggcctagacaacgcgacgcagcagaatatcttcgtttaccatcttgcggatccgggatgggaggaattcttcactagtctcgggtttatgagggtcggcaacgtccacttccgtactccgaaaccacctaagcacgaagcccgaagggagatggacgcagaccaggtcgcgccgctgttagtctggtctccggaagctcatcgcaaaaagccttggacaagcttgaagtgggatgatataccaaaagatctcaaagtggatgtcccttgtgtttgggtgccgacaacgcaggggaggaaaccgaactgggataagacaaagacgccggatacgatccccttttcgcggaatatgtgggattcaaggtgggagacgatggcaatgggctctgtcggtgtaaaacatggcagtgaggctcaggatgatgctatgaccccaaagaagaagaaaagtaagaagtaa

SEQ ID NO: 23233 - protein, 279 aa, Muscodor strobelii
  misc_feature: SGI Peptide ID NO. 567901
MENQLSNDAKSSKEGVINIHGRPVRIFTPTNQRRVRKHRFTDQMTWDIEKFHLSPELRQIIRIELASKLRNHPDCKIETKEQYLHKWMHPDRYQGCHPLPRIWGIGQLTARPYYDDKDQMKKLVQAGLDNATQQNIFVYHLADPGWEEFFTSLGFMRVGNVHFRTPKPPKHEARREMDADQVAPLLVWSPEAHRKKPWTSLKWDDIPKDLKVDVPCVWVPTTQGRKPNWDKTKTPDTIPFSRNMWDSRWETMAMGSVGVKHGSEAQDDAMTPKKKKSKK

SEQ ID NO: 23234 - DNA, 4315 bp, Muscodor strobelii
  misc_feature: SGI EST ID NO. CUFF.55040.1
  misc_feature: Variant of the nucleotide sequence at SEQ ID NO 23232
cgcactttttcaagattcaattattcttcctatccagtaggctcagtgtatatctagagcaatggaaaaccaactcagcaatgacgcaaaatccagcaaagagggcgtcatcaacatccacggccgcccggtgcgaatcttcacaccgacgaatcaaagaagagtccgcaagcacaggttcacagatcaaatgacctgggatatcgagaaattccacctctcccccgagctcagacagataatccgcatcgagctcgcgagtaaattgagaaatcacccggattgcaagatcgaaacgaaagagcagtatttgcacaaatggatgcatccagatcgatatcgtcagttagatcattggaaagacgccgttgagaatcagtataggccacaatatcatgagacttgtttatatgcgagggatttggtgaatttgtggtgtcagtacagagtaaggctctcggcgctgaaaacggatcatgggagggttgaggcttttgttgcttagtttgtgcccgggcctgagactcctaattcacagccatggcagggtgaggtgtttgcaggaagacagaatacgccgagttctcggggggttgagaggtatggggaggcggaggggaggtatcgggttgcttggcttttagcacagggcgatgatacggggatgggaaggggattgagtgtcgggtggcgggggggtttcttagaagacccttataccggtttggccagggtcacgatggcgtatcttggatggcttcatttggatatttggtcgatactgggacaatggtgtgcagagggatgtcaccctttgcctcgtatttggggtattgggcagctgacagcacgcccctattacgacgacaaggaccagatgaagaaactggtacaagctggcctagacaacgcgacgcagcagaatatcttcgtttaccatcttgcggatccgggatgggaggaattcttcactagtctcgggtttatgagggtcggcaacgtccacttccgtactccgaaaccacctaagcacgaagcccgaagggagatggacgcagaccaggtcgcgccgctgttagtctggtctccggaagctcatcgcaaaaagccttggacaagcttgaagtgggatgatataccaaaagatctcaaagtggatgtcccttgtgtttgggtgccgacaacgcaggggaggaaaccgaactgggataagacaaagacgccggatacgatccccttttcgcggaatatgtgggattcaaggtgggagacgatggcaatgggctctgtcggtgtaaaacatggcagtgaggctcaggatgatgctatgaccccaaagaagaagaaaagtaagaagtaattagaagtatgattgatagtttggcttgaggcataggtgtagcacttgtagaatatggactaataaagctttccttggaaatagattcgttaaaagatgtgccataacaatttggtcataatcgcatggcttgaaatttatagacacgaatgtaggattagtaaggtcagtctatgtacaagaagtagacaccgcactcgtcacatcatgtgacaaataggggtagaagtaagatgcaaccaccaacgccttgcgaagggctaatatccactgctgcggaattatacttcgatgcccaggtctccaaatgcgtgttctcgtgagctatgccgtatttcagcttaattgcaaatggccagcgccaaggccaggaatgaactcgaaaagtatgggtacgccttctactgcgagccatgcgatgcctggagttgtttagtatgcgcaaatagaactgtagtctaggtggtgtcttaccagtatatacgacgagttttgttatcacctcgacatcgtatctgacgcgcggcctaattaatttggagaacacctccttttcacctaactcgtcttgttgcccgatatataattccggctcgccgtcaacttgcttcatatcaatgggcgacacgacgacagtaccctcacccatctgcttctcaaagtcgctcggcttgccttgcttactgctaacgccagagctgagccctgtctgatctttcccaagatcctgtatactattcttcgaacgcaagctagcattgctctcctttcttctcctctctcgatacgcgagtgtctcgtacgcgtctgcggcactctgtgggccaatagacacggacctaccgcgtctggggtggcgaacggcagtaataagcccaggcagatcacttacgttgggcatgacgttgtccactttcaggcccagcggaatttgcttgtattcggacgcaggcatgaagaaacgtctgggcagactaaggccccacgtctctacaagccggaagacgtgtgggagcgctttcaacaaacttggcttggctacctcgcgccagataaagacgacgaaaacgccgaaaagaacccgggctatcacggcgggccagccaagcgcgcgaaagtcaaagggtacgtcggcgtagggcgatctagcgaagtgccaaagcccgaattccaggccaatcatgacaccggcgaaacatacactgtcgtcgaagcagggacagtcatctgcaggctcgggatgcacacgaactagaacaatgatggtgagcacgacggcaaagatggccgcccagccgttttcttgtagatagacgttcagggctggcgcatagtagaactcgacgagcgtaatgacgacgcccatgattgagccaatgatgacgtcgaaaaagccatgcataccacagtataggcgaccgaacacgatgctcacggcgtagaaataagacacacactcgagggcgaacttggtgttcggttggaaggtattatctggcgagcgaagacagagaagcgcgtagacagcaacggagacagcgttggcggagtgcgtcgagggaaacccgtactccaaggcggcagagccagacatggtgatgcggtgcaggggcggggacagggggcgcggcagcgagaagaagtccttgatgaagccggtgaagaagacgcccgaggcgaggatgtggacgaggccctggccgaaggaggcaaagccgcaccagaacatgatgggcaggccgatcatgaagaaggtgtgggtgccgaggttggcggtgatggcgaagtagctgtcgagggcgggcgtgcgcagcttggcctgcatccaggcgaggtagggcgtctcccagcggatcaagggcagcgtgcgctgtcgcaggtcgtatcgccatctgggcagcgcgcgtttgtctgtagcacagcaagtcagtcggcacctcgacgagacagacagacagagacacctgctgtcacacagaacagtctggtatttcgcaatggtgtgtgcgcactacgcagagcaccgttcaagtcgcaaaccagcacagacacgtacagtggtcgagactccgcagcccagcgtctatgatgacctcctcctcctctttcttattgtcagttgtatcaacaacgaggggcgttgcgctcgtcttgaccacatggccgttgacgccgtcctcgtcgaagtggatgccattgggcaagggcggaaacgctgtagtcatggcattcaagggacagtcggtagcatcaagggagaactgaacgacgacggcgacagacgctgtttactaggccgttggcgcatcgaatcgcgggcggcagaggctgtaggttgctgactacagagtgacagcaagtagcgacagcagagtagggggaggggctgcgttccagcgttggagcgctaccgggataagtccagggccacttcgtcgtcgtggggaattgagcgacgtggggaggcttcgaggtaggcggcgttgtcgaacgatgcaagagatattcaggaatacgtgtatataaatatgttcgtaggtacgttcgagggcaatgaatgagagaagcgagagatcaagtagagtgttgatatgatggaactgtcaagatgtgggatgggattcgcagattccagcaaattaaaactcgatggaatccaaatcaagaacaggaagtattgtcattggctccctcctttccactggatgcaattgcctagcttcccagaaattgtcccattttgcgccagtattctctatcaattaaactttggagcgctcatcccccaaacgcgcctcaaaatctcagctgactggtagtatttcagctcttggtaggcatgtacgcactgctcccagcacgcagtcgagggcagtgacgcagtgacgcactggaagagccacacgtgctcactacagatccatacggcataagaacaggggtcgcatttctaaa

SEQ ID NO: 23235 - DNA, 1242 bp, Muscodor strobelii
  misc_feature: SGI cDNA ID NO. 567902
  misc_feature: Elevated expression when VOC is produced
  misc_feature: Encodes the peptide sequence at SEQ ID NO 23236
atggagtggcgatctaaccaagaggagtcagggactccttttgggctccctgattacctccatgcacctacagatatcgagcatactgacgaccaggactcaaatgaacaagagacaaatgacactggttcagactcaagcttctggtgtattgactggaatcagctgccaccctatatgcatgaggttattaggatggagtatcgcgatcgacgaggacttggagaaatccctatcgaccgagccattttgcaggacgatgaagaaatgattggtctcttcaaggcattaactcgtcgagaccgagagggatccgtaattgtaccgacagagtcggcaccaaactcaatgaatgaggttgatgccttcgcaatcatgatacctcaatggtggaaggaggagacagtgaaaagcccaaaagatcttcttttccatggaatgcccacatctctcagaaatggcaggtggagtaaacgacaaccggtgcctattcaagagaatcaatggtacgcagagatggcttacttacaatttcgttacgcgaatcttctttaccgtttctctaccaaacagcaagcccgcatggacgaaatatggtgtatcacttcgctttcgtatcgtgaaggtcacgaggagcagttgagaaatcttcttgacaaatgtaccggcaaaatccgaagcgcaaatacaaatggaaggacagcgaacattgcaatctatcacgtcgctgaggacaagcataaagatatcctagaacgttccggctttgtccaagaaagcagaatcacattaatattgaggacaaaagaagcagacaatgtgacgcgacaagaactctgtcgtaaagaggcgtatctgatggtatatcgctcacctaatttcaagctcattccagccaggaccgaaacacctaaccttgactgcgagttctattactggtatcctgagagcggagacgaacaattggaccaagaacgaaatctcaatgtccaggagaagcgttttaaaaagtcgaactgggacttcaaatggacattagtacccttggaggaccatgactgttccgagcttgaacggatagaaagaggaattatcaatagcccgtttactacacgaccagcatcgcctgagctaaccttggagggtggagaaaatgaacgcccggagaaagaggggatagatccagaagagaccaatgacccctatcggttactgccacatgagacgacaggttctagctag

SEQ ID NO: 23236 - protein, 413 aa, Muscodor strobelii
  misc_feature: SGI Peptide ID NO. 567902
  misc_feature: Useful for introducing or modulating the production of volatile compounds
MEWRSNQEESGTPFGLPDYLHAPTDIEHTDDQDSNEQETNDTGSDSSFWCIDWNQLPPYMHEVIRMEYRDRRGLGEIPIDRAILQDDEEMIGLFKALTRRDREGSVIVPTESAPNSMNEVDAFAIMIPQWWKEETVKSPKDLLFHGMPTSLRNGRWSKRQPVPIQENQWYAEMAYLQFRYANLLYRFSTKQQARMDEIWCITSLSYREGHEEQLRNLLDKCTGKIRSANTNGRTANIAIYHVAEDKHKDILERSGFVQESRITLILRTKEADNVTRQELCRKEAYLMVYRSPNFKLIPARTETPNLDCEFYYWYPESGDEQLDQERNLNVQEKRFKKSNWDFKWTLVPLEDHDCSELERIERGIINSPFTTRPASPELTLEGGENERPEKEGIDPEETNDPYRLLPHETTGSS

SEQ ID NO: 23237 - DNA, 1786 bp, Muscodor strobelii
  misc_feature: SGI EST ID NO. CUFF.54749.0
  misc_feature: Variant of the nucleotide sequence at SEQ ID NO 23235
gaccgagccattttgcaggacgatgaagaaatgattggtctcttcaaggcattaactcgtcgagaccgagagggatccgtaattgtaccgacagagtcggcaccaaactcaatgaatgaggttgatgccttcgcaatcatgatacctcaatggtggaaggaggagacagtgaaaagcccaaaagatcttcttttccatggaatgcccacatctctcagaaatggcaggtggagtaaacgacaaccggtgcctattcaagagaatcaatggtacgcagagatggcttacttacaatttcgttacgcgaatcttctttaccgtttctctaccaaacagcaagcccgcatggacgaaatatggtgtatcacttcgctttcgtatcgtgaaggtcacgaggagcagttgagaaatcttcttgacaaatgtaccggcaaaatccgaagcgcaaatacaaatggaaggacagcgaacattgcaatctatcacgtcgctgaggacaagcataaagatatcctagaacgttccggctttgtccaagaaagcagaatcacattaatattgaggacaaaagaagcagacaatgtgacgcgacaagaactctgtcgtaaagaggcgtatctgatggtatatcgctcacctaatttcaagctcattccagccaggaccgaaacacctaaccttgactgcgagttctattactggtatcctgagagcggagacgaacaattggaccaagaacgaaatctcaatgtccaggagaagcgttttaaaaagtcgaactgggacttcaaatggacattagtacccttggaggaccatgactgttccgagcttgaacggatagaaagaggaattatcaatagcccgtttactacacgaccagcatcgcctgagctaaccttggagggtggagaaaatgaacgcccggagaaagaggggatagatccagaagagaccaatgacccctatcggttactgccacatgagacgacaggttctagctagcaaggacataacaagacgctcaaacagaaaagcgacgactaaacccgaggcggacaagcaggtgctaggagttatagaggagcctaatttacaatgagtttgttgtttcagagggtagaaaacagtaggaaagtaataaacctagttgaaaacacacagagtaaaatagtcgccgaccagatgacgggccgtatactccttgctgtggccggaacaattcaatatcattctaaacagggctatacctcatcatatctaactcaacaatctagatcaccaaatctatgagcagaaatgagtggttcagatacaagcggatgatataggtaatttattagtgctcaggaggcactgcaattcgaccctcggataccttgactgcagagccagaaagcagaatctcttcgatagcagtacgagactcactcacagtgacctgcaaactgatgtcgctttgcttccccatctccacaccctgcgtgacctgatacttgcccacaagaggaccttcattctccgacaagctcaaatacgcacacagcgcggctgaagcactgccagtgcctgggtcttctctccaggaaatcattcgagttctaagctgtctcgtaccagtctcgtcgacgcccagatctacatagaacttggtcgatataatgccaacgcggtacccctcatcaaggacattgaagctggtgtaagtgttctccccgcctaggaggctatttgtttgcttgcctagcgtttcgagatctggctgtttggccaggatgaaggtcat

SEQ ID NO: 23238 - DNA, 894 bp, Muscodor strobelii
  misc_feature: SGI cDNA ID NO. 567903
  misc_feature: Reduced expression when VOC is produced
  misc_feature: Encodes the peptide sequence at SEQ ID NO 23239
atgactttggaattcgcaactctcgatgtcttcactaagacaccattctgtggaaatgcccttgcgattgttcatgtgccggctagggcgaatctatcccaagaacaaaagcaattgattgcccgagagttcaacttctctgagtccgtctttcttcacgagcaaactaccgaagatgttcaggctggtcaagctcggctcgacatatttactccgattgccgagatacccttcgctggtcatcccacagtcggaactgcaaactacatcacacaccacctaaagggtatatcagccaagatacttgtaactaaagctgggctactgccatttcaagcgcatggcgatggaatccagctcgccgtcgctcatgacgttcgcatccacaatcagccttttgccggcagagactttggtcattttcccgtagtgagcatcgtcaagggtatgaccttcatcctggccaaacagccagatctcgaaacgctaggcaagcaaacaaatagcctcctaggcggggagaacacttacaccagcttcaatgtccttgatgaggggtaccgcgttggcattatatcgaccaagttctatgtagatctgggcgtcgacgagactggtacgagacagcttagaactcgaatgatttcctggagagaagacccaggcactggcagtgcttcagccgcgctgtgtgcgtatttgagcttgtcggagaatgaaggtcctcttgtgggcaagtatcaggtcacgcagggtgtggagatggggaagcaaagcgacatcagtttgcaggtcactgtgagtgagtctcgtactgctatcgaagagattctgctttctggctctgcagtcaaggtatccgagggtcgaattgcagtgcctcctgagcactaa

SEQ ID NO: 23239 - protein, 297 aa, Muscodor strobelii
  misc_feature: SGI Peptide ID NO. 567903
  misc_feature (2)..(289): Pfam Id: PF02567 Pfam Desc: Phenazine biosynthesis-like protein
  misc_feature (2)..(119): Pfam Id: PF02567 Pfam Desc: Phenazine biosynthesis-like protein
  misc_feature (219)..(289): Pfam Id: PF02567 Pfam Desc: Phenazine biosynthesis-like protein
  misc_feature (1)..(291): NCBI GI: 156042772 Blast Desc: SS1G_11185 [Sclerotinia sclerotiorum 1980] gi|154695570|gb|EDN95308.1| SS1G_11185 [Sclerotinia sclerotiorum 1980]
  misc_feature (3)..(293): NCBI GI: 169599863 Blast Desc: SNOG_02757 [Phaeosphaeria nodorum SN15] gi|160705337|gb|EAT89488.2| SNOG_02757 [Phaeosphaeria nodorum SN15]
  misc_feature (3)..(294): NCBI GI: 169777877 Blast Desc: [Aspergillus oryzae RIB40] gi|83772141|dbj|BAE62271.1| protein product [Aspergillus oryzae]
  misc_feature (3)..(294): NCBI GI: 255936185 Blast Desc: Pc13g06860 [Penicillium chrysogenum Wisconsin 54-1255] gi|211583739|emb|CAP91755.1| Pc13g06860 [Penicillium chrysogenum Wisconsin 54-1255]
  misc_feature (3)..(296): NCBI GI: 119486889 Blast Desc: phenazine biosynthesis-like protein, [Neosartorya fischeri NRRL 181] gi|119410521|gb|EAW20467.1| phenazine biosynthesis-like protein, [Neosartorya fischeri NRRL 181]
  misc_feature (1)..(294): NCBI GI: 261351860 Blast Desc: phenazine biosynthesis protein phzF [Verticillium albo-atrum VaMs.102]
  misc_feature (2)..(293): NCBI GI: 212535858 Blast Desc: phenazine biosynthesis-like protein, [Penicillium marneffei ATCC 18224] gi|210070484|gb|EEA24574.1| phenazine biosynthesis-like protein, [Penicillium marneffei ATCC 18224]
  misc_feature (3)..(296): NCBI GI: 238839832 Blast Desc: phenazine biosynthesis protein [Microsporum canis CBS 113480]
  misc_feature (2)..(293): NCBI GI: 242794220 Blast Desc: phenazine biosynthesis-like protein, [Talaromyces stipitatus ATCC 10500] gi|218718914|gb|EED18334.1| phenazine biosynthesis-like protein, [Talaromyces stipitatus ATCC 10500]
  misc_feature (3)..(291): NCBI GI: 238495112 Blast Desc: phenazine biosynthesis protein, [Aspergillus flavus NRRL3357] gi|220695442|gb|EED51785.1| phenazine biosynthesis protein, [Aspergillus flavus NRRL3357]
  misc_feature: Useful for introducing or modulating the production of volatile compounds
MTLEFATLDVFTKTPFCGNALAIVHVPARANLSQEQKQLIAREFNFSESVFLHEQTTEDVQAGQARLDIFTPIAEIPFAGHPTVGTANYITHHLKGISAKILVTKAGLLPFQAHGDGIQLAVAHDVRIHNQPFAGRDFGHFPVVSIVKGMTFILAKQPDLETLGKQTNSLLGGENTYTSFNVLDEGYRVGIISTKFYVDLGVDETGTRQLRTRMISWREDPGTGSASAALCAYLSLSENEGPLVGKYQVTQGVEMGKQSDISLQVTVSESRTAIEEILLSGSAVKVSEGRIAVPPEH

SEQ ID NO: 23240 - DNA, 2416 bp, Muscodor strobelii
  misc_feature: SGI EST ID NO. CUFF.54750.1
  misc_feature: Variant of the nucleotide sequence at SEQ ID NO 23238
attgattgatgaggcgaaagccaagtgttacgagctatagttcacaaactgtgttaccatcatttcccctcctcatttctaaactacatatcttattcaccttgaaaagctagggctgcatcatgactttggaattcgcaactctcgatgtcttcactaagacaccattctgtggaaatgcccttgcgattgttcatgtgccggctagggcgaatctatcccaagaacaaaagcaattgattgcccgagagttcaacttctctgagtccgtctttcttcacgagcaaactaccgaagatgttcaggctggtcaagctcggctcgacatatttactccgattgccgagatacccttcgctggtcatcccacagtcggaactgcaaactacatcacacaccacctaaagggtatatcagccaagatacttgtaactaaagctgggctactgccatttcaagcgcatggcgatggaatccagctcgccgtcgctcatgacgttcgcatccacaatcagccttttgccggcagagactttggtcattttcccgtagtgagcatcgtcaagggtatgaccttcatcctggccaaacagccagatctcgaaacgctaggcaagcaaacaaatagcctcctaggcggggagaacacttacaccagcttcaatgtccttgatgaggggtaccgcgttggcattatatcgaccaagttctatgtagatctgggcgtcgacgagactggtacgagacagcttagaactcgaatgatttcctggagagaagacccaggcactggcagtgcttcagccgcgctgtgtgcgtatttgagcttgtcggagaatgaaggtcctcttgtgggcaagtatcaggtcacgcagggtgtggagatggggaagcaaagcgacatcagtttgcaggtcactgtgagtgagtctcgtactgctatcgaagagattctgctttctggctctgcagtcaaggtatccgagggtcgaattgcagtgcctcctgagcactaataaattacctatatcatccgcttgtatctgaaccactcatttctgctcatagatttggtgatctagattgttgagttagatatgatgaggtatagccctgtttagaatgatattgaattgttccggccacagcaaggagtatacggcccgtcatctggtcggcgactattttactctgtgtgttttcaactaggtttattactttcctactgttttctaccctctgaaacaacaaactcattgtaaattaggctcctctataactcctagcacctgcttgtccgcctcgggtttagtcgtcgcttttctgtttgagcgtcttgttatgtccttgctagctagaacctgtcgtctcatgtggcagtaaccgataggggtcattggtctcttctggatctatcccctctttctccgggcgttcattttctccaccctccaaggttagctcaggcgatgctggtcgtgtagtaaacgggctattgataattcctctttctatccgttcaagctcggaacagtcatggtcctccaagggtactaatgtccatttgaagtcccagttcgactttttaaaacgcttctcctggacattgagatttcgttcttggtccaattgttcgtctccgctctcaggataccagtaatagaactcgcagtcaaggttaggtgtttcggtcctggctggaatgagcttgaaattaggtgagcgatataccatcagatacgcctctttacgacagagttcttgtcgcgtcacattgtctgcttcttttgtcctcaatattaatgtgattctgctttcttggacaaagccggaacgttctaggatatctttatgcttgtcctcagcgacgtgatagattgcaatgttcgctgtccttccatttgtatttgcgcttcggattttgccggtacatttgtcaagaagatttctcaactgctcctcgtgaccttcacgatacgaaagcgaagtgatacctaaattgtttagggaggtctgataaaaataaatgagatttgtgggtttcaagcgactcacaccatatttcgtccatgcgggcttgctgtttggtagagaaacggtaaagaagattcgcgtaacgaaattgtaagtaagccatctctgcgtaccattgattctcttgaataggcaccggttgtcgtttactccacctgccatttctgagagatgtgggcattccatggaaaagaagatcttttgggcttttcactgtctcctccttccaccattgaggtatcatgattgcgaaggcatcaacctcattcattgagtttggtgccgactctgtcggtacaattacggatccctctcggtctcgacgagttaatgccttgaagagaccaatcatttcttcatcgtcctgcaaaatggctcggtc

SEQ ID NO: 23241 - DNA, 687 bp, Muscodor strobelii
  misc_feature: SGI cDNA ID NO. 567904
  misc_feature: Encodes the peptide sequence at SEQ ID NO 23242
atgccgagaaagctcaatacgaaagacttgactatgctccttgacatcgttgactcgactctcacccctatccagcaatacctgtcggaatcggaagctcaagtgtatgatccacctcaatctactgtcgtatccatctataatgacttagtcaatcttttccttactataggtgacgaggcatatccgatatgccagcggtgtttcgccaaccgacgacattgtgaccgatcggaaaggccgcctcgacaaccgggcatcgctgccgattataatgagatagaaggcacgcatgactcccctaggaaggctctggagtctttcagaatatctggtttcttccgtcattatctaacaaatgtgagccgttggtacgatttaagcgataaacaatgccatttcagtcaaaacctgcctattatggctttggatagtccattattgttcaaagctatccttgcactcgccgcagttcacatcagccagacgacgtcgccctcagcacagaccctagccgagagataccatggacaatgtattagactgttaattaacctcgacacggaggattcctcgatccagaacggggtcgcgctcgctaccacttgtctccttcgatcgtatgagatcctttccggtgaggctatgttcatggtcgatactcaagcttttgagactgcttgttga

SEQ ID NO: 23242 - protein, 228 aa, Muscodor strobelii
  misc_feature: SGI Peptide ID NO. 567904
  misc_feature (54)..(214): NCBI GI: 145604659 Blast Desc: MGG_07830 [Magnaporthe grisea 70-15] gi|145012626|gb|EDJ97280.1| MGG_07830 [Magnaporthe grisea 70-15]
  misc_feature (67)..(214): NCBI GI: 46116726 Blast Desc: FG04205.1 [Gibberella zeae PH-1]
  misc_feature (99)..(214): NCBI GI: 256726002 Blast Desc: NECHADRAFT_100831 [Nectria haematococca mpVI 77-13-4]
  misc_feature (103)..(214): NCBI GI: 261353829 Blast Desc: conserved [Verticillium albo-atrum VaMs.102]
  misc_feature (58)..(212): NCBI GI: 242771450 Blast Desc: conserved [Talaromyces stipitatus ATCC 10500] gi|218721463|gb|EED20881.1| conserved [Talaromyces stipitatus ATCC 10500]
  misc_feature (55)..(212): NCBI GI: 255931099 Blast Desc: Pc12g02130 [Penicillium chrysogenum Wisconsin 54-1255] gi|211581725|emb|CAP79840.1| Pc12g02130 [Penicillium chrysogenum Wisconsin 54-1255]
  misc_feature (54)..(212): NCBI GI: 169785815 Blast Desc: [Aspergillus oryzae RIB40] gi|83776116|dbj|BAE66235.1| protein product [Aspergillus oryzae]
  misc_feature (101)..(212): NCBI GI: 119467045 Blast Desc: NFIA_047680 [Neosartorya fischeri NRRL 181] gi|119405481|gb|EAW15432.1| NFIA_047680 [Neosartorya fischeri NRRL 181]
  misc_feature (59)..(212): NCBI GI: 238506717 Blast Desc: conserved [Aspergillus flavus NRRL3357] gi|220689273|gb|EED45624.1| conserved [Aspergillus flavus NRRL3357]
  misc_feature (82)..(215): NCBI GI: 146324588 Blast Desc: conserved [Aspergillus fumigatus Af293] gi|129555397|gb|EAL84729.2| conserved [Aspergillus fumigatus Af293]
MPRKLNTKDLTMLLDIVDSTLTPIQQYLSESEAQVYDPPQSTVVSIYNDLVNLFLTIGDEAYPICQRCFANRRHCDRSERPPRQPGIAADYNEIEGTHDSPRKALESFRISGFFRHYLTNVSRWYDLSDKQCHFSQNLPIMALDSPLLFKAILALAAVHISQTTSPSAQTLAERYHGQCIRLLINLDTEDSSIQNGVALATTCLLRSYEILSGEAMFMVDTQAFETAC

SEQ ID NO: 23243 - DNA, 2055 bp, Muscodor strobelii
  misc_feature: SGI cDNA ID NO. 567905
  misc_feature: Encodes the peptide sequence at SEQ ID NO 23244
atgtcgacacggaaaaacttcagtgctcgattgtcaaaactattacaccggaactcggattcggtcaaaaaaggagacaatgagccagatggcgagttcaacagcaaactctgcgacatctgcaaaactatcggcctcgatcatgataccagcgaaaagccagcctacagcctaggctatctaggcgatttgaagcagcgctattcatgtcctttctgtaagctcgtcttagatgccatgcaagacgaccgaattatccacccacagccaatcacccattatgaaactcatgaaattcgagtttttcgccaaggacccaagaagcttcacattcaaccattaccttcatactcaaagcttttatttgactcagaagtcaaaggattcaataaggttccctcctccaatgaaattgactttggtatggtaaagcgttggcttcgcaattgtgatacagagcatgggaaatgtattccgaatcagggtcctttcaatgtcgaccttagcttttttcgttgcattgatgtgatagacatgtgtatcgttccggtctcaattactgatcaatatgttgcgctcagttacaaatggggcgagtgcaaacctttcctcctattgaaacctaacaaagatgatctttttgcaaaggacggcatcaagagaaattgggattcaattcctaagactatccaggactctatcgaatttgtccagaagctggaatatcgatatgtttggatagaccaactatgtttgattcaggatgatgacgaagacagaggcataggtatcaccgcaatggacctggtatacgagcaagctcatctcacaataatagcaggaagcgggactgatgccgatagtgggcttccgggtgtaacagcgaactcacggacatcgtcacatcagatcactggcgaagtgatgcctggcgtaaaccttgttcttcgccacacaatggaggatatcttggctaaatcggagtatcatcacaggggctggacctttcaggaatactacctatcaagacgaaaaatcctgtttctcgatgacaccatctacttcagatgtcatgagaaatcttgccaggagcttgaggacggtctgcctgtaagaccagacccaacagcagagcaaggacaggcactcaataagctaagcggcgatgtctatcatttactaggtcaactgcttgtcaagtacacgacgcgcgagttgaagatgccaactgattatgtcttcgcgatggctggtgtttgtcggcggctggctgatcatgtacaatgcacccttctcttcggcattcctgttgctgcgcttgactggttcctcctcttctatcgcggtaaagatggtctcaggcgacgagacctgtttcctagctgggcatggtcgggttggtacggacctatttactacgactacggatccggtaacgtgccaaagtggacagcagcaagcacctggatcgtttggcataaaagagaaccaacgggtgaactagcgctcgtatgggacgagactggacgacgaaaatccaaggctcaggaacttttcagatctctaccgctatgtgatatacacaggaccgaacctgccacacaacttgagggtgaacctagcaaggcacagaccgtattacagttttggactgtttctgtggcctttgcgctccgaaagattgatcaagagaatggggaacgaatgatgtggtcatatggaatttactggaccgacactacctacgagttattggatcgagacggtaacaatcgcggctttattacactagatgatcccgaatctaaagatttggttcacgaaagcgcagaactgatattacttgccttgtcgccacagaaagtccagaattcctatactggagcgtatccagacgaacaaggagtcgaatccaacggccggtatttctgggtgctcatgatcgagtggcaaaacggtgtggccgagcgaaaggggattggcaaactagatcgtgaagcactcacgtccggtctgcagcccggtgcttcttggaaggaggttctgttagcttag

SEQ ID NO: 23244 - protein, 684 aa, Muscodor strobelii
  misc_feature: SGI Peptide ID NO. 567905
  misc_feature (190)..(338): Pfam Id: PF06985 Pfam Desc: Heterokaryon incompatibility protein (HET)
  misc_feature (34)..(684): NCBI GI: 256720404 Blast Desc: NECHADRAFT_89098 [Nectria haematococca mpVI 77-13-4]
  misc_feature (34)..(684): NCBI GI: 256724998 Blast Desc: NECHADRAFT_77046 [Nectria haematococca mpVI 77-13-4]
  misc_feature (35)..(684): NCBI GI: 256721753 Blast Desc: NECHADRAFT_88702 [Nectria haematococca mpVI 77-13-4]
  misc_feature (37)..(683): NCBI GI: 115399536 Blast Desc: [Aspergillus terreus NIH2624] gi|114192240|gb|EAU33940.1| [Aspergillus terreus NIH2624]
  misc_feature (135)..(677): NCBI GI: 171688824 Blast Desc: protein product [Podospora anserina] gi|170944374|emb|CAP70484.1| protein product [Podospora anserina]
  misc_feature (35)..(684): NCBI GI: 156031301 Blast Desc: SS1G_14072 [Sclerotinia sclerotiorum 1980] gi|154699474|gb|EDN99212.1| SS1G_14072 [Sclerotinia sclerotiorum 1980]
  misc_feature (55)..(493): NCBI GI: 256734920 Blast Desc: NECHADRAFT_75661 [Nectria haematococca mpVI 77-13-4]
  misc_feature (70)..(667): NCBI GI: 39946810 Blast Desc: MGG_08495 [Magnaporthe grisea 70-15] gi|145012335|gb|EDJ96991.1| MGG_08495 [Magnaporthe grisea 70-15]
  misc_feature (136)..(477): NCBI GI: 164424013 Blast Desc: NCU10392 [Neurospora crassa OR74A] gi|28881265|emb|CAD70524.1| related to tol protein [Neurospora crassa] gi|157070332|gb|EDO65027.1| [Neurospora crassa OR74A]
  misc_feature (56)..(507): NCBI GI: 242821785 Blast Desc: TSTA_001680 [Talaromyces stipitatus ATCC 10500] gi|218712672|gb|EED12097.1| TSTA_001680 [Talaromyces stipitatus ATCC 10500]
MSTRKNFSARLSKLLHRNSDSVKKGDNEPDGEFNSKLCDICKTIGLDHDTSEKPAYSLGYLGDLKQRYSCPFCKLVLDAMQDDRIIHPQPITHYETHEIRVFRQGPKKLHIQPLPSYSKLLFDSEVKGFNKVPSSNEIDFGMVKRWLRNCDTEHGKCIPNQGPFNVDLSFFRCIDVIDMCIVPVSITDQYVALSYKWGECKPFLLLKPNKDDLFAKDGIKRNWDSIPKTIQDSIEFVQKLEYRYVWIDQLCLIQDDDEDRGIGITAMDLVYEQAHLTIIAGSGTDADSGLPGVTANSRTSSHQITGEVMPGVNLVLRHTMEDILAKSEYHHRGWTFQEYYLSRRKILFLDDTIYFRCHEKSCQELEDGLPVRPDPTAEQGQALNKLSGDVYHLLGQLLVKYTTRELKMPTDYVFAMAGVCRRLADHVQCTLLFGIPVAALDWFLLFYRGKDGLRRRDLFPSWAWSGWYGPIYYDYGSGNVPKWTAASTWIVWHKREPTGELALVWDETGRRKSKAQELFRSLPLCDIHRTEPATQLEGEPSKAQTVLQFWTVSVAFALRKIDQENGERMMWSYGIYWTDTTYELLDRDGNNRGFITLDDPESKDLVHESAELILLALSPQKVQNSYTGAYPDEQGVESNGRYFWVLMIEWQNGVAERKGIGKLDREALTSGLQPGASWKEVLLA

SEQ ID NO: 23245 - DNA, 1536 bp, Muscodor strobelii
  misc_feature: SGI EST ID NO. CUFF.54718.0
  misc_feature: Variant of the nucleotide sequence at SEQ ID NO 23243
ggattcaattcctaagactatccaggactctatcgaatttgtccagaagctggaatatcgatatgtttggatagaccaactatgtttgattcaggatgatgacgaagacagaggcataggtatcaccgcaatggacctggtatacgagcaagctcatctcacaataatagcaggaagcgggactgatgccgatagtgggcttccgggtgtaacagcgaactcacggacatcgtcacatcagatcactggcgaagtgatgcctggcgtaaaccttgttcttcgccacacaatggaggatatcttggctaaatcggagtatcatcacaggggctggacgtgagttacttgatcccggcttgtcgtgaatatagtgagactgatgcgcggtagctttcaggaatactacctatcaagacgaaaaatcctgtttctcgatgacaccatctacttcagatgtcatgagaaatcttgccaggagcttgaggacggtctgcctgtaagaccagacccaacagcagagcaaggacaggcactcaataagctaagcggcgatgtctatcatttactaggtcaactgcttgtcaagtacacgacgcgcgagttgaagatgccaactgattatgtcttcgcgatggctggtgtttgtcggcggctggctgatcatgtacaatgcacccttctcttcggcattcctgttgctgcgcttgactggttcctcctcttctatcgcggtaaagatggtctcaggcgacgagacctgtttcctagctgggcatggtcgggttggtacggacctatttactacgactacggatccggtaacgtgccaaagtggacagcagcaagcacctggatcgtttggcataaaagagaaccaacgggtgaactagcgctcgtatgggacgagactggacgacgaaaatccaaggctcaggaacttttcagatctctaccgctatgtgatatacacaggaccgaacctgccacacaacttgagggtgaacctagcaaggcacagaccgtattacagttttggactgtttctgtggcctttgcgctccgaaagattgatcaagagaatggggaacgaatgatgtggtcatatggaatttactggaccgacactacctacgagttattggatcgagacggtaacaatcgcggctttattacactagatgatcccgaatctaaagatttggttcacgaaagcgcagaactgatattacttgccttgtcgccacagaaagtccagaattcctatactggagcgtatccagacgaacaaggagtcgaatccaacggccggtatttctgggtgctcatgatcgagtggcaaaacggtgtggccgagcgaaaggggattggcaaactagatcgtgaagcactcacgtccggtctgcagcccggtgcttcttggaaggaggttctgttagcttagaggctgccaagacgaagaggaaatccccgtcctaggccagatctatgacaaacgagcgaatgatccaatatatgatctcatcttctgagattttc

SEQ ID NO: 23246 - DNA, 1509 bp, Muscodor strobelii
  misc_feature: SGI cDNA ID NO. 567906
  misc_feature: Encodes the peptide sequence at SEQ ID NO 23247
atgagtgagcccgacacgagccgtaccgccttgcacataccgccatcgaatccacagctcatatccaaaatcccaaacatccttccccatgaacgtgtattccctgttcaaataggctcggagctcttcaagctttcaggagcctccctttcatcagacgccccatcgtatttctctcaatattttctcactcaaattcagaaagcagaagaaactggtgaagacttagcgtcggctattcgtacgttgtacatagaccgagaccccgtaacctttcgtgatattgctctgcatcttcaaggctatcatgtgacgcctcgcgatggaacgcacttcgtgcgtctttttgccgacgcacagttttatacactgcctaagttgatgtcgcggctctatgaagagtctattttcatatccataggacatcgcgagtttcagatacctcgcgacctgttcggtagtcctgggaacacaccaaattttttctctcttggatttggccttttcttctcgtctccaaaagatctttaccctggattaaaccgcaccgatctaatccggccaccgtctatcatgccaccctcggtgccaaatcggtctgcagatacctttgctgatctgttgcaactaatgcgtgggtaccctgttcacatacgcgacgaggagcatcgactgtcacttctacaagattgccgatacttcaatttcaaggctctcgagcaaaagatgcttcctcatcacattagttacaaccagacacgtggtaaagaggagattttgatgcgagttgaggatattttcaaatcgggcatctcaatagtcagcgacttctcttccaccggttttagtgggaacatcaatgattcacacttgggttgggtcaactacatgcggccgtatgaagatgacaagccgcgtgaacttgttctcgagattggcggagaaagcactcgactgcgcttgaatggcatgcgcgccgaattctttggccagatcagaactcgtatcgcaagactattcgaggtcattgcaacaaaactcaatcttcctccaacaacgcaacccctaggcttgttgatgacaaagggaggtgcggacagcgagccgccaacaccaggacacacacctttaagcgacgacctggttcgcatagtgattgatcctgaagctcacgtcactcttgatgggaaacccttcggaggcttcacagatgctgaggagcagatgacagtcatgtccacgtcatcgtcagttggaaatggaggagggcaggaatcccctatatcaagtatgaccccatcgcttggcccatcacgaaaacgcagacgtctggatacgtcaagccactcgccagaggagtgggtcgttcgtactggacaatggaaactccgtatccaaagctcgaaaggtggtaagagcgcagtcgaatgtgtgcttgtggcggttaaagtggatgcgtttagcagtgagcaagctcgcaatgctcaacgtgggtttctatctgcttga

SEQ ID NO: 23247 - protein, 502 aa, Muscodor strobelii
  misc_feature: SGI Peptide ID NO. 567906
  misc_feature (19)..(500): NCBI GI: 171689786 Blast Desc: protein product [Podospora anserina] gi|170944855|emb|CAP70967.1| protein product [Podospora anserina]
  misc_feature (6)..(500): NCBI GI: 256732998 Blast Desc: NECHADRAFT_59975 [Nectria haematococca mpVI 77-13-4]
  misc_feature (24)..(502): NCBI GI: 116205313 Blast Desc: CHGG_10540 [Chaetomium globosum CBS 148.51] gi|88176668|gb|EAQ84136.1| CHGG_10540 [Chaetomium globosum CBS 148.51]
  misc_feature (13)..(500): NCBI GI: 164422899 Blast Desc: NCU09466 [Neurospora crassa OR74A] gi|38524249|emb|CAE75714.1| conserved [Neurospora crassa] gi|157069865|gb|EAA33985.2| conserved [Neurospora crassa OR74A]
  misc_feature (11)..(502): NCBI GI: 46123297 Blast Desc: FG06026.1 [Gibberella zeae PH-1]
  misc_feature (19)..(500): NCBI GI: 145606106 Blast Desc: MGG_06651 [Magnaporthe grisea 70-15] gi|145013835|gb|EDJ98476.1| MGG_06651 [Magnaporthe grisea 70-15]
  misc_feature (27)..(501): NCBI GI: 240274394 Blast Desc: conserved [Ajellomyces capsulatus H143]
  misc_feature (27)..(501): NCBI GI: 225561298 Blast Desc: BTB/POZ domain-containing protein [Ajellomyces capsulatus G186AR]
  misc_feature (27)..(501): NCBI GI: 238838930 Blast Desc: conserved [Microsporum canis CBS 113480]
  misc_feature (2)..(397): NCBI GI: 261191666 Blast Desc: conserved [Ajellomyces dermatitidis SLH14081] gi|239590007|gb|EEQ72650.1| conserved [Ajellomyces dermatitidis SLH14081]
MSEPDTSRTALHIPPSNPQLISKIPNILPHERVFPVQIGSELFKLSGASLSSDAPSYFSQYFLTQIQKAEETGEDLASAIRTLYIDRDPVTFRDIALHLQGYHVTPRDGTHFVRLFADAQFYTLPKLMSRLYEESIFISIGHREFQIPRDLFGSPGNTPNFFSLGFGLFFSSPKDLYPGLNRTDLIRPPSIMPPSVPNRSADTFADLLQLMRGYPVHIRDEEHRLSLLQDCRYFNFKALEQKMLPHHISYNQTRGKEEILMRVEDIFKSGISIVSDFSSTGFSGNINDSHLGWVNYMRPYEDDKPRELVLEIGGESTRLRLNGMRAEFFGQIRTRIARLFEVIATKLNLPPTTQPLGLLMTKGGADSEPPTPGHTPLSDDLVRIVIDPEAHVTLDGKPFGGFTDAEEQMTVMSTSSSVGNGGGQESPISSMTPSLGPSRKRRRLDTSSHSPEEWVVRTGQWKLRIQSSKGGKSAVECVLVAVKVDAFSSEQARNAQRGFLSA

SEQ ID NO: 23248 - DNA, 3986 bp, Muscodor strobelii
  misc_feature: SGI EST ID NO. CUFF.54724.0
  misc_feature: Variant of the nucleotide sequence at SEQ ID NO 23246
caacagagttatccaaattctgcgcccatttcctcgagatcgcattcttctgccatttcttcgcttcctacacgatgtctcatatcatcatgtgatccctcagagaagccgacgactgaaatcaactagattgccctcgtcgccagcctgtgtgttgcaggttaattgtctgtaaaggtgcacacaggcttgagtcgtggagataatgtcgtgtttcctaaccataccctctcaaccatgagcatcagccatccaaacatgagtgagcccgacacgagccgtaccgccttgcacataccgccatcgaatccacagctcatatccaaaatcccaaacatccttccccatgaacgtgtattccctgttcaaataggctcggagctcttcaagctttcaggagcctccctttcatcagacgccccatcgtatttctctcaatattttctcactcaaattcagaaagcagaagaaactggtgaagacttagcgtcggctattcgtacgttgtacatagaccgagaccccgtaacctttcgtgatattgctctgcatcttcaaggctatcatgtgacgcctcgcgatggaacgcacttcgtgcgtctttttgccgacgcacagttttatacactgcctaagttgatgtcgcggctctatgaagagtctattttcatatccataggacatcgcgagtttcagatacctcgcgacctgttcggtagtcctgggaacacaccaaattttttctctcttggatttggccttttcttctcgtctccaaaagatctttaccctggattaaaccgcaccgatctaatccggccaccgtctatcatgccaccctcggtgccaaatcggtctgcagatacctttgctgatctgttgcaactaatgcgtgggtaccctgttcacatacgcgacgaggagcatcgactgtcacttctacaagattgccgatacttcaatttcaaggctctcgagcaaaagatgcttcctcatcacattagttacaaccagacacgtggtaaagaggagattttgatgcgagttgaggatattttcaaatcgggcatctcaatagtcagcgacttctcttccaccggttttagtgggaacatcaatgattcacacttgggttgggtcaactacatgcggccgtatgaagatgacaagccgcgtgaacttgttctcgagattggcggagaaagcactcgactgcgcttgaatggcatgcgcgccgaattctttggccagatcagaactcgtatcgcaagactattcgaggtcattgcaacaaaactcaatcttcctccaacaacgcaacccctaggcttgttgatgacaaagggaggtgcggacagcgagccgccaacaccaggacacacacctttaagcgacgacctggttcgcatagtgattgatcctgaagctcacgtcactcttgatgggaaacccttcggaggcttcacagatgctgaggagcagatgacagtcatgtccacgtcatcgtcagttggaaatggaggagggcaggaatcccctatatcaagtatgaccccatcgcttggcccatcacgaaaacgcagacgtctggatacgtcaagccactcgccagaggagtgggtcgttcgtactggacaatggaaactccgtatccaaagctcgaaaggtggtaagagcgcagtcgaatgtgtgcttgtggcggttaaagtggatgcgtttagcagtgagcaagctcgcaatgctcaacgtgggtttctatctgcttgatcgtcagaggaacttcattacatatagagcaactgtcatgctcgatagtatagatgatttcaaagtttagcaggcatcagcgtctttcatacttatattagcggccatttgttgactcactgttcaggggcctaacgaacggcacctcaggtacccagtgagataaaaataatgtcagattcatagcctcatccgccgcgcttcaggttcaagtctcctagatgaagtgatattcagcggttgagacacaactctaatccgcgctactctttttgtgttctataaggatatttcgctattaaaatgctagtcgtttcgagagggagtgtagttgcgggggagtttgagccacaattcatgctatctgtttccccagacgaatcatcgacagcaataccacccaaatgacgtatgagcctgaccgaacgtatgctatatacacttgcgtacctgatgtatcggcattccagcgcaggaaatccaacaacaacattcttacccaatgactatatcgcttagaaatcaattgccattgcaaactagtcttctttgaaccaaaccacgaattgattcattacctctcacggttttataatatcacacagcagcggcatagtcaatcagtattcgcgaaaatggcactgccatcagaaatgcaagccctgcaaatcaccgaattcaataagccttatgagcttcgtaaggtacccgtgcctcggcctggaccttatgatctgctcgtcaaagtaggtatgaatgcctccctgtaactcccttccgcacatgactgaacttatcccaagcaactagagtacactgtatcgtcccttagctgaccgtttgcagtaagcatatattgtcaactcttttgtgtgttaaaattggctacgttgaaaaggccaaggctggagatacaatcatcaagtccgatcgatttacaagctgacgtggcaaccttaggcggtcgcaagctactgccacacagatgcaatggtatcttcgggggtattcaagccgaagttaccggcgacggcctcacacgagggctccgggaccgtggcagccatcggcgaagccgttacaaaattcaaagttggtgatagggtgatgtgtggcattgtgctacatccttgtggtgattgtgatgaatgcacaagcactgtcgaaaatcggaatcgctattgtcctaatagtacgggacatgtcggcgttaccaccgatgggtgtgccgccgattatgtgattgtcgacgagcggacctctaccaagttgccagatgaagttacgtttctgtctgcggcccctcttgcttgtgctggacgaacagtatatcgcgcggtgctgcagacagagctaaaacctggacaatggattgctattgtgggctctgggggtgggctaggtcatctaggaattcagttcgcccgtgcaaagggacttaaggtcgttgccatcgatgccagagacgaggggctggcgttgtcaaaagaacatggggcggacgtagttgtcgatgcgagagagtcgaaggctgacgtcgtgaatcgggttcagacgatgactgatggcaaaggagttgatagttccatcgtccttgccgaccacactgaagcacttgctgctgctgttacaagaaaccatggcaccgtcgtccaaatcgcgcagccagagaatgtcacaattccttttacagaattcatcttccgcgacattaaattcaaagggagcgtgcaatgtaccccggaagagagcgaagaaatggtgaaatgtatcgctgagcatggaattcaagtgagcaccaagccgtttgagggtctcgataaggcagatgaattgattcatctcgtgaaaagcggcaagttacgtggtaaagccgtgatcattgttgatcccgcgcaaattgaggaagagaagaaacttggtgcaaatttctagagatagcgcaaagataaggtgggctgatggtgctgtggttgagaactcagggatgcaatgtttatttctagatcatagccagacttctcgttgaaagtgcattgagtgctactaacagtccatttctatctatagcgatatatataacgtatacttgttgagtttgagtagttctactattgaatttcggtgcttcgtctcaggtttcgaacaacaataccaacgaacgcgacaagaataaacgagcgaaatgaattcaaaacaaacaccagtttcgtttcaag

SEQ ID NO: 23249 - DNA, 1086 bp, Muscodor strobelii
  misc_feature: SGI cDNA ID NO. 567907
  misc_feature: Elevated expression when VOC is produced
  misc_feature: Encodes the peptide sequence at SEQ ID NO 23250
atggcactgccatcagaaatgcaagccctgcaaatcaccgaattcaataagccttatgagcttcgtaaggtacccgtgcctcggcctggaccttatgatctgctcgtcaaagcggtcgcaagctactgccacacagatgcaatggtatcttcgggggtattcaagccgaagttaccggcgacggcctcacacgagggctccgggaccgtggcagccatcggcgaagccgttacaaaattcaaagttggtgatagggtgatgtgtggcattgtgctacatccttgtggtgattgtgatgaatgcacaagcactgtcgaaaatcggaatcgctattgtcctaatagtacgggacatgtcggcgttaccaccgatgggtgtgccgccgattatgtgattgtcgacgagcggacctctaccaagttgccagatgaagttacgtttctgtctgcggcccctcttgcttgtgctggacgaacagtatatcgcgcggtgctgcagacagagctaaaacctggacaatggattgctattgtgggctctgggggtgggctaggtcatctaggaattcagttcgcccgtgcaaagggacttaaggtcgttgccatcgatgccagagacgaggggctggcgttgtcaaaagaacatggggcggacgtagttgtcgatgcgagagagtcgaaggctgacgtcgtgaatcgggttcagacgatgactgatggcaaaggagttgatagttccatcgtccttgccgaccacactgaagcacttgctgctgctgttacaagaaaccatggcaccgtcgtccaaatcgcgcagccagagaatgtcacaattccttttacagaattcatcttccgcgacattaaattcaaagggagcgtgcaatgtaccccggaagagagcgaagaaatggtgaaatgtatcgctgagcatggaattcaagtgagcaccaagccgtttgagggtctcgataaggcagatgaattgattcatctcgtgaaaagcggcaagttacgtggtaaagccgtgatcattgttgatcccgcgcaaattgaggaagagaagaaacttggtgcaaatttctag

SEQ ID NO: 23250 - protein, 361 aa, Muscodor strobelii
  misc_feature: SGI Peptide ID NO. 567907
  misc_feature (31)..(141): Pfam Id: PF08240 Pfam Desc: Alcohol dehydrogenase GroES-like domain
  misc_feature (171)..(310): Pfam Id: PF00107 Pfam Desc: Zinc-binding dehydrogenase
  misc_feature (43)..(141): Pfam Id: PF08240 Pfam Desc: Alcohol dehydrogenase GroES-like domain
  misc_feature (58)..(359): NCBI GI: 169602088 Blast Desc: SNOG_03921 [Phaeosphaeria nodorum SN15] gi|160706076|gb|EAT89126.2| SNOG_03921 [Phaeosphaeria nodorum SN15]
  misc_feature (4)..(347): NCBI GI: 238486890 Blast Desc: zinc binding dehydrogenase, [Aspergillus flavus NRRL3357] gi|220699562|gb|EED55901.1| zinc binding dehydrogenase, [Aspergillus flavus NRRL3357]
  misc_feature (7)..(345): NCBI GI: 256724072 Blast Desc: NECHADRAFT_51493 [Nectria haematococca mpVI 77-13-4]
  misc_feature (3)..(346): NCBI GI: 256722549 Blast Desc: NECHADRAFT_85316 [Nectria haematococca mpVI 77-13-4]
  misc_feature (2)..(345): NCBI GI: 58268386 Blast Desc: alcohol dehydrogenase [Cryptococcus neoformans var. neoformans JEC21] gi|134113026|ref|XP_774789.1| CNBF2190 [Cryptococcus neoformans var. neoformans B-3501A] CNBF2190 var.
  misc_feature (3)..(344): NCBI GI: 222106763 Blast Desc: alcohol dehydrogenase [Agrobacterium vitis S4] gi|221737942|gb|ACM38838.1| alcohol dehydrogenase [Agrobacterium vitis S4]
  misc_feature (106)..(358): NCBI GI: 154299047 Blast Desc: BC1G_11836 [Botryotinia fuckeliana B05.10] gi|150857539|gb|EDN32731.1| BC1G_11836 [Botryotinia fuckeliana B05.10]
  misc_feature (4)..(347): NCBI GI: 145231166 Blast Desc: An01g14590 [Aspergillus niger] gi|134055977|emb|CAK44156.1| protein product [Aspergillus niger]
  misc_feature (7)..(344): NCBI GI: 15887967 Blast Desc: alcohol dehydrogenase [Agrobacterium tumefaciens str. C58] gi|15155573|gb|AAK86433.1| alcohol dehydrogenase [Agrobacterium tumefaciens str. C58]
  misc_feature (2)..(345): NCBI GI: 71020795 Blast Desc: UM04481.1 [Ustilago maydis 521] gi|46100361|gb|EAK85594.1| UM04481.1 [Ustilago maydis 521]
  misc_feature (7)..(344): SWISSPROT Homolog: EC 1.1.1.1 Alcohol dehydrogenase
  misc_feature: Useful for introducing or modulating the production of volatile compounds
MALPSEMQALQITEFNKPYELRKVPVPRPGPYDLLVKAVASYCHTDAMVSSGVFKPKLPATASHEGSGTVAAIGEAVTKFKVGDRVMCGIVLHPCGDCDECTSTVENRNRYCPNSTGHVGVTTDGCAADYVIVDERTSTKLPDEVTFLSAAPLACAGRTVYRAVLQTELKPGQWIAIVGSGGGLGHLGIQFARAKGLKVVAIDARDEGLALSKEHGADVVVDARESKADVVNRVQTMTDGKGVDSSIVLADHTEALAAAVTRNHGTVVQIAQPENVTIPFTEFIFRDIKFKGSVQCTPEESEEMVKCIAEHGIQVSTKPFEGLDKADELIHLVKSGKLRGKAVIIVDPAQIEEEKKLGANF

SEQ ID NO: 23251 - DNA, 3986 bp, Muscodor strobelii; identical to SEQ ID NO: 23248
  misc_feature: SGI EST ID NO. CUFF.54724.0
  misc_feature: Variant of the nucleotide sequence at SEQ ID NO 23249

SEQ ID NO: 23252 - DNA, 2331 bp, Muscodor strobelii
  misc_feature: SGI cDNA ID NO. 567908
  misc_feature: Encodes the peptide sequence at SEQ ID NO 23253
atggaagttcctgtcacccagtcaatgacagtagttgacgagggtattgttgtcaaagctcatcgcaaaacttctcttcgagtatcccagcactgttcagaggctccttatgtggtgttgaaggtgcctgatgagataggggaaattgttcgcatatcttttaccacatttgcccacgaccaaggttgggcaagcgacttaggggctgggagttatacgtggtttgaagccttgacgacatctcataatagtaattcctctgggcaatatcttagcagggtgacattctcccatcacgttgctgtcggagcaaggaggatactacatcgtaatgttgtcgcgaatccaaatagtcagcgtttgcaaactgtctgggatgtcaacgtacccgatgatgagaggaacgttcgagcatggctggccggcattaggggaggagatagcatccagctcatccctcgggcaatgtatacgggctgggtgaacttcatcgatgaggcggagatcgagattctgggacacccaaaaatggaggatataaaacctctgcggaagattggtacggagtctctcaatgcatatcgagacttacgcagtgatcttgaggaaattcgcatcttacatctgtaccctttgtgcgaaggcgcagaagtgaggtgctctttggaatacgtgtcgctccgaaacaaaacgattccttccttccaggccgtatcctattgctggggagatcaatctcgacatgagaagattaagctcgtcactgcaggctctactggagatgagacattcgagtcggatctcacggtgacggagagcctataccacgctctaagaggcctacgaaataccgacagcatgcgtttgctctgggttgatgctatttgtattaaccagcgagacattgatgaaaggaacagtcaggtatctctcatgcggcaagtgtattcgagggcagaaaaagttgttatctggcttggtgaggagtatagccaattcaccgggtcttttagcatgcttcgtgagattctgtcaatccaaacagaagaccccgagagattcaaatctcaaataagcctgagtaaacctcatggacatgaagagtttggtccttggaaatatgcttatgtcgcccgaattttcgataacgcttggttcagccgtgtctgggtcgttcaggaggcgtacaacgctggatcgtgtctcgttaaatgcggtccacttgaaataccatggccgatgcttttacgagtcaacaaatgcttctataaagcgaaacagaaatcttcagcgatgggccatcgactgttgccagatatcatgtcgaagcttatggacgttaatgatgaagatgggcagctcaaggttactagggccattgactttgaccagctcgaaattattgttgctgcgatcgacctctgctgtactgaccctcgagacaaaatcttcgctatcctgcagctcatcatgcacgatcgtgtgattattgacgatggaatacgagtcgattatagaaagtccgtcaaagatgtgttcctcgggtttacacgatactggatccgacaaagtcgatcgcttagaatactctcggcgatacatgcagatcttggaagaagctggcaaagaatgacgataggcgccgctgatctaccatctcttggtcatcctacctggtccttttggtataccggtaatagtagctgggcaaagacaacactgggcttcgatgcaaaatgcaaacacagagcatctggaacaacaagtatcgatcaagaacttcttgatgcgtcggatgagaacgaacttcggctgctcggcacacaaatcggcacaataacaaagatcaaaccattcgggcatcgtggcatgaacgagatgaatcctaaagtcactcaggaaacgatggactgtttcatacgtatctttgacccttgggcgaaggaccagagctggaaacctaacaactcgaaccagacggtcgtgttgacagatcgagacattcagaatgcggctcgaatgcatcctggagttcatatgcagggacgtcacgttgggtcagacgatgcaattttcacttgtcttagtgattctctgttcttgattgagtgtgagaataaaccgacccagattggactgtgtccacacacagcgcaggttggcgatgtgatagttgttttgtttggaggcaatgtgcctttcattctgcgtcctcgaggacaggcgtactatcttgttggtgaaacattttgtcagggctatatggacggcaaagctatcgatgatatgaactccgccatattcaaaaaggagatatttactctgatctag

SEQ ID NO: 23253 - protein, 776 aa, Muscodor strobelii
  misc_feature: SGI Peptide ID NO. 567908
  misc_feature (235)..(394): Pfam Id: PF06985 Pfam Desc: Heterokaryon incompatibility protein (HET)
  misc_feature (235)..(327): Pfam Id: PF06985 Pfam Desc: Heterokaryon incompatibility protein (HET)
  misc_feature (20)..(776): NCBI GI: 256729784 Blast Desc: NECHADRAFT_83581 [Nectria haematococca mpVI 77-13-4]
  misc_feature (8)..(776): NCBI GI: 46121173 Blast Desc: FG04965.1 [Gibberella zeae PH-1]
  misc_feature (109)..(757): NCBI GI: 154320400 Blast Desc: BC1G_01672 [Botryotinia fuckeliana B05.10] gi|150853361|gb|EDN28553.1| BC1G_01672 [Botryotinia fuckeliana B05.10]
  misc_feature (188)..(775): NCBI GI: 46111897 Blast Desc: FG02830.1 [Gibberella zeae PH-1]
  misc_feature (194)..(763): NCBI GI: 67538668 Blast Desc: AN5504.2 [Aspergillus nidulans FGSC A4] gi|40743474|gb|EAA62664.1| AN5504.2 [Aspergillus nidulans FGSC A4] gi|259485046|tpe|CBF81783.1| TPA: HET domain protein nidulans
  misc_feature (194)..(761): NCBI GI: 256723655 Blast Desc: NECHADRAFT_52103 [Nectria haematococca mpVI 77-13-4]
  misc_feature (203)..(737): NCBI GI: 154312184 Blast Desc: BC1G_06125 [Botryotinia fuckeliana B05.10] gi|150850088|gb|EDN25281.1| BC1G_06125 [Botryotinia fuckeliana B05.10]
  misc_feature (233)..(773): NCBI GI: 154311024 Blast Desc: BC1G_06630 [Botryotinia fuckeliana B05.10] gi|150851034|gb|EDN26227.1| BC1G_06630 [Botryotinia fuckeliana B05.10]
  misc_feature (202)..(521): NCBI GI: 256722966 Blast Desc: NECHADRAFT_86875 [Nectria haematococca mpVI 77-13-4]
  misc_feature (203)..(763): NCBI GI: 256728445 Blast Desc: NECHADRAFT_54320 [Nectria haematococca mpVI 77-13-4]
MEVPVTQSMTVVDEGIVVKAHRKTSLRVSQHCSEAPYVVLKVPDEIGEIVRISFTTFAHDQGWASDLGAGSYTWFEALTTSHNSNSSGQYLSRVTFSHHVAVGARRILHRNVVANPNSQRLQTVWDVNVPDDERNVRAWLAGIRGGDSIQLIPRAMYTGWVNFIDEAEIEILGHPKMEDIKPLRKIGTESLNAYRDLRSDLEEIRILHLYPLCEGAEVRCSLEYVSLRNKTIPSFQAVSYCWGDQSRHEKIKLVTAGSTGDETFESDLTVTESLYHALRGLRNTDSMRLLWVDAICINQRDIDERNSQVSLMRQVYSRAEKVVIWLGEEYSQFTGSFSMLREILSIQTEDPERFKSQISLSKPHGHEEFGPWKYAYVARIFDNAWFSRVWVVQEAYNAGSCLVKCGPLEIPWPMLLRVNKCFYKAKQKSSAMGHRLLPDIMSKLMDVNDEDGQLKVTRAIDFDQLEIIVAAIDLCCTDPRDKIFAILQLIMHDRVIIDDGIRVDYRKSVKDVFLGFTRYWIRQSRSLRILSAIHADLGRSWQRMTIGAADLPSLGHPTWSFWYTGNSSWAKTTLGFDAKCKHRASGTTSIDQELLDASDENELRLLGTQIGTITKIKPFGHRGMNEMNPKVTQETMDCFIRIFDPWAKDQSWKPNNSNQTVVLTDRDIQNAARMHPGVHMQGRHVGSDDAIFTCLSDSLFLIECENKPTQIGLCPHTAQVGDVIVVLFGGNVPFILRPRGQAYYLVGETFCQGYMDGKAIDDMNSAIFKKEIFTLI

SEQ ID NO: 23254 - DNA, 2803 bp, Muscodor strobelii
  misc_feature: SGI EST ID NO. CUFF.54727.0
  misc_feature: Variant of the nucleotide sequence at SEQ ID NO 23252
gaaatcggtcagagtccacgacgctttatcgagaatctgacaatgagaatttcacgatattgccaggtttcatatttaattctgggttcatcatggaagttcctgtcacccagtcaatgacagtagttgacgagggtattgttgtcaaagctcatcgcaaaacttctcttcgagtatcccagcactgttcagaggctccttatgtggtgttgaaggtgcctgatgagataggggaaattgttcgcatatcttttaccacatttgcccacgaccaaggttgggcaagcgacttaggggctgggagttatacgtggtttgaagccttgacgacatctcataatagtaattcctctgggcaatatcttagcagggtgacattctcccatcacgttgctgtcggagcaaggaggatactacatcgtaatgttgtcgcgaatccaaatagtcagcgtttgcaaactgtctgggatgtcaacgtacccgatgatgagaggaacgttcgagcatggctggccggcattaggggaggagatagcatccagctcatccctcgggcaatgtatacgggctgggtgaacttcatcgatgaggcggagatcgagattctgggacacccaaaaatggaggatataaaacctctgcggaagattggtacggagtctctcaatgcatatcgagacttacgcagtgatcttgaggaaattcgcatcttacatctgtaccctttgtgcgaaggcgcagaagtgaggtgctctttggaatacgtgtcgctccgaaacaaaacgattccttccttccaggccgtatcctattgctggggagatcaatctcgacatgagaagattaagctcgtcactgcaggctctactggagatgagacattcgagtcggatctcacggtgacggagagcctataccacgctctaagaggcctacgaaataccgacagcatgcgtttgctctgggttgatgctatttgtattaaccagcgagacattgatgaaaggaacagtcaggtatctctcatgcggcaagtgtattcgagggcagaaaaagttgttatctggcttggtgaggagtatagccaattcaccgggtcttttagcatgcttcgtgagattctgtcaatccaaacagaagaccccgagagattcaaatctcaaataagcctgagtaaacctcatggacatgaagagtttggtccttggaaatatgcttatgtcgcccgaattttcgataacgcttggttcagccgtgtctgggtcgttcaggaggcgtacaacgctggatcgtgtctcgttaaatgcggtccacttgaaataccatggccgatgcttttacgagtcaacaaatgcttctataaagcgaaacagaaatcttcagcgatgggccatcgactgttgccagatatcatgtcgaagcttatggacgttaatgatgaagatgggcagctcaaggttactagggccattgactttgaccagctcgaaattattgttgctgcgatcgacctctgctgtactgaccctcgagacaaaatcttcgctatcctgcagctcatcatgcacgatcgtgtgattattgacgatggaatacgagtcgattatagaaagtccgtcaaagatgtgttcctcgggtttacacgatactggatccgacaaagtcgatcgcttagaatactctcggcgatacatgcagatcttggaagaagctggcaaagaatgacgataggcgccgctgatctaccatctcttggtcatcctacctggtccttttggtataccggtaatagtagctgggcaaagacaacactgggcttcgatgcaaaatgcaaacacagagcatctggaacaacaagtatcgatcaagaacttcttgatgcgtcggatgagaacgaacttcggctgctcggcacacaaatcggcacaataacaaagatcaaaccattcgggcatcgtggcatgaacgagatgaatcctaaagtcactcaggaaacgatggactgtttcatacgtatctttgacccttgggcgaaggaccagagctggaaacctaacaactcgaaccagacggtcgtgttgacagatcgagacattcagaatgcggctcgaatgcatcctggagttcatatgcagggacgtcacgttgggtcagacgatgcaattttcacttgtcttagtgattctctgttcttgattgagtgtgagaataaaccgacccagattggactgtgtccacacacagcgcaggttggcgatgtgatagttgttttgtttggaggcaatgtgcctttcattctgcgtcctcgaggacaggcgtactatcttgttggtgaaacattttgtcagggctatatggacggcaaagctatcgatgatatgaactccgccatattcaaaaaggagatatttactctgatctagcttgagctatcatgtctctcgtcttaccttcctctttctcaaggccgaggagcaaaaattcatttcattacaaccgaaaggcaatgcgcgttttcagctattatatctgtccataccaccttacaggggaaatcatagcggtatatatcagcgtatcaatgtgttttggttattatctgatacgtacgaaatgcgtgcgcattcagccctcctctcgcatacagttatatatatatttaatacagtaaggccaattggtgatgaaacagtttaaattggcgatgctgcaagcgatgggaaaaacagctcacacactacctgatggcggcggtccatcgaattgaccatacgcaaaaaatgcactcgcagcagtacagcaa

SEQ ID NO: 23255 - DNA, 5307 bp, Muscodor strobelii
  misc_feature: SGI cDNA ID NO. 567909
  misc_feature: Reduced expression when VOC is produced
  misc_feature: Encodes the peptide sequence at SEQ ID NO 23256
atggacaccgatcccctcgcattgcatccgccctcgttgcatccgcctttgcccatccgcccaaacctcagtcttcgcgacgcacccaagcgaaaccgatcgaaatcatcccccaaggccctgggccacgacgcgagaatcaggcgatcgccgacgtatgggaagacgaccggagtatacgcttcgcccattgctagttccagatcgctcatcccagcaacggagcgaaggtcgggagaccaagaaggtgggattacggcgcgtaaagcctcgattggtgagaaatggagtccaagcaccgagtctggagccggacgggagggcaggcagtttaccgtcgccaacgtcggcaataacggtcgcatgtttctgaggccggccgttgtccgccccggcaatcagcgatatgctcaaccacaacctcaaccccagataactttccccgtcaccccgccgagcacagccgggttggactccctcgcttctgcaaaagccccgagggtagaggccaatgaactgaaagacggcaaatggagtcctttgcacctcggagattctccttcgcctgggttgacagcaaggactgcgtatttcaacttccaaccaagtcggcggcatcgtagggcgatgtctgactctaccatccgcgatctgacaggaggcccggaatcaggcgacactggtgccttcaaggtggtcatatcgaagccacagaatgaccctaggtcaaggacaactgaggacctagatccaaatcaagcttcactcctgcaggtaaccatcccatcttggaagctcggcactccaaggttcaccaccaagggagtaccccttatccgaggatcctcctacgccccgactgaagaccccagatcaaaccacacgtcgtttctgagaatatccccaaacgaaaaagccactgacctgctgagaccggagactcttaattcgcaaattgcaagcagtttgcgttcgtctcaaatccagcggccttcgccgacttggcttatttccagtactggagacttgctgtctccacgggtgtcgcaccctattcgtacgggcttcatgcctgcaaacttagcaatcgaacccgccatgtttaatcccctcaccttcaaacccgcctgcgacgatcgatccattgtccgctattcatcccaaaccggtgccgttaccgcagcgagccctccgcggctcgtcgccgagatcacttcaaccagtttcctcgattacgacttgatctcggatttctttctctcttttcgatcgttcgtcgacacgccagagctcctacgcatgctgatcgctcgactacggtgggctttggcccgaggtgacgagtcagggatgatagtcaaagtcagaacgtttgtagccattaggcactgggttttgaactacttcgttgatgatttcgtgatcgactatcacctgcgagttactttctgcgatctggtgaatggctttgccgatgatttgtctggttcccagccagagagaaaagtcccacataagatcgttggggaactgaagaagtgctggcgacgtgtttgtgcacagtactgggatggtcctgattttgatgcagatcttgctgctgacgttcccattgcgcccggcggcattgccgggcatcgcgacccaaatctgaacccaactttctgggagaaggatccaactgaagcaccacagctggacaacattgtcattctgggtactggcgcgcaactgaaccacaggagcttccgcgcagatgtctcgaacgctggccatattgactctgtgatacttggtgggccacgacccgcaacacccgaggaggtgattcttgctatggaacacccagcttccccaatgagcatggccagtgtcgatgtcatctcgtgctcgttcccaaccaagaacatgcgtactggtgaccccgattctagcagagcgctcggggcccatcctgtagatccaagttcgatatacactaatagcgagcccgttgcgtccacccctcgcgccttgacgggcaaacgagtccgaccacaaacggctcatcgacgaaacaatagtttaacggactcgttgagagaacatggtaccacttcggaaaaggtgctgtataaggacaccgaattcctcgtcagtcttccatacgctggtagtctggtgcgaggcaatctcttgccgcctggtaggcctttcgttgacatggacaatgtcgacaccaagggcgccagcagacaaacaacaattttccagtctcagtcagcgatcgttacaaagaagaagggttctgcctcggccatgtcgagtcagggaatgcgcaaacttctcggaagcgtgcgtagggccctgagtacccgaggtcatggtatttcgccaacccagggtagcttcattgatattgcgcctcttggtcctcgaggagctacgacgaatagaattccgggcactgcagtagtaccacaggcgcagctacctcgcacagtcgcgatcagacaaggcccgcgaattgatttactgggagctaaagttgcggaggacttcaagaaagctgtgcgagaagacggagaaacaaagtccacgacaacaactgccaagagcatcgtcgaaaacgcagaatattctgcggcccacttcgattcatcttttaaccttcgcccattgagtgacgctgcgattaccacaggtagcaaatcgattgtcattgttgacggcaccacacctcatgaggttttgactatgacaggagccctacctcctcagactgcatctgttgaatcttacaaggaaacaccaccagacaggaatttaacacctcctatgacacctccaagtgagttcagtggtaatactcccaggcgatcatctcacatctttggccaacatgttcacaatacttcgttaactgcggaacctttgccttccttagacctcggggtagcccaggccagaaccgagaatatcgaggaaaaggctgcgccagttgacgatgtgatagtcccggttcgtccgtctgtcgaatttgtcgagccctttcgcagtaagccaccatcaagctatgttacgaggcataaaagacaacaatccagtttgagctaccgatctagaggatccgtatctcagcgtcgttgggcatctttccatagtggcctcgcagccccatcaacaattaagagctttgatgcgacgactacctattcagaaggctcgacaagatcagaaatcatgcctcaacctctgagaatgctacggagaaaaccagggggagacttgagaggcgcgacgaatgttgccgaactcgggtctatacctctgcgtcgatctcactctattggctccttgaccgcatactccgaatcgttgcgcagctcttatatccaaagcccggtcagagactcgagcggatatgtcgacattgttagcagtgattattcccaaaataatcgtggcgaggtgttttcgctcggagcaatggcagaaccagcgccaaaaaatgcagcgtctcttttcagcgctcaatcgtccaaacctgtcatgcgaccatccttcgaggctgaagctcagaaactagcacagatccctgacgacgttgacgatgatggaggcgttgagtcagcattactgaaactcgaagggaaatacgaacggaaagccgtaaagctctcaattgagccttcaaagatacccagtaaagacttggaaaaacttggcgaccgttccttctccccagtcgaagcggagcagatcagattcgaaaagaagaatcatcgccaccagcacgttgtggaggaggtaacgcccattacgccggaagaggacggtacattcctagccaccggtcagcagaattttgttcctcggcattccgaagtcagctcgttcttgtcagaagattctcgcgaaacttacaattctgtgcctcttcttgacagaggactgacggatgaaggccgtagcagaacacacacgcgcgaatggacaaatcattctatcttagaaggtcccgactctgccgaagaggagcctgaggatgtgattgctagctcgtcgctgaatccatcattcgaattcatcgaggtcacagcaagcgtcgaaggagctgcaacaaagcaagttgaggtcaaacacagcgagcaccgctcgtttctcaatatcgagagcgacaaagactccgatttgtcgtctgaactttctgctgagttagtggaattgaacgagcaggcggcgaagcctttctcctctactcaggccgaccataagcgtgtcaattcagattcaaagagcgatactacagcgccgtatgatcccaatggtggcggttcatccatcaaactaacccttgtccaagctcttcagatgtcaccggacatctcaccggacatcggtgagaggcaactctggcctgagcagctttcatcaccaacacccgatacaactcctaccactaccatgtaccatcaggctctcgagcgttcaccaaatcaatcaaccccaatgcgactttctgacaagtccactaaccaacaaagttgccatttgccattcatactcgccttcgattccgaagttcttgcgcagcaattcacactcatcgagaaagacgcgctgaacgaggttgattggagagaactgattgaaatgaagtggaaagattctcataacgactctcgttcttgggttgactttctccgcaatagcgatgctcgcggcgtcgaagtcgtgattgcccgcttcaacatcatggtcaagtgggccatttctgaaattgtgcttaccactcagatcgaagagcgagctcgctgcatcatcaaatacctgcatatcgctgcccattgcagaagatatcggaacttcgcaaccatgagtcagattgtcattgcccttacgtcgaacgaggtcgcccgcctctcaaggacgtggtctatggtgcctccgactgatatgaaaactatggctgctcttgaaatgctcgtttcaccgacgaagaacttctacaatctcagagcagaaatggagggcggtggtggttccgctgaagctggatgtatccccttcgttggtatatacactcacgacttgcttttcaactctcaaagaccatctgaaatcgcaagttctccgacaacgccgccattagtgaacttcgaacgttgtcgcatcgctgcatctattgttaagactgtacttcggcttttagaagcaagcacatactaccagttccagcctatcgagggtattaccgagcgatgcctgtggatgggtgcgttgagtgacgatgacatccgagcaagatcagagaatcttgagtga

SEQ ID NO: 23256 - protein, 1768 aa, Muscodor strobelii
  misc_feature: SGI Peptide ID NO. 567909
  misc_feature (1516)..(1719): Pfam Id: PF00617 Pfam Desc: RasGEF domain
  misc_feature (391)..(486): Pfam Id: PF00618 Pfam Desc: Guanine nucleotide exchange factor for Ras-like GTPases; N-terminal motif
  misc_feature (1516)..(1697): Pfam Id: PF00617 Pfam Desc: RasGEF domain
  misc_feature (65)..(1768): NCBI GI: 256729071 Blast Desc: NECHADRAFT_40162 [Nectria haematococca mpVI 77-13-4]
  misc_feature (30)..(1768): NCBI GI: 116199949 Blast Desc: CHGG_08130 [Chaetomium globosum CBS 148.51] gi|88179409|gb|EAQ86877.1| CHGG_08130 [Chaetomium globosum CBS 148.51]
  misc_feature (61)..(1761): NCBI GI: 171690140 Blast Desc: protein product [Podospora anserina] gi|170945018|emb|CAP71129.1| protein product [Podospora anserina]
  misc_feature (68)..(1768): NCBI GI: 85079235 Blast Desc: NCU03379 [Neurospora crassa OR74A] gi|28917372|gb|EAA27078.1| conserved [Neurospora crassa OR74A]
  misc_feature (61)..(1768): NCBI GI: 46138779 Blast Desc: FG10904.1 [Gibberella zeae PH-1]
  misc_feature (21)..(1768): NCBI GI: 28881155 Blast Desc: related to LTE1 protein [Neurospora crassa]
  misc_feature (367)..(1768): NCBI GI: 261356902 Blast Desc: guanine nucleotide exchange factor LTE1 [Verticillium albo-atrum VaMs.102]
  misc_feature (210)..(1768): NCBI GI: 145606280 Blast Desc: MGG_02419 [Magnaporthe grisea 70-15] gi|145013983|gb|EDJ98624.1| MGG_02419 [Magnaporthe grisea 70-15]
  misc_feature (87)..(1768): NCBI GI: 156040423 Blast Desc: SS1G_12228 [Sclerotinia sclerotiorum 1980] gi|154696284|gb|EDN96022.1| SS1G_12228 [Sclerotinia sclerotiorum 1980]
  misc_feature (758)..(1768): NCBI GI: 34500110 Blast Desc: LTE1-like protein [Epichloe festucae]
  misc_feature: Useful for introducing or modulating the production of volatile compounds
MDTDPLALHPPSLHPPLPIRPNLSLRDAPKRNRSKSSPKALGHDARIRRSPTYGKTTGVYASPIASSRSLIPATERRSGDQEGGITARKASIGEKWSPSTESGAGREGRQFTVANVGNNGRMFLRPAVVRPGNQRYAQPQPQPQITFPVTPPSTAGLDSLASAKAPRVEANELKDGKWSPLHLGDSPSPGLTARTAYFNFQPSRRHRRAMSDSTIRDLTGGPESGDTGAFKVVISKPQNDPRSRTTEDLDPNQASLLQVTIPSWKLGTPRFTTKGVPLIRGSSYAPTEDPRSNHTSFLRISPNEKATDLLRPETLNSQIASSLRSSQIQRPSPTWLISSTGDLLSPRVSHPIRTGFMPANLAIEPAMFNPLTFKPACDDRSIVRYSSQTGAVTAASPPRLVAEITSTSFLDYDLISDFFLSFRSFVDTPELLRMLIARLRWALARGDESGMIVKVRTFVAIRHWVLNYFVDDFVIDYHLRVTFCDLVNGFADDLSGSQPERKVPHKIVGELKKCWRRVCAQYWDGPDFDADLAADVPIAPGGIAGHRDPNLNPTFWEKDPTEAPQLDNIVILGTGAQLNHRSFRADVSNAGHIDSVILGGPRPATPEEVILAMEHPASPMSMASVDVISCSFPTKNMRTGDPDSSRALGAHPVDPSSIYTNSEPVASTPRALTGKRVRPQTAHRRNNSLTDSLREHGTTSEKVLYKDTEFLVSLPYAGSLVRGNLLPPGRPFVDMDNVDTKGASRQTTIFQSQSAIVTKKKGSASAMSSQGMRKLLGSVRRALSTRGHGISPTQGSFIDIAPLGPRGATTNRIPGTAVVPQAQLPRTVAIRQGPRIDLLGAKVAEDFKKAVREDGETKSTTTTAKSIVENAEYSAAHFDSSFNLRPLSDAAITTGSKSIVIVDGTTPHEVLTMTGALPPQTASVESYKETPPDRNLTPPMTPPSEFSGNTPRRSSHIFGQHVHNTSLTAEPLPSLDLGVAQARTENIEEKAAPVDDVIVPVRPSVEFVEPFRSKPPSSYVTRHKRQQSSLSYRSRGSVSQRRWASFHSGLAAPSTIKSFDATTTYSEGSTRSEIMPQPLRMLRRKPGGDLRGATNVAELGSIPLRRSHSIGSLTAYSESLRSSYIQSPVRDSSGYVDIVSSDYSQNNRGEVFSLGAMAEPAPKNAASLFSAQSSKPVMRPSFEAEAQKLAQIPDDVDDDGGVESALLKLEGKYERKAVKLSIEPSKIPSKDLEKLGDRSFSPVEAEQIRFEKKNHRHQHVVEEVTPITPEEDGTFLATGQQNFVPRHSEVSSFLSEDSRETYNSVPLLDRGLTDEGRSRTHTREWTNHSILEGPDSAEEEPEDVIASSSLNPSFEFIEVTASVEGAATKQVEVKHSEHRSFLNIESDKDSDLSSELSAELVELNEQAAKPFSSTQADHKRVNSDSKSDTTAPYDPNGGGSSIKLTLVQALQMSPDISPDIGERQLWPEQLSSPTPDTTPTTTMYHQALERSPNQSTPMRLSDKSTNQQSCHLPFILAFDSEVLAQQFTLIEKDALNEVDWRELIEMKWKDSHNDSRSWVDFLRNSDARGVEVVIARFNIMVKWAISEIVLTTQIEERARCIIKYLHIAAHCRRYRNFATMSQIVIALTSNEVARLSRTWSMVPPTDMKTMAALEMLVSPTKNFYNLRAEMEGGGGSAEAGCIPFVGIYTHDLLFNSQRPSEIASSPTTPPLVNFERCRIAASIVKTVLRLLEASTYYQFQPIEGITERCLWMGALSDDDIRARSENLE

SEQ ID NO: 23257 - DNA, 6998 bp, Muscodor strobelii
  misc_feature: SGI EST ID NO. CUFF.54768.1
  misc_feature: Variant of the nucleotide sequence at SEQ ID NO 23255
ccagcctgtggaggcacaagtcagaacttcagattgccctgcttgcttgccaggacctgtacctcgcaaccctcgtggccagtagtactcgacccagtgcccagctttgccagtcgcatatcccaagtctgcagccttccactcctgtcgactgcagatcaagcaacaattatcattctcccattctctagtgctcgcatcacatagtcaaacaaaattgagtagcgaggagagcatgtgccgccacatcttaagatctgttggccgtatacgataaaagtacctacctcaagtaccagtctgcagccgccccagcagttctggactttggtctcagtaaattgggagtgcaaggatacccacctgcaacgccaacggcaatctcacggctgaaccgccacatgaatttctaatcctcacatcgtcatctcactacccactgcgccccgactgtagagcacgctggtcacgcgtgtccgacactgccagctttcgtgatcaacactgtcccaagccaatgtgtcctcgaacgacgtgaagtcactatccatccaccagaccagccgaacacagacacgcgcgccttccatgtatcagccaattctcagcgaattcagcaggcttcgttctgccacgctgtagtcatggacaccgatcccctcgcattgcatccgccctcgttgcatccgcctttgcccatccgcccaaacctcagtcttcgcgacgcacccaagcgaaaccgatcgaaatcatcccccaaggccctgggccacgacgcgagaatcaggcgatcgccgacgtatgggaagacgaccggagtatacgcttcgcccattgctagttccagatcgctcatcccagcaacggagcgaaggtcgggagaccaagaaggtgggattacggcgcgtaaagcctcgattggtgagaaatggagtccaagcaccgagtctggagccggacgggagggcaggcagtttaccgtcgccaacgtcggcaataacggtcgcatgtttctgaggccggccgttgtccgccccggcaatcagcgatatgctcaaccacaacctcaaccccagataactttccccgtcaccccgccgagcacagccgggttggactccctcgcttctgcaaaagccccgagggtagaggccaatgaactgaaagacggcaaatggagtcctttgcacctcggagattctccttcgcctgggttgacagcaaggactgcgtatttcaacttccaaccaagtcggcggcatcgtagggcgatgtctgactctaccatccgcgatctgacaggaggcccggaatcaggcgacactggtgccttcaaggtggtcatatcgaagccacagaatgaccctaggtcaaggacaactgaggacctagatccaaatcaagcttcactcctgcaggtaaccatcccatcttggaagctcggcactccaaggttcaccaccaagggagtaccccttatccgaggatcctcctacgccccgactgaagaccccagatcaaaccacacgtcgtttctgagaatatccccaaacgaaaaagccactgacctgctgagaccggagactcttaattcgcaaattgcaagcagtttgcgttcgtctcaaatccagcggccttcgccgacttggcttatttccagtactggagacttgctgtctccacgggtgtcgcaccctattcgtacgggcttcatgcctgcaaacttagcaatcgaacccgccatgtttaatcccctcaccttcaaacccgcctgcgacgatcgatccattgtccgctattcatcccaaaccggtgccgttaccgcagcgagccctccgcggctcgtcgccgagatcacttcaaccagtttcctcgattacgacttgatctcggatttctttctctcttttcgatcgttcgtcgacacgccagagctcctacgcatgctgatcgctcgactacggtgggctttggcccgaggtgacgagtcagggatgatagtcaaagtcagaacgtttgtagccattaggcactgggttttgaactacttcgttgatgatttcgtgatcgactatcacctgcgagttactttctgcgatctggtgaatggctttgccgatgatttgtctggttcccagccagagagaaaagtcccacataagatcgttggggaactgaagaagtgctggcgacgtgtttgtgcacagtactgggatggtcctgattttgatgcagatcttgctgctgacgttcccattgcgcccggcggcattgccgggcatcgcgacccaaatctgaacccaactttctgggagaaggatccaactgaagcaccacagctggacaacattgtcattctgggtactggcgcgcaactgaaccacaggagcttccgcgcagatgtctcgaacgctggccatattgactctgtgatacttggtgggccacgacccgcaacacccgaggaggtgattcttgctatggaacacccagcttccccaatgagcatggccagtgtcgatgtcatctcgtgctcgttcccaaccaagaacatgcgtactggtgaccccgattctagcagagcgctcggggcccatcctgtagatccaagttcgatatacactaatagcgagcccgttgcgtccacccctcgcgccttgacgggcaaacgagtccgaccacaaacggctcatcgacgaaacaatagtttaacggactcgttgagagaacatggtaccacttcggaaaaggtgctgtataaggacaccgaattcctcgtcagtcttccatacgctggtagtctggtgcgaggcaatctcttgccgcctggtaggcctttcgttgacatggacaatgtcgacaccaagggcgccagcagacaaacaacaattttccagtctcagtcagcgatcgttacaaagaagaagggttctgcctcggccatgtcgagtcagggaatgcgcaaacttctcggaagcgtgcgtagggccctgagtacccgaggtcatggtatttcgccaacccagggtagcttcattgatattgcgcctcttggtcctcgaggagctacgacgaatagaattccgggcactgcagtagtaccacaggcgcagctacctcgcacagtcgcgatcagacaaggcccgcgaattgatttactgggagctaaagttgcggaggacttcaagaaagctgtgcgagaagacggagaaacaaagtccacgacaacaactgccaagagcatcgtcgaaaacgcagaatattctgcggcccacttcgattcatcttttaaccttcgcccattgagtgacgctgcgattaccacaggtagcaaatcgattgtcattgttgacggcaccacacctcatgaggttttgactatgacaggagccctacctcctcagactgcatctgttgaatcttacaaggaaacaccaccagacaggaatttaacacctcctatgacacctccaagtgagttcagtggtaatactcccaggcgatcatctcacatctttggccaacatgttcacaatacttcgttaactgcggaacctttgccttccttagacctcggggtagcccaggccagaaccgagaatatcgaggaaaaggctgcgccagttgacgatgtgatagtcccggttcgtccgtctgtcgaatttgtcgagccctttcgcagtaagccaccatcaagctatgttacgaggcataaaagacaacaatccagtttgagctaccgatctagaggatccgtatctcagcgtcgttgggcatctttccatagtggcctcgcagccccatcaacaattaagagctttgatgcgacgactacctattcagaaggctcgacaagatcagaaatcatgcctcaacctctgagaatgctacggagaaaaccagggggagacttgagaggcgcgacgaatgttgccgaactcgggtctatacctctgcgtcgatctcactctattggctccttgaccgcatactccgaatcgttgcgcagctcttatatccaaagcccggtcagagactcgagcggatatgtcgacattgttagcagtgattattcccaaaataatcgtggcgaggtgttttcgctcggagcaatggcagaaccagcgccaaaaaatgcagcgtctcttttcagcgctcaatcgtccaaacctgtcatgcgaccatccttcgaggctgaagctcagaaactagcacagatccctgacgacgttgacgatgatggaggcgttgagtcagcattactgaaactcgaagggaaatacgaacggaaagccgtaaagctctcaattgagccttcaaagatacccagtaaagacttggaaaaacttggcgaccgttccttctccccagtcgaagcggagcagatcagattcgaaaagaagaatcatcgccaccagcacgttgtggaggaggtaacgcccattacgccggaagaggacggtacattcctagccaccggtcagcagaattttgttcctcggcattccgaagtcagctcgttcttgtcagaagattctcgcgaaacttacaattctgtgcctcttcttgacagaggactgacggatgaaggccgtagcagaacacacacgcgcgaatggacaaatcattctatcttagaaggtcccgactctgccgaagaggagcctgaggatgtgattgctagctcgtcgctgaatccatcattcgaattcatcgaggtcacagcaagcgtcgaaggagctgcaacaaagcaagttgaggtcaaacacagcgagcaccgctcgtttctcaatatcgagagcgacaaagactccgatttgtcgtctgaactttctgctgagttagtggaattgaacgagcaggcggcgaagcctttctcctctactcaggccgaccataagcgtgtcaattcagattcaaagagcgatactacagcgccgtatgatcccaatggtggcggttcatccatcaaactaacccttgtccaagctcttcagatgtcaccggacatctcaccggacatcggtgagaggcaactctggcctgagcagctttcatcaccaacacccgatacaactcctaccactaccatgtaccatcaggctctcgagcgttcaccaaatcaatcaaccccaatgcgactttctgacaagtccactaaccaacaaagttgccatttgccattcatactcgccttcgattccgaagttcttgcgcagcaattcacactcatcgagaaagacgcgctgaacgaggttgattggagagaactgattgaaatgaagtggaaagattctcataacgactctcgttcttgggttgactttctccgcaatagcgatgctcgcggcgtcgaagtcgtgattgcccgcttcaacatcatggtcaagtgggccatttctgaaattgtgcttaccactcagatcgaagagcgagctcgctgcatcatcaaatacctgcatatcgctgcccattgcagaagatatcggaacttcgcaaccatgagtcagattgtcattgcccttacgtcgaacgaggtcgcccgcctctcaaggacgtggtctatggtgcctccgactgatatgaaaactatggctgctcttgaaatgctcgtttcaccgacgaagaacttctacaatctcagagcagaaatggagggcggtggtggttccgctgaagctggatgtatccccttcgttggtatatacactcacgacttgcttttcaactctcaaagaccatctgaaatcgcaagttctccgacaacgccgccattagtgaacttcgaacgttgtcgcatcgctgcatctattgttaagactgtacttcggcttttagaagcaagcacatactaccagttccagcctatcgagggtattaccgagcgatgcctgtggatgggtgcgttgagtgacgatgacatccgagcaagatcagagaatcttgagtgagtaggaggcggtggtgcttccggtctcgtataaaactgtgcaattcgatactacgactgttcgaaggactttctcacgagacacaagtcatctcagacatcattttgatacatacaggatcgctgtcacacgatgcgctaatctgcacggatctcgataccccgatacccccatggcacacgaaatgcatgcctttctattatattcagtacggcgtactcgggcgtctcaattcatattaacgacgacagctcttctttgagcattcattcgacggtactctgttttctttgtttattccacaatgttgtaacaacaagagccgtttatggcggctatgtgttctcaggaggagtcttttttacccatcatgactgtgtttcgcgtaaacatctcatctgtccaagtttgattttgtcgaaggtgcataagaggaagagtacggcgtatggctatttgtctgagcttcgagaatcgctgagtgatctggcttgagggcagaaagcaggaggtaaacaagtgatacatttgctggcgactgatcagataccccatgatgcgggcgcaaaaggagttgacaatctcttttatgagatacacttgcatttgaaaggggcgttttaggatgtgttagttgtaatgaacgatgaactattaatcaatgttgtttctatgagggtttcgtctctccttccttttctctactttggtgatgaggcacgcgcgtgcatatactcttaagcgaagcatgtgaacgaggcatcttgacattttcgtgttcgtatgcagataatcatagaagcgatgttgttatagcgtataagcgattggctagtagaccgtgaatactatgtgtacccaacagagtaggtatggccaagctgggacatctggggtgggtgaggaattacgattgccaatgaaacattctgtgttggcgatcccaaagcatcttcgggatcccgcaacggcaagctgcgggcaacctcgcttaggtatcgggtgaaaagaagatgccgtatctttggacgcctccgacactccgat

SEQ ID NO: 23258 - DNA, 450 bp, Muscodor strobelii
  misc_feature: SGI cDNA ID NO. 567910
  misc_feature: Encodes the peptide sequence at SEQ ID NO 23259
atgagtcagattgtcattgcccttacgtcgaacgaggtcgcccgcctctcaaggacgtggtctatggtgcctccgactgatatgaaaactatggctgctcttgaaatgctcgtttcaccgacgaagaacttctacaatctcagagcagaaatggagggcggtggtggttccgctgaagctggatgtatccccttcgttggtatatacactcacgacttgcttttcaactctcaaagaccatctgaaatcgcaagttctccgacaacgccgccattagtgaacttcgaacgttgtcgcatcgctgcatctattgttaagactgtacttcggcttttagaagcaagcacatactaccagttccagcctatcgagggtattaccgagcgatgcctgtggatgggtgcgttgagtgacgatgacatccgagcaagatcagagaatcttgagtga

SEQ ID NO: 23259 - protein, 149 aa, Muscodor strobelii
  misc_feature: SGI Peptide ID NO. 567910
  misc_feature (4)..(78): Pfam Id: PF00617 Pfam Desc: RasGEF domain
  misc_feature (1)..(149): NCBI GI: 261356902 Blast Desc: guanine nucleotide exchange factor LTE1 [Verticillium albo-atrum VaMs.102]
  misc_feature (1)..(149): NCBI GI: 145606280 Blast Desc: MGG_02419 [Magnaporthe grisea 70-15] gi|145013983|gb|EDJ98624.1| MGG_02419 [Magnaporthe grisea 70-15]
  misc_feature (1)..(149): NCBI GI: 256729071 Blast Desc: NECHADRAFT_40162 [Nectria haematococca mpVI 77-13-4]
  misc_feature (1)..(149): NCBI GI: 28881155 Blast Desc: related to LTE1 protein [Neurospora crassa]
  misc_feature (1)..(149): NCBI GI: 85079235 Blast Desc: NCU03379 [Neurospora crassa OR74A] gi|28917372|gb|EAA27078.1| conserved [Neurospora crassa OR74A]
  misc_feature (1)..(149): NCBI GI: 116199949 Blast Desc: CHGG_08130 [Chaetomium globosum CBS 148.51] gi|88179409|gb|EAQ86877.1| CHGG_08130 [Chaetomium globosum CBS 148.51]
  misc_feature (1)..(149): NCBI GI: 46138779 Blast Desc: FG10904.1 [Gibberella zeae PH-1]
  misc_feature (1)..(142): NCBI GI: 171690140 Blast Desc: protein product [Podospora anserina] gi|170945018|emb|CAP71129.1| protein product [Podospora anserina]
  misc_feature (1)..(149): NCBI GI: 34500110 Blast Desc: LTE1-like protein [Epichloe festucae]
  misc_feature (1)..(141): NCBI GI: 154320716 Blast Desc: BC1G_01830 [Botryotinia fuckeliana B05.10] gi|150853519|gb|EDN28711.1| BC1G_01830 [Botryotinia fuckeliana B05.10]
MSQIVIALTSNEVARLSRTWSMVPPTDMKTMAALEMLVSPTKNFYNLRAEMEGGGGSAEAGCIPFVGIYTHDLLFNSQRPSEIASSPTTPPLVNFERCRIAASIVKTVLRLLEASTYYQFQPIEGITERCLWMGALSDDDIRARSENLE

SEQ ID NO: 23260 - DNA, 6998 bp, Muscodor strobelii; identical to SEQ ID NO: 23257
  misc_feature: SGI EST ID NO. CUFF.54768.1
  misc_feature: Variant of the nucleotide sequence at SEQ ID NO 23258

SEQ ID NO: 23261 - DNA, 1542 bp, Muscodor strobelii
  misc_feature: SGI cDNA ID NO. 567911
  misc_feature: Encodes the peptide sequence at SEQ ID NO 23262
atggacgcaattcgggaaaagttgttccagccccaagagtggtcagcgactgtctgggtactgctgctcaccactgctgcggcgacgatctaccgcgtgttctggaggccgtcgctccccaagaacgcgccgaaatggtttaagaagagcgactatccgttcatcggctcgctagattttttcaatgggaggcgtagcgacttcttcaaagagggtatacagagctcgaagacgggaaacttcagtttctacgtcggcaagaagcagatcattggtatttcggggcccgagggtaggaagacatattttgagaataaggatctcaacttcgcccagggatttgcagagcttttgactggacagccggcaacaccaaatgaaggcggacaagatgagttcagccaaatgttcaccaaggcgctcatccccttaatgaagaaggagaatttcgtgaagaacctcgatctgatgacgggcgacacccgtggtgcattggaggaattggccgcggccccgccctcaaaagccgatccagcgtggcgtgtcaccgatccctttgagagcctgtacgaaatcgtataccagctcacgatgcgaactgtgggagtcaatgacatcgccgaggatcccaagatgctgaagaagacgctttcgatcttcgactggttcgagagcgccgattcctcgattaaggtgtacttcccctggctaccaactcctaaccatctgctgcgcatgtactacggcacaaagcttgctctcgtcttccggtctatcatcgagaagcgcaagaagaccggcgagaaaggcaacgatgctttgcaattcctcatcgatcgggatcttacccttcccaacattgttggattcgtgatcggtgctctgttcgccgggcagctgaacagtggcatcaacgccggatacctgcagatattcctcacgcagaacccagagtggatggcgaagctgcgcggagaagtcgaggacgcagttgcacggcacaggacgagcgcttcgcagtctcgcgccgatgtccttgggactctgaccattgaggaatgggagactgagttcccgctcatcgacctggcgctgcgtgagacgatccgcttctcgctaccgggcacatcgttccgcaagaatgtttcggggcgtgatgtgcctatcggtgattcgggcgaggtcatccctaatggtgctttcgctgcgtatttagttgatgatatccagtttggagagtggtattccgatccgaacaagtgggatccgtcgcgtttcttcgacgagcgggctgaggatagaaaggtttctcatgggtatatgggttggggtactggtcgacacccttgcttgggaatgaaattcgccaaactcgagatggcgttcatcacggcattcttcatcgcgatgttcgactttgaatgctcagacaaggacggaaacaaagtcaaggagatgccgaagacgatgaaccggaatctgcactctgccaagaagccacaggagaacatttacttgcggtacaagttgaggacggattaa

SEQ ID NO: 23262 - protein, 513 aa, Muscodor strobelii
  misc_feature: SGI Peptide ID NO. 567911
  misc_feature (44)..(507): Pfam Id: PF00067 Pfam Desc: Cytochrome P450
  misc_feature (413)..(507): Pfam Id: PF00067 Pfam Desc: Cytochrome P450
  misc_feature (27)..(511): NCBI GI: 189191598 Blast Desc: cytochrome P450 6A1 [Pyrenophora tritici-repentis Pt-1C-BFP] gi|187973744|gb|EDU41243.1| cytochrome P450 6A1 [Pyrenophora tritici-repentis Pt-1C-BFP]
  misc_feature (39)..(511): NCBI GI: 238838616 Blast Desc: conserved [Microsporum canis CBS 113480]
  misc_feature (131)..(465): NCBI GI: 261353359 Blast Desc: conserved [Verticillium albo-atrum VaMs.102]
  misc_feature (18)..(512): NCBI GI: 256724329 Blast Desc: NECHADRAFT_87500 [Nectria haematococca mpVI 77-13-4]
  misc_feature (22)..(504): NCBI GI: 242796896 Blast Desc: cytochrome P450, [Talaromyces stipitatus ATCC 10500] gi|218719487|gb|EED18907.1| cytochrome P450, [Talaromyces stipitatus ATCC 10500]
  misc_feature (22)..(504): NCBI GI: 242796891 Blast Desc: cytochrome P450, [Talaromyces stipitatus ATCC 10500] gi|218719486|gb|EED18906.1| cytochrome P450, [Talaromyces stipitatus ATCC 10500]
  misc_feature (16)..(513): NCBI GI: 255941238 Blast Desc: Pc16g10820 [Penicillium chrysogenum Wisconsin 54-1255] gi|211586011|emb|CAP93752.1| Pc16g10820 [Penicillium chrysogenum Wisconsin 54-1255]
  misc_feature (13)..(498): NCBI GI: 119499616 Blast Desc: Cytochrome P450 oxidoreductase, [Neosartorya fischeri NRRL 181] gi|119414730|gb|EAW24668.1| Cytochrome P450 oxidoreductase, [Neosartorya fischeri NRRL 181]
  misc_feature (53)..(509): NCBI GI: 170099768 Blast Desc: [Laccaria bicolor S238N-H82] gi|164643781|gb|EDR08032.1| [Laccaria bicolor S238N-H82]
  misc_feature (15)..(509): NCBI GI: 170109157 Blast Desc: cytochrome P450 [Laccaria bicolor S238N-H82] gi|164639366|gb|EDR03638.1| cytochrome P450 [Laccaria bicolor S238N-H82]
  misc_feature (211)..(459): SWISSPROT Homolog: EC 1.14.13.70 Sterol 14-demethylase
MDAIREKLFQPQEWSATVWVLLLTTAAATIYRVFWRPSLPKNAPKWFKKSDYPFIGSLDFFNGRRSDFFKEGIQSSKTGNFSFYVGKKQIIGISGPEGRKTYFENKDLNFAQGFAELLTGQPATPNEGGQDEFSQMFTKALIPLMKKENFVKNLDLMTGDTRGALEELAAAPPSKADPAWRVTDPFESLYEIVYQLTMRTVGVNDIAEDPKMLKKTLSIFDWFESADSSIKVYFPWLPTPNHLLRMYYGTKLALVFRSIIEKRKKTGEKGNDALQFLIDRDLTLPNIVGFVIGALFAGQLNSGINAGYLQIFLTQNPEWMAKLRGEVEDAVARHRTSASQSRADVLGTLTIEEWETEFPLIDLALRETIRFSLPGTSFRKNVSGRDVPIGDSGEVIPNGAFAAYLVDDIQFGEWYSDPNKWDPSRFFDERAEDRKVSHGYMGWGTGRHPCLGMKFAKLEMAFITAFFIAMFDFECSDKDGNKVKEMPKTMNRNLHSAKKPQENIYLRYKLRTD

SEQ ID NO: 23263 - DNA, 2081 bp, Muscodor strobelii
  misc_feature: SGI EST ID NO. CUFF.54843.0
  misc_feature: Variant of the nucleotide sequence at SEQ ID NO 23261
gtcttggagtctctcttgtgataatcataattaaggcacagctgatacgccgtcatcgtttcttccagcattacgttctttagactctgcgtctctctttgtgtcgcattcccttgcttcggcaccgcgaggatagggcgtgatcacgctgcgactatatttgagacagggatatcttatttattttttttggagatttggatttcaattccaggatcgggagtgtctgacgacgatactctttgattaagagtattggtagcaccacaaaaatttcccgaccgctgtgaatcgtcacatacccgtcaatcaaaggcccgccaaacaggtcgtgtaccactgtcaaaatggacgcaattcgggaaaagttgttccagccccaagagtggtcagcgactgtctgggtactgctgctcaccactgctgcggcgacgatctaccgcgtgttctggaggccgtcgctccccaagaacgcgccgaaatggtttaagaagagcgactatccgttcatcggctcgctagattttttcaatgggaggcgtagcgacttcttcaaagagggtatacagagctcgaagacgggaaacttcagtttctacgtcggcaagaagcagatcattggtatttcggggcccgagggtaggaagacatattttgagaataaggatctcaacttcgcccagggatttgcagagcttttgactggacagccggcaacaccaaatgaaggcggacaagatgagttcagccaaatgttcaccaaggcgctcatccccttaatgaagaaggagaatttcgtgaagaacctcgatctgatgacgggcgacacccgtggtgcattggaggaattggccgcggccccgccctcaaaagccgatccagcgtggcgtgtcaccgatccctttgagagcctgtacgaaatcgtataccagctcacgatgcgaactgtgggagtcaatgacatcgccgaggatcccaagatgctgaagaagacgctttcgatcttcgactggttcgagagcgccgattcctcgattaaggtgtacttcccctggctaccaactcctaaccatctgctgcgcatgtactacggcacaaagcttgctctcgtcttccggtctatcatcgagaagcgcaagaagaccggcgagaaaggcaacgatgctttgcaattcctcatcgatcgggatcttacccttcccaacattgttggattcgtgatcggtgctctgttcgccgggcagctgaacagtggcatcaacgccggatacctgcagatattcctcacgcagaacccagagtggatggcgaagctgcgcggagaagtcgaggacgcagttgcacggcacaggacgagcgcttcgcagtctcgcgccgatgtccttgggactctgaccattgaggaatgggagactgagttcccgctcatcgacctggcgctgcgtgagacgatccgcttctcgctaccgggcacatcgttccgcaagaatgtttcggggcgtgatgtgcctatcggtgattcgggcgaggtcatccctaatggtgctttcgctgcgtatttagttgatgatatccagtttggagagtggtattccgatccgaacaagtgggatccgtcgcgtttcttcgacgagcgggctgaggatagaaaggtttctcatgggtatatgggttggggtactggtcgacacccttgcttgggaatgaaattcgccaaactcgagatggcgttcatcacggcattcttcatcgcgatgttcgactttgaatgctcagacaaggacggaaacaaagtcaaggagatgccgaagacgatgaaccggaatctgcactctgccaagaagccacaggagaacatttacttgcggtacaagttgaggacggattaagccatcaactgcgtctcagggtaaatatgggggccagatgtctgggtatatagccgagggttttggagaagtgtgatatagtatgtgatgtatcgtctttggaaagcatggattgaagttagattctggatacttggccatgtctgccaagcgtctgaataagatgaattataccatattttgaatcagaga

SEQ ID NO: 23264 - DNA, 861 bp, Muscodor strobelii
  misc_feature: SGI cDNA ID NO. 567912
  misc_feature: Reduced expression when VOC is produced
  misc_feature: Encodes the peptide sequence at SEQ ID NO 23265
atggcgcccgctaacctccccgcctgcatggctgcgaccagccaggacatcgagatgctcctcgccgcccagtctcacctcggctccaagaacttgcaggtgcacatggagccctacctctggaagacccgcgctgacggagtcaacgtcatcaacgtcggcaagacctgggagaagatcgttctcgccgcccgcatcatcgccgccgtcgacaaccccgccgacatctgcgtcatctcggcccgtccctacggtcagcgtgccgtcctcaagttcgccgcccacaccggtgccgtcgccattgccggtcgctttacccccggttccttcaccaactacatcacccgctcgttcaaggagccccgtctcatcgtcgtcaccgacccccgcaccgatgctcaggccatccgcgaggcttcctacgtcaacatccccgtcatcgccctctgcgacactgactcccccaccgagttcgttgatgctgctatccccaccaacaacaagggtcgccacgccattggctgcgtctggtggatgctcgcccgtgaggtcctccgcatccgtggcaccattgccagccgcgataccccctgggatgtcatggtcgatctctacttctaccgtgaccctgaggctgaggccgaggagaaggtcgaggaggagaagctccccggtgctgacgaggtcggccctgctgctatcgagggcggtgctctcactggtggcgattgggaagctgccggtagtgctcccattgccgccggtggcaactgggatggcgctgacgagtgggccggtgccaccgctgctgctcctaccgctgagtggggtgctactgagggcaaggagagccagtggtag

SEQ ID NO: 23265 - protein, 286 aa, Muscodor strobelii
  misc_feature: SGI Peptide ID NO. 567912
  misc_feature (20)..(188): Pfam Id: PF00318 Pfam Desc: Ribosomal protein S2
  misc_feature (1)..(286): NCBI GI: 145605595 Blast Desc: conserved [Magnaporthe grisea 70-15] gi|229891591|sp|A4R188.1|RSSA_MAGGR RecName: Full=40S ribosomal protein S0 gi|145013412|gb|EDJ98053.1| conserved [Magnaporthe
  misc_feature (1)..(286): NCBI GI: 46138781 Blast Desc: FG10905.1 [Gibberella zeae PH-1]
  misc_feature (1)..(286): NCBI GI: 261356903 Blast Desc: 40S ribosomal protein S0 [Verticillium albo-atrum VaMs.102]
  misc_feature (1)..(286): NCBI GI: 85082069 Blast Desc: 40S ribosomal protein S0 [Neurospora crassa OR74A] gi|30316337|sp|Q01291.2|RS0_NEUCR RecName: Full=40S ribosomal protein S0; AltName: Full=Ribosome-associated protein 1 protein
  misc_feature (1)..(276): NCBI GI: 269969652 Blast Desc: RSSA_NECH7 RecName: Full=40S ribosomal protein S0 gi|256728888|gb|EEU42243.1| NECHADRAFT_68978 [Nectria haematococca mpVI 77-13-4]
  misc_feature (1)..(286): NCBI GI: 156040389 Blast Desc: 40S ribosomal protein S0 [Sclerotinia sclerotiorum 1980] gi|229891610|sp|A7F2R3.1|RSSA_SCLS1 RecName: Full=40S ribosomal protein S0 gi|154696267|gb|EDN96005.1| 40S ribosomal S0
  misc_feature (1)..(284): NCBI GI: 169605389 Blast Desc: SNOG_05719 [Phaeosphaeria nodorum SN15] gi|229891761|sp|Q0UR95.2|RSSA_PHANO RecName: Full=40S ribosomal protein S0 gi|160706754|gb|EAT86783.2| SNOG_05719 [Phaeosphaeria
  misc_feature (1)..(262): NCBI GI: 154320664 Blast Desc: 40S ribosomal protein S0 [Botryotinia fuckeliana B05.10] gi|229891581|sp|A6RMY2.1|RSSA_BOTFB RecName: Full=40S ribosomal protein S0 gi|150853493|gb|EDN28685.1| 40S ribosomal S0
  misc_feature (1)..(283): NCBI GI: 1039443 Blast Desc: ribosome-associated protein [Neurospora crassa]
  misc_feature (1)..(255): NCBI GI: 269969655 Blast Desc: RSSA_PARBD RecName: Full=40S ribosomal protein S0 gi|226288983|gb|EEH44495.1| 40S ribosomal protein S0 [Paracoccidioides brasiliensis Pb18]
  misc_feature: Useful for introducing or modulating the production of volatile compounds
MAPANLPACMAATSQDIEMLLAAQSHLGSKNLQVHMEPYLWKTRADGVNVINVGKTWEKIVLAARIIAAVDNPADICVISARPYGQRAVLKFAAHTGAVAIAGRFTPGSFTNYITRSFKEPRLIVVTDPRTDAQAIREASYVNIPVIALCDTDSPTEFVDAAIPTNNKGRHAIGCVWWMLAREVLRIRGTIASRDTPWDVMVDLYFYRDPEAEAEEKVEEEKLPGADEVGPAAIEGGALTGGDWEAAGSAPIAAGGNWDGADEWAGATAAAPTAEWGATEGKESQW

SEQ ID NO: 23266 - DNA, 1631 bp, Muscodor strobelii
  misc_feature: SGI EST ID NO. CUFF.54763.0
  misc_feature: Variant of the nucleotide sequence at SEQ ID NO 23264
ccccacctgcccaaactccgatcgcttaccctaggtcatgtaaaacagcccaccaaaattctggagctccaatattccctgggaatttcgtgaggcatcgcgaacttttcctccctcttcgcacatcacgaagtctcgcgctcaacacaacctcaccctccgcaccctcgcgcataccaatcttcaagatggcgcccgctaacctccccgcctgcatggctgcgaccagccaggacatcgagatgctcctcgccgcccagtctcacctcggctccaagaacttgcaggtgcacatggagccctacctctggaagacccgcgctgacggagtcaacgtcatcaacgtcggcaagacctgggagaagatcgttctcgccgcccgcatcatcgccgccgtcgacaaccccgccgacatctgcgtcatctcggcccgtccctacggtcagcgtgccgtcctcaagttcgccgcccacaccggtgccgtcgccattgccggtcgctttacccccggttccttcaccaactacatcacccgctcgttcaaggagccccgtctcatcgtcgtcaccgacccccgcaccgatgctcaggccatccgcgaggcttcctacgtcaacatccccgtcatcgccctctgcgacactgactcccccaccgagttcgttgatgctgctatccccaccaacaacaagggtcgccacgccattggctgcgtctggtggatgctcgcccgtgaggtcctccgcatccgtggcaccattgccagccgcgataccccctgggatgtcatggtcgatctctacttctaccgtgaccctgaggctgaggccgaggagaaggtcgaggaggagaagctccccggtgctgacgaggtcggccctgctgctatcgagggcggtgctctcactggtggcgattgggaagctgccggtagtgctcccattgccgccggtggcaactgggatggcgctgacgagtgggccggtgccaccgctgctgctcctaccgctgagtggggtgctactgagggcaaggagagccagtggtaggaacctggcgccgataatgcttctcagactcagcagtccgccagtatgaacgagcatcaggatggagagaccacagctcccgctgccgcccagcaacaagacaatgattggggtgacgataattggggcagcggcggcaacaacaacaacaccagtgttcagtggtaaatggttcgctacaaaacatggaagaatcggaattgcatcaggcctggggcgttgggtcaacttggacgtactaatgagggaaagataccagaattagcttgacgggttatgaaaaatgttgcttccatagccttgtcttctgaggacggggaatgccctgtatggccaaaggggttggcttaatcgtgaccccgcccaatgtctttaggtaccaaaaatgaagaattgccatgcctttatggcatctcagataagagcatataggcgatgctggcggctctcataacctctacggtaaaggatatgttagacgtagctgtatgcatcgcacccattgttgcttacatttcctaatgttcccaaaggattatctcaagatacttgctctgtagtgctgagtagtgttcagcaaaa

SEQ ID NO: 23267 - DNA, 951 bp, Muscodor strobelii
  misc_feature: SGI cDNA ID NO. 567913
  misc_feature: Reduced expression when VOC is produced
  misc_feature: Encodes the peptide sequence at SEQ ID NO 23268
atgcctcccaggataccaggcatccaacgcctgaatagtttttcattatgtctccaaccagccgtcatgccatcaacgccatctttgctccccatcacccaaaccgcatccatatcccagaaagaaaaacgtcgtctcgcgaagaaagatccctaccgatgggcacaaatgcaacagcgtaaaaacgcacatctcgaaatccgccaaggcatcgaagccgcccgcgagcaagcgaaaggcgatccagtccgtggcttcacaacccccttcgttgagtccttcgactcagccggtcaggcccccacctcaaaaccagcactagatatcaatgggcaaccggtcggagaaacgcatcccctgccgacctcacctcacgtgctgaaccatctcatccgcaaggaagagttcgacgacgccatcgagcaggcctacgccctgacgaagccaagctctatcgctgctgagtccgacccggagcttatgaagaaacagaccgaggaacacgaggcacagcatgctaaagtcgttgaggcgcttacgcgcatcacgcagttggataacggatctagcaaagacaagcgacatgccaacatcaggaggtgcatcgagacgtttggtagacataacaccgatctatctctaccagccaaggccctatcaaggggccaggagagagaagagaagcccgttcgcggaggcccggataccggaagcagtgaagtccagatcgctatcctgaccgctaagatccgggcgttagccaaccatttggagacggggcgaggatataaggacaaagtcggcaagcgagacttgagactcctgactcaccgacgccagaggctgatgcagtatatggagagaaaggagagaggaagtgcacgttggcaacacatggtcgagactttgggtctgagcgagtcgacttataagaaccagatcacattgtaa

SEQ ID NO: 23268 - protein, 316 aa, Muscodor strobelii
  misc_feature: SGI Peptide ID NO. 567913
  misc_feature (219)..(306): Pfam Id: PF00312 Pfam Desc: Ribosomal protein S15
  misc_feature (235)..(306): Pfam Id: PF00312 Pfam Desc: Ribosomal protein S15
  misc_feature (1)..(316): NCBI GI: 85082073 Blast Desc: NCU03394 [Neurospora crassa OR74A] gi|18376366|emb|CAD21143.1| related to ribosomal protein S15 precursor (mitochondrial) [Neurospora crassa] conserved crassa
  misc_feature (15)..(316): NCBI GI: 116199945 Blast Desc: CHGG_08128 [Chaetomium globosum CBS 148.51] gi|88179407|gb|EAQ86875.1| CHGG_08128 [Chaetomium globosum CBS 148.51]
  misc_feature (1)..(314): NCBI GI: 171690136 Blast Desc: protein product [Podospora anserina] gi|170945016|emb|CAP71127.1| protein product [Podospora anserina]
  misc_feature (1)..(316): NCBI GI: 34500108 Blast Desc: ribosomal protein S15 precursor-like protein [Epichloe festucae]
  misc_feature (1)..(316): NCBI GI: 256729070 Blast Desc: NECHADRAFT_79976 [Nectria haematococca mpVI 77-13-4]
  misc_feature (1)..(316): NCBI GI: 46138783 Blast Desc: FG10906.1 [Gibberella zeae PH-1]
  misc_feature (28)..(316): NCBI GI: 39978243 Blast Desc: MGG_07006 [Magnaporthe grisea 70-15] gi|145013411|gb|EDJ98052.1| MGG_07006 [Magnaporthe grisea 70-15]
  misc_feature (1)..(316): NCBI GI: 169605387 Blast Desc: SNOG_05718 [Phaeosphaeria nodorum SN15] gi|111065662|gb|EAT86782.1| SNOG_05718 [Phaeosphaeria nodorum SN15]
  misc_feature (1)..(316): NCBI GI: 240108398 Blast Desc: ribosomal protein S15, [Coccidioides posadasii C735 delta SOWgp]
  misc_feature (1)..(316): NCBI GI: 189192639 Blast Desc: conserved [Pyrenophora tritici-repentis Pt-1C-BFP] gi|187978222|gb|EDU44848.1| conserved [Pyrenophora tritici-repentis Pt-1C-BFP]
  misc_feature: Useful for introducing or modulating the production of volatile compounds
MPPRIPGIQRLNSFSLCLQPAVMPSTPSLLPITQTASISQKEKRRLAKKDPYRWAQMQQRKNAHLEIRQGIEAAREQAKGDPVRGFTTPFVESFDSAGQAPTSKPALDINGQPVGETHPLPTSPHVLNHLIRKEEFDDAIEQAYALTKPSSIAAESDPELMKKQTEEHEAQHAKVVEALTRITQLDNGSSKDKRHANIRRCIETFGRHNTDLSLPAKALSRGQEREEKPVRGGPDTGSSEVQIAILTAKIRALANHLETGRGYKDKVGKRDLRLLTHRRQRLMQYMERKERGSARWQHMVETLGLSESTYKNQITL

SEQ ID NO: 23269 - DNA, 2774 bp, Muscodor strobelii
  misc_feature: SGI EST ID NO. CUFF.55076.0
  misc_feature: Variant of the nucleotide sequence at SEQ ID NO 23267
gaaaaagttgagatatcgttggtgtttgcacgtgtacgacatttgcgagccatcgcatctcaacgtcacatccgccatgcctcccaggataccaggcatccaacgcctgaatagtttttcattatgtctccaaccagccgtcatgccatcaacgccatctttgctccccatcacccaaaccgcatccatatcccagaaagaaaaacgtcgtctcgcgaagaaagatccctaccgatgggcacaaatgcaacagcgtaaaaacgcacatctcgaaatccgccaaggcatcgaagccgcccgcgagcaagcgaaaggcgatccagtccgtggcttcacaacccccttcgttgagtccttcgactcagccggtcaggcccccacctcaaaaccagcactagatatcaatgggcaaccggtcggagaaacgcatcccctgccgacctcacctcacgtgctgaaccatctcatccgcaaggaagagttcgacgacgccatcgagcaggcctacgccctgacgaagccaagctctatcgctgctgagtccgacccggagcttatgaagaaacagaccgaggaacacgaggcacagcatgctaaagtcgttgaggcgcttacgcgcatcacgcagttggataacggatctagcaaagacaagcgacatgccaacatcaggaggtgcatcgagacgtttggtagacataacaccgatctatctctaccagccaaggccctatcaaggggccaggagagagaagagaagcccgttcgcggaggcccggataccggaagcagtgaagtccagatcgctatcctgaccgctaagatccgggcgttagccaaccatttggagacggggcgaggatataaggacaaagtcggcaagcgagacttgagactcctgactcaccgacgccagaggctgatgcagtatatggagagaaaggagagaggaagtgcacgttggcaacacatggtcgagactttgggtctgagcgagtcgacttataagaaccagatcacattgtaagagttggatagagggacgggaggctgtatgataggtgattccaaaaaacacatgtacctataatgccgtatactatgtaatgtacaaacacaacgccggcagtttgaacgagccaccgctctgcttgccttccatcatcatgtcttcttccatgattgtcgtcgtgtgatgtggatgaagcttggctctcgtcactttactcttcccccgtcattagtatcttcttcgcattagtgctacaaaacaagcgaaatcaaaagcagtccccaaggcccggtaaacctattagaatacactgatgtaattgccgatcctttccttctgattctgtgctatgcactcggcaatccatgtgatgttgcggatttcctgtctcaaaattagtctctagtttttctcaaaaacaatcgcaatcccaagggaaatcctggaagaactcacctgttctctcagcttcacccaagcatagacgatagcataggtgaactgcctcgtgaaggcattcttggagatctccatctccttctgatagaacatgtcctccagacttctctcattaccgcccgaaccgccagccatattgcccggtcctgagggtccgccgcccaagcccgcagcgtcgaagaaggacttgaagtcagacacaccgtcgacggccaaacgcacaccttcaaagtcatctgccctagagagcatgagggtgccttcggggtacaagcgcccgaagctcgggtacagcttcttgcggtcagccttactgagctcggtgccgaaggagttgagcgtgatgttgatggcgcggcggtcagcctcgaactcgaggatctcggacatgacttcggcggtgggtgtaccggccatgtcggggtgggtgttgacgaagttgtggaagtcctcgaggtagttcttgtacagcgtgttccgcacgatttcaatgttcagctcgtcgagatcttgatggctgagagagcccttgaagtatggtgcgaggggtgtctcgatgagcacgctgttgtagagctcctcgatgttggttgcgacacagaggacgggcatcgtctcgaaccagcctagggggtgacatctttcgagcagctcacgggtgtcccgttcgtggagtgtgccggtgatgaggagagcgacgttgtcgatcatataaccgtacgtgaggtagtcgaggaactgcgctagcgagccgacggcattggcgcggacgtatctgaactcggagacgagcttgtctgtggttttggcggcgagactggatgtggatggattaggagggagagaggcgaggaagtcgccgtacgcggggccgagctggagcttgagatctggttgaggttagatactctattcgagcggcgatgtccagtactgtcgatgtctgcataccatctatggtctcgcactgggtgaggttagagtagttggagcccgtgagcaaaccgtttcgatagccccggacgataccctcgatgtacctattaacatggacttagcttgtgatgtctgcaagaatataggactgatgagctcacccattatttacgttgaagaaaagaccctccatgttgactgacgtgcgttgatggatgaagggagactgctttacgagggtgtggtggatgcgggctgcatcgacagcaatatgaattccagtattgcaggctgcagctatgggctgaacggctatgatagcttcgacttggagcgctgcagtctgcgagtggacggtcagctttcg

SEQ ID NO: 23270 - DNA, 1098 bp, Muscodor strobelii
  misc_feature: SGI cDNA ID NO. 567914
  misc_feature: Encodes the peptide sequence at SEQ ID NO 23271
atggagggtcttttcttcaacgtaaataatgggtacatcgagggtatcgtccggggctatcgaaacggtttgctcacgggctccaactactctaacctcacccagtgcgagaccatagatgatctcaagctccagctcggccccgcgtacggcgacttcctcgcctctctccctcctaatccatccacatccagtctcgccgccaaaaccacagacaagctcgtctccgagttcagatacgtccgcgccaatgccgtcggctcgctagcgcagttcctcgactacctcacgtacggttatatgatcgacaacgtcgctctcctcatcaccggcacactccacgaacgggacacccgtgagctgctcgaaagatgtcaccccctaggctggttcgagacgatgcccgtcctctgtgtcgcaaccaacatcgaggagctctacaacagcgtgctcatcgagacacccctcgcaccatacttcaagggctctctcagccatcaagatctcgacgagctgaacattgaaatcgtgcggaacacgctgtacaagaactacctcgaggacttccacaacttcgtcaacacccaccccgacatggccggtacacccaccgccgaagtcatgtccgagatcctcgagttcgaggctgaccgccgcgccatcaacatcacgctcaactccttcggcaccgagctcagtaaggctgaccgcaagaagctgtacccgagcttcgggcgcttgtaccccgaaggcaccctcatgctctctagggcagatgactttgaaggtgtgcgtttggccgtcgacggtgtgtctgacttcaagtccttcttcgacgctgcgggcttgggcggcggaccctcaggaccgggcaatatggctggcggttcgggcggtaatgagagaagtctggaggacatgttctatcagaaggagatggagatctccaagaatgccttcacgaggcagttcacctatgctatcgtctatgcttgggtgaagctgagagaacaggaaatccgcaacatcacatggattgccgagtgcatagcacagaatcagaaggaaaggatcggcaattacatcagtgtattctaa

SEQ ID NO: 23271 - protein, 365 aa, Muscodor strobelii
  misc_feature: SGI Peptide ID NO. 567914
  misc_feature (12)..(363): Pfam Id: PF01992 Pfam Desc: ATP synthase (C/AC39) subunit
  misc_feature (1)..(365): NCBI GI: 156040393 Blast Desc: vacuolar ATP synthase subunit d1 [Sclerotinia sclerotiorum 1980] gi|154696269|gb|EDN96007.1| vacuolar ATP synthase subunit d1 [Sclerotinia sclerotiorum 1980]
  misc_feature (1)..(365): NCBI GI: 154320668 Blast Desc: vacuolar ATP synthase subunit d [Botryotinia fuckeliana B05.10] gi|150853495|gb|EDN28687.1| vacuolar ATP synthase subunit d [Botryotinia fuckeliana B05.10]
  misc_feature (1)..(365): NCBI GI: 261356905 Blast Desc: vacuolar ATP synthase subunit d [Verticillium albo-atrum VaMs.102]
  misc_feature (1)..(365): NCBI GI: 39978245 Blast Desc: vacuolar ATP synthase subunit d [Magnaporthe grisea 70-15] gi|145013410|gb|EDJ98051.1| vacuolar ATP synthase subunit d [Magnaporthe grisea 70-15]
  misc_feature (1)..(365): NCBI GI: 46138785 Blast Desc: VA0D_NEUCR Vacuolar ATP synthase subunit d (V-ATPase d subunit) (Vacuolar proton pump d subunit) (V-ATPase 41 kDa subunit) [Gibberella zeae PH-1]
  misc_feature (1)..(365): NCBI GI: 85082077 Blast Desc: vacuolar ATP synthase subunit d [Neurospora crassa OR74A] gi|1718099|sp|P53659.1|VA0D_NEUCR RecName: Full=V-type proton ATPase subunit d; Short=V-ATPase subunit d; AltName: pump
  misc_feature (1)..(365): NCBI GI: 256728887 Blast Desc: [Nectria haematococca mpVI 77-13-4]
  misc_feature (1)..(365): NCBI GI: 171690134 Blast Desc: protein product [Podospora anserina] gi|170945015|emb|CAP71126.1| protein product [Podospora anserina]
  misc_feature (1)..(365): NCBI GI: 169597411 Blast Desc: SNOG_01491 [Phaeosphaeria nodorum SN15] gi|111070020|gb|EAT91140.1| SNOG_01491 [Phaeosphaeria nodorum SN15]
  misc_feature (1)..(365): NCBI GI: 189193007 Blast Desc: vacuolar ATP synthase subunit D [Pyrenophora tritici-repentis Pt-1C-BFP] gi|187978406|gb|EDU45032.1| vacuolar ATP synthase subunit D [Pyrenophora tritici-repentis Pt-1C-BFP]
MEGLFFNVNNGYIEGIVRGYRNGLLTGSNYSNLTQCETIDDLKLQLGPAYGDFLASLPPNPSTSSLAAKTTDKLVSEFRYVRANAVGSLAQFLDYLTYGYMIDNVALLITGTLHERDTRELLERCHPLGWFETMPVLCVATNIEELYNSVLIETPLAPYFKGSLSHQDLDELNIEIVRNTLYKNYLEDFHNFVNTHPDMAGTPTAEVMSEILEFEADRRAINITLNSFGTELSKADRKKLYPSFGRLYPEGTLMLSRADDFEGVRLAVDGVSDFKSFFDAAGLGGGPSGPGNMAGGSGGNERSLEDMFYQKEMEISKNAFTRQFTYAIVYAWVKLREQEIRNITWIAECIAQNQKERIGNYISVF

SEQ ID NO: 23272 - DNA, 2648 bp, Muscodor strobelii
  misc_feature: SGI EST ID NO. CUFF.55077.1
  misc_feature: Variant of the nucleotide sequence at SEQ ID NO 23270
cgaaagctgaccgtccactcgcagactgcagcgctccaagtcgaagctatcatagccgttcagcccatagctgcagcctgcaatactggaattcatattgctgtcgatgcagcccgcatccaccacaccctcgtaaagcagtctcccttcatccatcaacgcacgtcagtcaacatggagggtcttttcttcaacgtaaataatgggtacatcgagggtatcgtccggggctatcgaaacggtttgctcacgggctccaactactctaacctcacccagtgcgagaccatagatgatctcaagctccagctcggccccgcgtacggcgacttcctcgcctctctccctcctaatccatccacatccagtctcgccgccaaaaccacagacaagctcgtctccgagttcagatacgtccgcgccaatgccgtcggctcgctagcgcagttcctcgactacctcacgtacggttatatgatcgacaacgtcgctctcctcatcaccggcacactccacgaacgggacacccgtgagctgctcgaaagatgtcaccccctaggctggttcgagacgatgcccgtcctctgtgtcgcaaccaacatcgaggagctctacaacagcgtgctcatcgagacacccctcgcaccatacttcaagggctctctcagccatcaagatctcgacgagctgaacattgaaatcgtgcggaacacgctgtacaagaactacctcgaggacttccacaacttcgtcaacacccaccccgacatggccggtacacccaccgccgaagtcatgtccgagatcctcgagttcgaggctgaccgccgcgccatcaacatcacgctcaactccttcggcaccgagctcagtaaggctgaccgcaagaagctgtacccgagcttcgggcgcttgtaccccgaaggcaccctcatgctctctagggcagatgactttgaaggtgtgcgtttggccgtcgacggtgtgtctgacttcaagtccttcttcgacgctgcgggcttgggcggcggaccctcaggaccgggcaatatggctggcggttcgggcggtaatgagagaagtctggaggacatgttctatcagaaggagatggagatctccaagaatgccttcacgaggcagttcacctatgctatcgtctatgcttgggtgaagctgagagaacaggaaatccgcaacatcacatggattgccgagtgcatagcacagaatcagaaggaaaggatcggcaattacatcagtgtattctaataggtttaccgggccttggggactgcttttgatttcgcttgttttgtagcactaatgcgaagaagatactaatgacgggggaagagtaaagtgacgagagccaagcttcatccacatcacacgacgacaatcatggaagaagacatgatgatggaaggcaagcagagcggtggctcgttcaaactgccggcgttgtgtttgtacattacatagtatacggcattataggtacatgtgttttttggaatcacctatcatacagcctcccgtccctctatccaactcttacaatgtgatctggttcttataagtcgactcgctcagacccaaagtctcgaccatgtgttgccaacgtgcacttcctctctcctttctctccatatactgcatcagcctctggcgtcggtgagtcaggagtctcaagtctcgcttgccgactttgtccttatatcctcgccccgtctccaaatggttggctaacgcccggatcttagcggtcaggatagcgatctggacttcactgcttccggtatccgggcctccgcgaacgggcttctcttctctctcctggccccttgatagggccttggctggtagagatagatcggtgttatgtctaccaaacgtctcgatgcacctcctgatgttggcatgtcgcttgtctttgctagatccgttatccaactgcgtgatgcgcgtaagcgcctcaacgactttagcatgctgtgcctcgtgttcctcggtctgtttcttcataagctccgggtcggactcagcagcgatagagcttggcttcgtcagggcgtaggcctgctcgatggcgtcgtcgaactcttccttgcggatgagatggttcagcacgtgaggtgaggtcggcaggggatgcgtttctccgaccggttgcccattgatatctagtgctggttttgaggtgggggcctgaccggctgagtcgaaggactcaacgaagggggttgtgaagccacggactggatcgcctttcgcttgctcgcgggcggcttcgatgccttggcggatttcgagatgtgcgtttttacgctgttgcatttgtgcccatcggtagggatctttcttcgcgagacgacgtttttctttctgggatatggatgcggtttgggtgatggggagcaaagatggcgttgatggcatgacggctggttggagacatactggtttcgcgacgcttgttagaggatatggcgattgggaatgctagatagatgttattactcacatgaaaaactattcaggcgttggatgcctggtatcctgggaggcatggcggatgtgacgttgagatgcgatggctcgcaaatgtcgtacacgtgcaaacaccaacgatatctcaacttttt

SEQ ID NO: 23273 - DNA, 2070 bp, Muscodor strobelii
  misc_feature: SGI cDNA ID NO. 567915
  misc_feature: Reduced expression when VOC is produced
  misc_feature: Encodes the peptide sequence at SEQ ID NO 23274
atgccgctcttcgttcttgccgaaacgcctgcgggctacggcctgttcaagtccaaggacaagaagctgctctctcgcgatgatgtcgccgagcagctgtcgagtgccgaggccatcaactccatgctgtctctcaagaagatggtcaagttcgaagatgccgcccaggccctaggcgaatactccgccttgactgagggcaaagtcacgcccatgattcagcaactcctcgacgacataaaggaagagaagaaggcttccctggccgtagtcgaccccaaactcggtgccgccattagcgcccttccccagcttcagatcacccccgtctccgactcctctaccaacgatctcttccgcgccgtcaagacgtacctgcccgaactcttccccgagcttgaccccgattatctcggcaacatggccctcgctctgtcccactctatctcccgccacaagctcaagttcagcccggacaagatcgacgtcatggttgttcaggccatcaaacttctcgacgatctcgacaaagagttaaacaaccttgctatgagagtcaaggagtggtatggctggcactttcccgagatggaccgaattcttaacgataatttggcttatgctcgtgtgatcatggcgatgggtatgcgagaagccgctgcacaaaccgatctttctgagattctccccgaagatctcgagacccgactcaaggccgctgccgaggtcagcatgggtactgaaatcggtgagatcgacctcgagaacatcaagcttctcgccgaccaagtcatcagcttcaccgagtatcgacaacagctctcacaatacttgagctcgcgcatgaaggcgcttgctcctaacaccaccgagatcctcggagagcttgttggtgctcgtctcatcgctcacaccggatccctcatgaagctcgccaaaagccccggcagtaccattcaaattttgggcgcagagaaggctcttttccgagcgttgaagacaaaacacgacacacccaagtatggtctgatttaccactcatcattagttggtcaagccactggtcggaataagggcaagattgcccgcatgctgtctgcgaaagccgcattgtgccttcgtgtcgatgcgctgtcagagctcagcagcgaaggtatcgatggtgctgacattgccattgacgacgaagatagagccgagatgggtcttagattacgaatcagtcttgaggacaggctgcgaaaactggaagggaagcctctaatttcaaagggttccaagatcgctcccaacggtgccgctccttctaaattcgaggtcaagccaagccggaattacaacgccgacgcggatgcaccctcgtctgcaaagaaggcttccaagccactaattcaagaggttgaagatgagtcaatggcagatggcagcgacgatgaatcggatgatcaggattctgatactgaaatgaacggcacggaaaatggtaaagccactctcacatcaaagacgcttacgtcacagtttccggatgagcctactgcttcaagtgaaagcgggactgcacccaaatctaaaaaggagcgaagtcgactctccgtaaaaggtctcattcgtcgaaaagctacgcaagcgcgcggaaaactcagcaaacatctacttcaaaaggctatagctaacaattacgtagccaagcaaaaagctaaagctaccaagaaggccgacaagaaggcagccaagaaagctgccaaagaaaccgcaacacctgcgactcctgcaacccctggtactaaattaacagaggcagattatgttcgtatggcagaggaggctggcatctctgtcaaaaaattcaagagaaaatacgagagaggcgacgtcaatgtcaacgctgacggtacaccccaagtgataagtaagaaggacattaaaaagatgaagaaagaggaggctaaggccgccgctgctgctgaagctgaagcagaggaaccatccaagaagaagcggaagcacaccgacgatgatggcgagaaaaagagcaagaagaaatctaaaaaggagaagtcctcttag

SEQ ID NO: 23274 - protein, 689 aa, Muscodor strobelii
  misc_feature: SGI Peptide ID NO. 567915
  misc_feature (256)..(419): Pfam Id: PF01798 Pfam Desc: snoRNA binding domain
  misc_feature (3)..(67): Pfam Id: PF08156 Pfam Desc: NOP5NT (NUC127) domain
  misc_feature (164)..(216): Pfam Id: PF08060 Pfam Desc: NOSIC (NUC001) domain
  misc_feature (2)..(467): NCBI GI: 154320670 Blast Desc: nucleolar protein [Botryotinia fuckeliana B05.10] gi|206558267|sp|A6RMY5.1|NOP58_BOTFB RecName: Full=Nucleolar protein 58 gi|150853496|gb|EDN28688.1| nucleolar protein B05.10]
  misc_feature (2)..(467): NCBI GI: 156040395 Blast Desc: SS1G_12214 [Sclerotinia sclerotiorum 1980] gi|206557754|sp|A7F2R6.1|NOP58_SCLS1 RecName: Full=Nucleolar protein 58 gi|154696270|gb|EDN96008.1| SS1G_12214 [Sclerotinia
  misc_feature (1)..(482): NCBI GI: 85082081 Blast Desc: nucleolar protein NOP58 [Neurospora crassa OR74A] gi|74622643|sp|Q8X066.1|NOP58_NEUCR RecName: Full=Nucleolar protein 58 gi|18376368|emb|CAD21145.1| nucleolar protein NOP58
  misc_feature (1)..(468): NCBI GI: 261356906 Blast Desc: nucleolar protein NOP58 [Verticillium albo-atrum VaMs.102]
  misc_feature (1)..(495): NCBI GI: 145605593 Blast Desc: MGG_07008 [Magnaporthe grisea 70-15] gi|145013409|gb|EDJ98050.1| MGG_07008 [Magnaporthe grisea 70-15]
  misc_feature (1)..(470): NCBI GI: 171690132 Blast Desc: protein product [Podospora anserina] gi|170945014|emb|CAP71125.1| protein product [Podospora anserina]
  misc_feature (1)..(492): NCBI GI: 119490937 Blast Desc: nucleolar protein nop5 [Neosartorya fischeri NRRL 181] gi|206558088|sp|A1D688.1|NOP58_NEOFI RecName: Full=Nucleolar protein 58 gi|119411289|gb|EAW21232.1| nucleolar protein nop5
  misc_feature (1)..(490): NCBI GI: 34500106 Blast Desc: nucleolar protein NOP58-like protein [Epichloe festucae]
  misc_feature (1)..(492): NCBI GI: 70999121 Blast Desc: nucleolar protein nop5 [Aspergillus fumigatus Af293] gi|74674590|sp|Q4WYK9.1|NOP58_ASPFU RecName: Full=Nucleolar protein 58 gi|66851919|gb|EAL92244.1| nucleolar protein nop5 nop5
  misc_feature (1)..(470): NCBI GI: 46138787 Blast Desc: FG10908.1 [Gibberella zeae PH-1]
  misc_feature: Useful for introducing or modulating the production of volatile compounds
MPLFVLAETPAGYGLFKSKDKKLLSRDDVAEQLSSAEAINSMLSLKKMVKFEDAAQALGEYSALTEGKVTPMIQQLLDDIKEEKKASLAVVDPKLGAAISALPQLQITPVSDSSTNDLFRAVKTYLPELFPELDPDYLGNMALALSHSISRHKLKFSPDKIDVMVVQAIKLLDDLDKELNNLAMRVKEWYGWHFPEMDRILNDNLAYARVIMAMGMREAAAQTDLSEILPEDLETRLKAAAEVSMGTEIGEIDLENIKLLADQVISFTEYRQQLSQYLSSRMKALAPNTTEILGELVGARLIAHTGSLMKLAKSPGSTIQILGAEKALFRALKTKHDTPKYGLIYHSSLVGQATGRNKGKIARMLSAKAALCLRVDALSELSSEGIDGADIAIDDEDRAEMGLRLRISLEDRLRKLEGKPLISKGSKIAPNGAAPSKFEVKPSRNYNADADAPSSAKKASKPLIQEVEDESMADGSDDESDDQDSDTEMNGTENGKATLTSKTLTSQFPDEPTASSESGTAPKSKKERSRLSVKGLIRRKATQARGKLSKHLLQKAIANNYVAKQKAKATKKADKKAAKKAAKETATPATPATPGTKLTEADYVRMAEEAGISVKKFKRKYERGDVNVNADGTPQVISKKDIKKMKKEEAKAAAAAEAEAEEPSKKKRKHTDDDGEKKSKKKSKKEKSS

SEQ ID NO: 23275 - DNA, 2333 bp, Muscodor strobelii
  misc_feature: SGI EST ID NO. CUFF.54765.0
  misc_feature: Variant of the nucleotide sequence at SEQ ID NO 23273
caaaaaagtgtcgtcgcatgaagctctaaatcgtagctctttccctcccaaccacgacccaattggcagagcgaccacccagccaacaccgacggaagctgtgcaacgactacgctcgactccgtgattgcactctgtcgccatgccgctcttcgttcttgccgaaacgcctgcgggctacggcctgttcaagtccaaggacaagaagctgctctctcgcgatgatgtcgccgagcagctgtcgagtgccgaggccatcaactccatgctgtctctcaagaagatggtcaagttcgaagatgccgcccaggccctaggcgaatactccgccttgactgagggcaaagtcacgcccatgattcagcaactcctcgacgacataaaggaagagaagaaggcttccctggccgtagtcgaccccaaactcggtgccgccattagcgcccttccccagcttcagatcacccccgtctccgactcctctaccaacgatctcttccgcgccgtcaagacgtacctgcccgaactcttccccgagcttgaccccgattatctcggcaacatggccctcgctctgtcccactctatctcccgccacaagctcaagttcagcccggacaagatcgacgtcatggttgttcaggccatcaaacttctcgacgatctcgacaaagagttaaacaaccttgctatgagagtcaaggagtggtatggctggcactttcccgagatggaccgaattcttaacgataatttggcttatgctcgtgtgatcatggcgatgggtatgcgagaagccgctgcacaaaccgatctttctgagattctccccgaagatctcgagacccgactcaaggccgctgccgaggtcagcatgggtactgaaatcggtgagatcgacctcgagaacatcaagcttctcgccgaccaagtcatcagcttcaccgagtatcgacaacagctctcacaatacttgagctcgcgcatgaaggcgcttgctcctaacaccaccgagatcctcggagagcttgttggtgctcgtctcatcgctcacaccggatccctcatgaagctcgccaaaagccccggcagtaccattcaaattttgggcgcagagaaggctcttttccgagcgttgaagacaaaacacgacacacccaagtatggtctgatttaccactcatcattagttggtcaagccactggtcggaataagggcaagattgcccgcatgctgtctgcgaaagccgcattgtgccttcgtgtcgatgcgctgtcagagctcagcagcgaaggtatcgatggtgctgacattgccattgacgacgaagatagagccgagatgggtcttagattacgaatcagtcttgaggacaggctgcgaaaactggaagggaagcctctaatttcaaagggttccaagatcgctcccaacggtgccgctccttctaaattcgaggtcaagccaagccggaattacaacgccgacgcggatgcaccctcgtctgcaaagaaggcttccaagccactaattcaagaggttgaagatgagtcaatggcagatggcagcgacgatgaatcggatgatcaggattctgatactgaaatgaacggcacggaaaatgccaagcaaaaagctaaagctaccaagaaggccgacaagaaggcagccaagaaagctgccaaagaaaccgcaacacctgcgactcctgcaacccctggtactaaattaacagaggcagattatgttcgtatggcagaggaggctggcatctctgtcaaaaaattcaagagaaaatacgagagaggcgacgtcaatgtcaacgctgacggtacaccccaagtgataagtaagaaggacattaaaaagatgaagaaagaggaggctaaggccgccgctgctgctgaagctgaagcagaggaaccatccaagaagaagcggaagcacaccgacgatgatggcgagaaaaagagcaagaagaaatctaaaaaggagaagtcctcttagtcttcatccatttctctcttgctttttgtacatcacgcgaaaatgttctgttcctgacattggtgacggcgttccggaaggcataccaacatggtttcggtgtgggagttcaaatgttccatcttacttcaagctctttgagcggactaagtccttgaaagtctgggttgaatgttgataggatacgtagtgaccgagcattgtcaactaccccatgttcaagctatatcacaataatcaacatatctaatctactacaatgatgtctgccatgtcacatgatttgttacttgctcttcagattgatgtgacgagcatatataag

SEQ ID NO: 23276 - DNA, 1866 bp, Muscodor strobelii
  misc_feature: SGI cDNA ID NO. 567916
  misc_feature: Reduced expression when VOC is produced
  misc_feature: Encodes the peptide sequence at SEQ ID NO 23277
atgccgctcttcgttcttgccgaaacgcctgcgggctacggcctgttcaagtccaaggacaagaagctgctctctcgcgatgatgtcgccgagcagctgtcgagtgccgaggccatcaactccatgctgtctctcaagaagatggtcaagttcgaagatgccgcccaggccctaggcgaatactccgccttgactgagggcaaagtcacgcccatgattcagcaactcctcgacgacataaaggaagagaagaaggcttccctggccgtagtcgaccccaaactcggtgccgccattagcgcccttccccagcttcagatcacccccgtctccgactcctctaccaacgatctcttccgcgccgtcaagacgtacctgcccgaactcttccccgagcttgaccccgattatctcggcaacatggccctcgctctgtcccactctatctcccgccacaagctcaagttcagcccggacaagatcgacgtcatggttgttcaggccatcaaacttctcgacgatctcgacaaagagttaaacaaccttgctatgagagtcaaggagtggtatggctggcactttcccgagatggaccgaattcttaacgataatttggcttatgctcgtgtgatcatggcgatgggtatgcgagaagccgctgcacaaaccgatctttctgagattctccccgaagatctcgagacccgactcaaggccgctgccgaggtcagcatgggtactgaaatcggtgagatcgacctcgagaacatcaagcttctcgccgaccaagtcatcagcttcaccgagtatcgacaacagctctcacaatacttgagctcgcgcatgaaggcgcttgctcctaacaccaccgagatcctcggagagcttgttggtgctcgtctcatcgctcacaccggatccctcatgaagctcgccaaaagccccggcagtaccattcaaattttgggcgcagagaaggctcttttccgagcgttgaagacaaaacacgacacacccaagtatggtctgatttaccactcatcattagttggtcaagccactggtcggaataagggcaagattgcccgcatgctgtctgcgaaagccgcattgtgccttcgtgtcgatgcgctgtcagagctcagcagcgaaggtatcgatggtgctgacattgccattgacgacgaagatagagccgagatgggtcttagattacgaatcagtcttgaggacaggctgcgaaaactggaagggaagcctctaatttcaaagggttccaagatcgctcccaacggtgccgctccttctaaattcgaggtcaagccaagccggaattacaacgccgacgcggatgcaccctcgtctgcaaagaaggcttccaagccactaattcaagaggttgaagatgagtcaatggcagatggcagcgacgatgaatcggatgatcaggattctgatactgaaatgaacggcacggaaaatgccaagcaaaaagctaaagctaccaagaaggccgacaagaaggcagccaagaaagctgccaaagaaaccgcaacacctgcgactcctgcaacccctggtactaaattaacagaggcagattatgttcgtatggcagaggaggctggcatctctgtcaaaaaattcaagagaaaatacgagagaggcgacgtcaatgtcaacgctgacggtacaccccaagtgataagtaagaaggacattaaaaagatgaagaaagaggaggctaaggccgccgctgctgctgaagctgaagcagaggaaccatccaagaagaagcggaagcacaccgacgatgatggcgagaaaaagagcaagaagaaatctaaaaaggagaagtcctcttag

SEQ ID NO: 23277 - protein, 621 aa, Muscodor strobelii
  misc_feature: SGI Peptide ID NO. 567916
  misc_feature (256)..(419): Pfam Id: PF01798 Pfam Desc: snoRNA binding domain
  misc_feature (3)..(67): Pfam Id: PF08156 Pfam Desc: NOP5NT (NUC127) domain
  misc_feature (164)..(216): Pfam Id: PF08060 Pfam Desc: NOSIC (NUC001) domain
  misc_feature (1)..(605): NCBI GI: 34500106 Blast Desc: nucleolar protein NOP58-like protein [Epichloe festucae]
  misc_feature (1)..(606): NCBI GI: 46138787 Blast Desc: FG10908.1 [Gibberella zeae PH-1]
  misc_feature (1)..(608): NCBI GI: 256729069 Blast Desc: [Nectria haematococca mpVI 77-13-4]
  misc_feature (1)..(608): NCBI GI: 145605593 Blast Desc: MGG_07008 [Magnaporthe grisea 70-15] gi|145013409|gb|EDJ98050.1| MGG_07008 [Magnaporthe grisea 70-15]
  misc_feature (1)..(575): NCBI GI: 85082081 Blast Desc: nucleolar protein NOP58 [Neurospora crassa OR74A] gi|74622643|sp|Q8X066.1|NOP58_NEUCR RecName: Full=Nucleolar protein 58 gi|18376368|emb|CAD21145.1| nucleolar protein NOP58
  misc_feature (2)..(467): NCBI GI: 154320670 Blast Desc: nucleolar protein [Botryotinia fuckeliana B05.10] gi|206558267|sp|A6RMY5.1|NOP58_BOTFB RecName: Full=Nucleolar protein 58 gi|150853496|gb|EDN28688.1| nucleolar protein B05.10]
  misc_feature (1)..(569): NCBI GI: 70999121 Blast Desc: nucleolar protein nop5 [Aspergillus fumigatus Af293] gi|74674590|sp|Q4WYK9.1|NOP58_ASPFU RecName: Full=Nucleolar protein 58 gi|66851919|gb|EAL92244.1| nucleolar protein nop5 nop5
  misc_feature (1)..(566): NCBI GI: 119490937 Blast Desc: nucleolar protein nop5 [Neosartorya fischeri NRRL 181] gi|206558088|sp|A1D688.1|NOP58_NEOFI RecName: Full=Nucleolar protein 58 gi|119411289|gb|EAW21232.1| nucleolar protein nop5
  misc_feature (1)..(604): NCBI GI: 261356906 Blast Desc: nucleolar protein NOP58 [Verticillium albo-atrum VaMs.102]
  misc_feature (1)..(608): NCBI GI: 121706114 Blast Desc: nucleolar protein nop5 [Aspergillus clavatus NRRL 1] gi|206558083|sp|A1CL70.1|NOP58_ASPCL RecName: Full=Nucleolar protein 58 gi|119399466|gb|EAW09894.1| nucleolar protein nop5 1]
  misc_feature: Useful for introducing or modulating the production of volatile compounds
MPLFVLAETPAGYGLFKSKDKKLLSRDDVAEQLSSAEAINSMLSLKKMVKFEDAAQALGEYSALTEGKVTPMIQQLLDDIKEEKKASLAVVDPKLGAAISALPQLQITPVSDSSTNDLFRAVKTYLPELFPELDPDYLGNMALALSHSISRHKLKFSPDKIDVMVVQAIKLLDDLDKELNNLAMRVKEWYGWHFPEMDRILNDNLAYARVIMAMGMREAAAQTDLSEILPEDLETRLKAAAEVSMGTEIGEIDLENIKLLADQVISFTEYRQQLSQYLSSRMKALAPNTTEILGELVGARLIAHTGSLMKLAKSPGSTIQILGAEKALFRALKTKHDTPKYGLIYHSSLVGQATGRNKGKIARMLSAKAALCLRVDALSELSSEGIDGADIAIDDEDRAEMGLRLRISLEDRLRKLEGKPLISKGSKIAPNGAAPSKFEVKPSRNYNADADAPSSAKKASKPLIQEVEDESMADGSDDESDDQDSDTEMNGTENAKQKAKATKKADKKAAKKAAKETATPATPATPGTKLTEADYVRMAEEAGISVKKFKRKYERGDVNVNADGTPQVISKKDIKKMKKEEAKAAAAAEAEAEEPSKKKRKHTDDDGEKKSKKKSKKEKSS

SEQ ID NO: 23278 - DNA, 2333 bp, Muscodor strobelii; identical to SEQ ID NO: 23275
  misc_feature: SGI EST ID NO. CUFF.54765.0
  misc_feature: Variant of the nucleotide sequence at SEQ ID NO 23276

SEQ ID NO: 23279 - DNA, 1527 bp, Muscodor strobelii
  misc_feature: SGI cDNA ID NO. 567917
  misc_feature: Reduced expression when VOC is produced
  misc_feature: Encodes the peptide sequence at SEQ ID NO 23280
atgtatcggggatccagcagagatgagttcagcggcagaggtggtgagcaacaaccaccagcacaagaaggttacatgcgatttcaagactcgacaatatttcaagcgtttcaaggacgacaagacctccgggcacaatcaagatttggacaacaacaaggaaatcagagacaaggccgatttggccttggtcttggccaatctagacaatcgtcaaatgacttacttggtgctggcttgctatttcgtgctgaaggtgcgatagtcaggggtgtggcttcgggcattggacttgcgtctgaggctatacatcggcgtaaagagaagaacgcccagagggacggcgatacagctttgaactcggaaaatgacgagaatctttaccgagatgttgatgaggcgacttggcagctagatgaagcgcaggaccagatcttggaggctgatgctgggactccgacgacgtatcgtggggccgatgagtctctacccgaagtcgtggatttccttcaatctcagcctccacaagcttcgcccgtctctggcgaattatctctacccgtcgtaataactcaacgccgtccaggcaagcgcgcacgaggtttcgtgcgagcctacgccccgattctatcagatatcggagtatcagagaccacattcctctcattcatggataagctgaacaaagccgtcgtacccaacggactcatccaagccctcaatctcgcgtccctctccgcaatgcacactcccgagccgttctcgatactgatcggtatcgcgattcaagccgctaccaacgtcgcggatgctgctcacagtcggtataagacgaataacttcctcgacaggatgaataaagaatttttcgttcccaggggcgtggtcgccatggtcgttacgtggagaccaggaacgcctggcgtagtcgctgaggttgatttcgataggactgccacggatgccagtaaacccatggctgaacagggcaaattcgagaaattcaaacgcacgttcaaacagtcgagtaccgaaacggcgtttgagtggccggagactgcccctttggtttttcctgtgttggaccatttagcagttgccgagggccaggaacaacagaacaccccttcttcaactgaggtgaagaaacagaatgtcctgaaaagagctggagggtttgtaggagagtacatggataaacgggccagagcggaatgggctggtaaacatcctaatagtaagatggcgagcgaagctggctcgaaggagaagtttcattcgagatatgctgatccgaatcatcctgctgctagtggtgatttgatcgccctgttgactgggggttatgtacagcatcctttatcggatttgtataagggcagtttgagggatgtgaataaggctggtggtatgacgcttggtggtgctgttaggaggttgtttgagaaggatatactttatctcatgattgtgcagattccttcgcaagaacagatggcgggagctacgagcactacagcggtctaa

SEQ ID NO: 23280 - protein, 508 aa, Muscodor strobelii
  misc_feature: SGI Peptide ID NO. 567917
  misc_feature (88)..(448): NCBI GI: 169624559 Blast Desc: SNOG_15540 [Phaeosphaeria nodorum SN15] gi|160705198|gb|EAT77205.2| SNOG_15540 [Phaeosphaeria nodorum SN15]
  misc_feature (88)..(450): NCBI GI: 145228341 Blast Desc: An01g00290 [Aspergillus niger] gi|134054566|emb|CAK43421.1| protein product [Aspergillus niger]
  misc_feature (88)..(504): NCBI GI: 256724041 Blast Desc: NECHADRAFT_86417 [Nectria haematococca mpVI 77-13-4]
  misc_feature (80)..(454): NCBI GI: 154296117 Blast Desc: BC1G_12788 [Botryotinia fuckeliana B05.10] gi|150843749|gb|EDN18942.1| BC1G_12788 [Botryotinia fuckeliana B05.10]
  misc_feature (132)..(451): NCBI GI: 156044706 Blast Desc: SS1G_10457 [Sclerotinia sclerotiorum 1980] gi|154694845|gb|EDN94583.1| SS1G_10457 [Sclerotinia sclerotiorum 1980]
  misc_feature (89)..(450): NCBI GI: 256726063 Blast Desc: NECHADRAFT_25054 [Nectria haematococca mpVI 77-13-4]
  misc_feature (86)..(450): NCBI GI: 169778526 Blast Desc: [Aspergillus oryzae RIB40] gi|83772466|dbj|BAE62595.1| protein product [Aspergillus oryzae]
  misc_feature (86)..(450): NCBI GI: 238499089 Blast Desc: conserved [Aspergillus flavus NRRL3357] gi|220692532|gb|EED48878.1| conserved [Aspergillus flavus NRRL3357]
  misc_feature (72)..(499): NCBI GI: 46115050 Blast Desc: FG03367.1 [Gibberella zeae PH-1]
  misc_feature (132)..(435): NCBI GI: 242815853 Blast Desc: conserved [Talaromyces stipitatus ATCC 10500] gi|218714991|gb|EED14414.1| conserved [Talaromyces stipitatus ATCC 10500]
  misc_feature: Useful for introducing or modulating the production of volatile compounds
MYRGSSRDEFSGRGGEQQPPAQEGYMRFQDSTIFQAFQGRQDLRAQSRFGQQQGNQRQGRFGLGLGQSRQSSNDLLGAGLLFRAEGAIVRGVASGIGLASEAIHRRKEKNAQRDGDTALNSENDENLYRDVDEATWQLDEAQDQILEADAGTPTTYRGADESLPEVVDFLQSQPPQASPVSGELSLPVVITQRRPGKRARGFVRAYAPILSDIGVSETTFLSFMDKLNKAVVPNGLIQALNLASLSAMHTPEPFSILIGIAIQAATNVADAAHSRYKTNNFLDRMNKEFFVPRGVVAMVVTWRPGTPGVVAEVDFDRTATDASKPMAEQGKFEKFKRTFKQSSTETAFEWPETAPLVFPVLDHLAVAEGQEQQNTPSSTEVKKQNVLKRAGGFVGEYMDKRARAEWAGKHPNSKMASEAGSKEKFHSRYADPNHPAASGDLIALLTGGYVQHPLSDLYKGSLRDVNKAGGMTLGGAVRRLFEKDILYLMIVQIPSQEQMAGATSTTAV

SEQ ID NO: 23281 - DNA, 2031 bp, Muscodor strobelii
  misc_feature: SGI EST ID NO. CUFF.54810.1
  misc_feature: Variant of the nucleotide sequence at SEQ ID NO 23279
ggcccgagatcatcattttcatgaatttgattagagatgagaatgctattttttcaatgcgtcctagacatcaatatggatgcctagagatgatattgttgctcgcggaggatataaggggagaatggagatgagttatgttggggttgaagctcatctccatttcgacataacatcagcaatcgcgaaactcttatactgcaaataatactctttacaatttgatacctttgaaaatgtatcggggatccagcagagatgagttcagcggcagaggtggtgagcaacaaccaccagcacaagaaggttacatgcgatttcaagactcgacaatatttcaagcgtttcaaggacgacaagacctccgggcacaatcaagatttggacaacaacaaggaaatcagagacaaggccgatttggccttggtcttggccaatctagacaatcgtcaaatgacttacttggtgctggcttgctatttcgtgctgaaggtgcgatagtcaggggtgtggcttcgggcattggacttgcgtctgaggctatacatcggcgtaaagagaagaacgcccagagggacggcgatacagctttgaactcggaaaatgacgagaatctttaccgagatgttgatgaggcgacttggcagctagatgaagcgcaggaccagatcttggaggctgatgctgggactccgacgacgtatcgtggggccgatgagtctctacccgaagtcgtggatttccttcaatctcagcctccacaagcttcgcccgtctctggcgaattatctctacccgtcgtaataactcaacgccgtccaggcaagcgcgcacgaggtttcgtgcgagcctacgccccgattctatcagatatcggagtatcagagaccacattcctctcattcatggataagctgaacaaagccgtcgtacccaacggactcatccaagccctcaatctcgcgtccctctccgcaatgcacactcccgagccgttctcgatactgatcggtatcgcgattcaagccgctaccaacgtcgcggatgctgctcacagtcggtataagacgaataacttcctcgacaggatgaataaagaatttttcgttcccaggggcgtggtcgccatggtcgttacgtggagaccaggaacgcctggcgtagtcgctgaggttgatttcgataggactgccacggatgccagtaaacccatggctgaacagggcaaattcgagaaattcaaacgcacgttcaaacagtcgagtaccgaaacggcgtttgagtggccggagactgcccctttggtttttcctgtgttggaccatttagcagttgccgagggccaggaacaacagaacaccccttcttcaactgaggtgaagaaacagaatgtcctgaaaagagctggagggtttgtaggagagtacatggataaacgggccagagcggaatgggctggtaaacatcctaatagtaagatggcgagcgaagctggctcgaaggagaagtttcattcgagatatgctgatccgaatcatcctgctgctagtggtgatttgatcgccctgttgactgggggttatgtacagcatcctttatcggatttgtataagggcagtttgagggatgtgaataaggctggtggtatgacgcttggtggtgctgttaggaggttgtttgagaaggatatactttatctcatgattgtgcagattccttcgcaagaacagatggcgggagctacgagcactacagcggtctaacctatctttatgagttcggtaaattcaacgaatcaacgaatgagagaaatgagagaaagcaattataagtgtacagatacagtatcaaatagttggatataattaggagcgtgttcaggcttggctggattgtcggtgaaaagcacagccacaagctgatgctacggagcctcacacatgcaaagtactaggcaaggtaaccttcttatcacctaatgtctagcaaggcatgaaaacgatatccctcccggaaacctctggtcgatcg

SEQ ID NO: 23282 - DNA, 354 bp, Muscodor strobelii
  misc_feature: SGI cDNA ID NO. 567918
  misc_feature: Elevated expression when VOC is produced
  misc_feature: Encodes the peptide sequence at SEQ ID NO 23283
atggcgaccactctgtacaagctcgtctttttcgtgccgcccgaaaatctcgaggatgtgaagaccgcgatatttgctgcgggcgcaggtcgctatctcggtgcgggcaactacacagaatgtgcttggcaatcgaccggcgttggtcaattccgacctggcgataccgcgaaccctcatctgggagaagtcggcaagctggaaaagatcgatgaggtccgtgttgaaaccctttgcgtaggactggagactacccgcaaagctgttggggcattgatcaaagcacatccgtacgaagagccggcttatgaagtctacaagattgaagctattgatccaattattccagaatag

SEQ ID NO: 23283 - protein, 117 aa, Muscodor strobelii
  misc_feature: SGI Peptide ID NO. 567918
  misc_feature (2)..(109): NCBI GI: 259486630 Blast Desc: TPA: conserved [Aspergillus nidulans FGSC A4]
  misc_feature (6)..(109): NCBI GI: 145607305 Blast Desc: MGG_04152 [Magnaporthe grisea 70-15] gi|145014886|gb|EDJ99454.1| MGG_04152 [Magnaporthe grisea 70-15]
  misc_feature (1)..(111): NCBI GI: 189200783 Blast Desc: conserved [Pyrenophora tritici-repentis Pt-1C-BFP] gi|187983827|gb|EDU49315.1| conserved [Pyrenophora tritici-repentis Pt-1C-BFP]
  misc_feature (6)..(109): NCBI GI: 169764471 Blast Desc: [Aspergillus oryzae RIB40] gi|238504278|ref|XP_002383370.1| conserved [Aspergillus flavus NRRL3357] gi|83764561|dbj|BAE54705.1| protein product oryzae]
  misc_feature (6)..(109): NCBI GI: 256720676 Blast Desc: NECHADRAFT_72217 [Nectria haematococca mpVI 77-13-4]
  misc_feature (1)..(109): NCBI GI: 238843872 Blast Desc: structural toxin protein RtxA [Microsporum canis CBS 113480]
  misc_feature (4)..(109): NCBI GI: 256726708 Blast Desc: NECHADRAFT_34373 [Nectria haematococca mpVI 77-13-4]
  misc_feature (2)..(109): NCBI GI: 116197048 Blast Desc: CHGG_05122 [Chaetomium globosum CBS 148.51] gi|88181035|gb|EAQ88503.1| CHGG_05122 [Chaetomium globosum CBS 148.51]
  misc_feature (1)..(109): NCBI GI: 46137905 Blast Desc: FG10467.1 [Gibberella zeae PH-1]
  misc_feature (6)..(112): NCBI GI: 171688184 Blast Desc: protein product [Podospora anserina] gi|170944054|emb|CAP70164.1| protein product [Podospora anserina]
  misc_feature: Useful for introducing or modulating the production of volatile compounds
MATTLYKLVFFVPPENLEDVKTAIFAAGAGRYLGAGNYTECAWQSTGVGQFRPGDTANPHLGEVGKLEKIDEVRVETLCVGLETTRKAVGALIKAHPYEEPAYEVYKIEAIDPIIPE

SEQ ID NO: 23284 - DNA, 1927 bp, Muscodor strobelii
  misc_feature: SGI EST ID NO. CUFF.54781.0
  misc_feature: Variant of the nucleotide sequence at SEQ ID NO 23282
gccgactaggaggcgtagaaatgatactaatgtcttccttaatccaggcttcttctacgtaaccaattttggattaacacaagaacaagttgaccgacaatttgcgattggaaaagaaatcttccagctatcaactgaagagaaactaaagtttagagcagacctcgagaacggaggctataatggttataagccacgtggaattcgagaggttcgtcagggtatctttgacaataccgagatcttcaacataccaaagtttattcccgaactcgagaggccacaaccgcaggtgattaatgacaatcgtcaagagatagaagtattcgcgcgacacatacatgaccatgtcgtaggcaagttattggtgctgttcgcgataattctcgagctgcctgaagacttcttccttgagcggcatcgatatgatgtgcgtagtgattgtcacttgcgatacatgaagtatcatcgccgcacggaggagcaaaacaaagctctagagaacgtgtgggtgaagggacacaccgactttgggtcccttacgctactgttccgacagcccgtcgcagctcttcaggtgcgcactccggaaggagagtggaaatgggttaagccatacccagggagcatcaccgtgaacctggcagactctctcgagttcttaacgaacgggtttctcaagagcagtatccatcgcgtcgtggctccgcccgcagatcaggcgaacgtcgatcgattgggcgttctctactttgtgagacccgaggacagtttagaactgaagcccgttgtaagcagcgttctcgagcgccttgggtacgataagactacagatgacagtgccgtcggcattactgctggcgaatgggtgaaggctcgcgttgcaaaaggcgtcgcgaaagacaagccgcggaatgaagttggagaacaagagatcatcaagggtaaagcggcgaagtactatgactaagtcgtgtaactgtgatatgaacgtgttgcgaatatatcggaatacctatccgtgagtctcgctgtttcagtatgatgtagatagctatgtacctatgtaggtatgtcctattggtctgcgacgaatgagcgagatggaatgctaggctctggccaagaatgtgttttgttttgtttttgctatcagcgcgtccaagatccgataagctcagcagcccgcggcagcttgattctcccgtacgccagctgctgggcgttctccgcatctcagctttagcataacgcctgtgatccctgcccagcgcctgttgcggtgatcattcgtcttagctctccctagcatctctgtacacgctgttagtagcgttcaacatggcgaccactctgtacaagctcgtctttttcgtgccgcccgaaaatctcgaggatgtgaagaccgcgatatttgctgcgggcgcaggtcgctatctcggtgcgggcaactacacagaatgtgcttggcaatcgaccggcgttggtcaattccgacctggcgataccgcgaaccctcatctgggagaagtcggcaagctggaaaagatcgatgaggtccgtgttgaaaccctttgcgtaggactggagactacccgcaaagctgttggggcattgatcaaagcacatccgtacgaagagccggcttatgaagtctacaagattgaagctattgatccaattattccagaatagacacaagaagaaaaatcttttgaaggaccgtctatttccacgattcttgatgtagcgtgttcgagcaattcggttgcagctattatgttgataagcagacttttgtcttccaaagctctaatctgtgtcaaaattctatgcgtcaacgcaatgactgcgaagagtgtctcatgaatcaattcgaatgccaacgctgttcataatttgtacgaaacattgggatccagtgcca

SEQ ID NO: 23285 - DNA, 1107 bp, Muscodor strobelii
  misc_feature: SGI cDNA ID NO. 567919
  misc_feature: Encodes the peptide sequence at SEQ ID NO 23286
atggctgctgctgtgagtgtaccaccaaatgcccgcaacgcaattcctacatatcatcagataccggagactaaatatgaacttgactgggccgacttggccacattggacttgtcacagtttgagctgcccgggggcaaggagaggctcgcacagcagctcttcgatgctatacagaaagtcggcttcttctacgtaaccaattttggattaacacaagaacaagttgaccgacaatttgcgattggaaaagaaatcttccagctatcaactgaagagaaactaaagtttagagcagacctcgagaacggaggctataatggttataagccacgtggaattcgagaggttcgtcagggtatctttgacaataccgagatcttcaacataccaaagtttattcccgaactcgagaggccacaaccgcaggtgattaatgacaatcgtcaagagatagaagtattcgcgcgacacatacatgaccatgtcgtaggcaagttattggtgctgttcgcgataattctcgagctgcctgaagacttcttccttgagcggcatcgatatgatgtgcgtagtgattgtcacttgcgatacatgaagtatcatcgccgcacggaggagcaaaacaaagctctagagaacgtgtgggtgaagggacacaccgactttgggtcccttacgctactgttccgacagcccgtcgcagctcttcaggtgcgcactccggaaggagagtggaaatgggttaagccatacccagggagcatcaccgtgaacctggcagactctctcgagttcttaacgaacgggtttctcaagagcagtatccatcgcgtcgtggctccgcccgcagatcaggcgaacgtcgatcgattgggcgttctctactttgtgagacccgaggacagtttagaactgaagcccgttgtaagcagcgttctcgagcgccttgggtacgataagactacagatgacagtgccgtcggcattactgctggcgaatgggtgaaggctcgcgttgcaaaaggcgtcgcgaaagacaagccgcggaatgaagttggagaacaagagatcatcaagggtaaagcggcgaagtactatgactaa

SEQ ID NO: 23286 - protein, 368 aa, Muscodor strobelii
  misc_feature: SGI Peptide ID NO. 567919
  misc_feature (192)..(300): Pfam Id: PF03171 Pfam Desc: 2OG-Fe(II) oxygenase superfamily
  misc_feature (220)..(300): Pfam Id: PF03171 Pfam Desc: 2OG-Fe(II) oxygenase superfamily
  misc_feature (9)..(368): NCBI GI: 256728228 Blast Desc: NECHADRAFT_53870 [Nectria haematococca mpVI 77-13-4]
  misc_feature (26)..(368): NCBI GI: 255948042 Blast Desc: Pc22g07720 [Penicillium chrysogenum Wisconsin 54-1255] gi|211591805|emb|CAP98060.1| Pc22g07720 [Penicillium chrysogenum Wisconsin 54-1255]
  misc_feature (14)..(367): NCBI GI: 39946304 Blast Desc: MGG_08359 [Magnaporthe grisea 70-15] gi|145019989|gb|EDK04217.1| MGG_08359 [Magnaporthe grisea 70-15]
  misc_feature (15)..(368): NCBI GI: 242764857 Blast Desc: 1-aminocyclopropane-1-carboxylate oxidase, [Talaromyces stipitatus ATCC 10500] gi|218724052|gb|EED23469.1| 1-aminocyclopropane-1-carboxylate oxidase, [Talaromyces ATCC
  misc_feature (1)..(349): NCBI GI: 238497948 Blast Desc: gibberellin 20-oxidase, [Aspergillus flavus NRRL3357] gi|220693483|gb|EED49828.1| gibberellin 20-oxidase, [Aspergillus flavus NRRL3357]
  misc_feature (62)..(349): NCBI GI: 169768630 Blast Desc: [Aspergillus oryzae RIB40] gi|83766643|dbj|BAE56783.1| protein product [Aspergillus oryzae]
  misc_feature (15)..(339): NCBI GI: 256723867 Blast Desc: [Nectria haematococca mpVI 77-13-4]
  misc_feature (10)..(368): NCBI GI: 255949626 Blast Desc: Pc22g16660 [Penicillium chrysogenum Wisconsin 54-1255] gi|211592597|emb|CAP98954.1| Pc22g16660 [Penicillium chrysogenum Wisconsin 54-1255]
  misc_feature (15)..(318): NCBI GI: 255936319 Blast Desc: Pc13g07560 [Penicillium chrysogenum Wisconsin 54-1255] gi|211583806|emb|CAP91825.1| Pc13g07560 [Penicillium chrysogenum Wisconsin 54-1255]
  misc_feature (18)..(343): NCBI GI: 119473631 Blast Desc: 2OG-Fe(II) oxygenase family oxidoreductase, [Neosartorya fischeri NRRL 181] gi|119406844|gb|EAW16794.1| 2OG-Fe(II) oxygenase family oxidoreductase, [Neosartorya fischeri
  misc_feature (10)..(316): SWISSPROT Homolog: EC 1.14.11.13 Gibberellin 2-beta-dioxygenase
MAAAVSVPPNARNAIPTYHQIPETKYELDWADLATLDLSQFELPGGKERLAQQLFDAIQKVGFFYVTNFGLTQEQVDRQFAIGKEIFQLSTEEKLKFRADLENGGYNGYKPRGIREVRQGIFDNTEIFNIPKFIPELERPQPQVINDNRQEIEVFARHIHDHVVGKLLVLFAIILELPEDFFLERHRYDVRSDCHLRYMKYHRRTEEQNKALENVWVKGHTDFGSLTLLFRQPVAALQVRTPEGEWKWVKPYPGSITVNLADSLEFLTNGFLKSSIHRVVAPPADQANVDRLGVLYFVRPEDSLELKPVVSSVLERLGYDKTTDDSAVGITAGEWVKARVAKGVAKDKPRNEVGEQEIIKGKAAKYYD

SEQ ID NO: 23287 - DNA, 262 bp, Muscodor strobelii
  misc_feature: SGI EST ID NO. CUFF.54784.0
  misc_feature: Variant of the nucleotide sequence at SEQ ID NO 23285
cgtactgcatagtatatgcgattaaatggagtcaaatatatgcgacaagtacgtcgcgacaagatgacgatcgcgttctttatcaattgattacacataggtcctgacatcgaaatcgcatgtcaaaatggctgctgctgtgagtgtaccaccaaatgcccgcaacgcaattcctacatatcatcagataccggagactaaatatgaacttgactgggccgacttggccacattggacttgtcacagtttgagctgcccggg

SEQ ID NO: 23288 - DNA, 1554 bp, Muscodor strobelii
  misc_feature: SGI cDNA ID NO. 567920
  misc_feature: Encodes the peptide sequence at SEQ ID NO 23289
atggcaactcaggcagattcaaaagtgccgtattcaacatctgatgtgccggatacatccgaagattccagctctggtagcagtctctaccatgtctcgcgtgatggaggaatagctcagacgcaaggccaccaggtgattgaaggatacgatgccgagcgcatgcgagcacgagcagctctcagtgcggacgaggagaagaagctactgcgtcggatcgactggcatcttatgcccttgtgttctctcatgttcttgttcaaaggccttgacgctgataatgcgagaacacctgagaatattcttacccaattgaacctatcctctaatgcctatgctcttgtcgcagtcctctattatatcccctatgtcgttgctgaagctccttcgaacttgttactcaagaggttttcaccatcacgctggcaatcgagaatcatggtcacatggggcattgtcttactactacatgttccggtgaagaataaggaaggcctctacgcggtccgcttcttcctcggacttgcagaagctggcatgtttcctggtgtcttgctacagatgacgtactggtatcggcctgacgaaatgactattcgcttgttatatttctacatttgtggcaatctgtccggaatcattggcggcgttcttgcattcgcattcgatttagcctctggagctagcggactatcaggttggcaatggcttttccttgttgaagcagttgcaacaatattagtcggtatcgccatttggttcttgttgccggactttcctcaaactgcctcatggttgtccgataaggaaaaggccttcatacaagctcgtcttccagcgaattctccaagagcggcagagcaggacttcaaagccagcgaaatcttagcttctctcaaggatcgacggctgtggcttttcaccctcatctgggcgttcttcactgtaggaactcaaggtgtccgcttttaccagtcaaccgtcattgcgaatttaggcttcacaacaatcgcgcaagctcagcttttaaatctacccatctctatcaccggtctcgtcgtcataggcgtcacgggatggatcgctgataaaggaagaataccgcgaccgctgttccccttgacttttcttataattatcatcgcagcatatggtgttttggtagcttatccaagcgttggtggtgtctatgctgccacattagtcgcgaatgccgtgacagtagcttggtaccccctcatgtggccctggcgcgtgcagacgacaagccgagcaactgggtccgcattctcaatcggcttcgtcaactcgtacgggcagattggcggcgcaattggtcctcaaattttccagagcatgtacgagcctcactacaccatcccatacggtatcacggccggacttgtcgctacttgcgcactgcttactctgtttacatggtgggttactcgtcagaccgaagcggacacacgaaagatctatcgcgctcgcattgaggctgggaagcgcaaccaggcaatattggcagatgttgttgacaacgacttgaagtga

SEQ ID NO: 23289 - protein, 517 aa, Muscodor strobelii
  misc_feature: SGI Peptide ID NO. 567920
  misc_feature (81)..(447): Pfam Id: PF07690 Pfam Desc: Major Facilitator Superfamily
  misc_feature (98)..(447): Pfam Id: PF07690 Pfam Desc: Major Facilitator Superfamily
  misc_feature (21)..(516): NCBI GI: 238494818 Blast Desc: pantothenate transporter, [Aspergillus flavus NRRL3357] gi|220695295|gb|EED51638.1| pantothenate transporter, [Aspergillus flavus NRRL3357]
  misc_feature (21)..(432): NCBI GI: 169777635 Blast Desc: [Aspergillus oryzae RIB40] gi|83772020|dbj|BAE62150.1| protein product [Aspergillus oryzae]
  misc_feature (47)..(432): NCBI GI: 256725434 Blast Desc: NECHADRAFT_15605 [Nectria haematococca mpVI 77-13-4]
  misc_feature (12)..(335): NCBI GI: 238502127 Blast Desc: allantoate permease, [Aspergillus flavus NRRL3357] gi|220691107|gb|EED47455.1| allantoate permease, [Aspergillus flavus NRRL3357]
  misc_feature (55)..(434): NCBI GI: 256721105 Blast Desc: NECHADRAFT_15701 [Nectria haematococca mpVI 77-13-4]
  misc_feature (49)..(517): NCBI GI: 169777633 Blast Desc: [Aspergillus oryzae RIB40] gi|83772019|dbj|BAE62149.1| protein product [Aspergillus oryzae]
  misc_feature (49)..(517): NCBI GI: 238494816 Blast Desc: pantothenate transporter, [Aspergillus flavus NRRL3357] gi|220695294|gb|EED51637.1| pantothenate transporter, [Aspergillus flavus NRRL3357]
  misc_feature (260)..(516): NCBI GI: 256734859 Blast Desc: NECHADRAFT_75549 [Nectria haematococca mpVI 77-13-4]
  misc_feature (15)..(512): NCBI GI: 115391115 Blast Desc: conserved [Aspergillus terreus NIH2624] gi|114193986|gb|EAU35686.1| conserved [Aspergillus terreus NIH2624]
  misc_feature (48)..(505): NCBI GI: 67904018 Blast Desc: AN8996.2 [Aspergillus nidulans FGSC A4] gi|40745172|gb|EAA64328.1| AN8996.2 [Aspergillus nidulans FGSC A4] gi|259486554|tpe|CBF84495.1| TPA: conserved [Aspergillus FGSC
MATQADSKVPYSTSDVPDTSEDSSSGSSLYHVSRDGGIAQTQGHQVIEGYDAERMRARAALSADEEKKLLRRIDWHLMPLCSLMFLFKGLDADNARTPENILTQLNLSSNAYALVAVLYYIPYVVAEAPSNLLLKRFSPSRWQSRIMVTWGIVLLLHVPVKNKEGLYAVRFFLGLAEAGMFPGVLLQMTYWYRPDEMTIRLLYFYICGNLSGIIGGVLAFAFDLASGASGLSGWQWLFLVEAVATILVGIAIWFLLPDFPQTASWLSDKEKAFIQARLPANSPRAAEQDFKASEILASLKDRRLWLFTLIWAFFTVGTQGVRFYQSTVIANLGFTTIAQAQLLNLPISITGLVVIGVTGWIADKGRIPRPLFPLTFLIIIIAAYGVLVAYPSVGGVYAATLVANAVTVAWYPLMWPWRVQTTSRATGSAFSIGFVNSYGQIGGAIGPQIFQSMYEPHYTIPYGITAGLVATCALLTLFTWWVTRQTEADTRKIYRARIEAGKRNQAILADVVDNDLK

SEQ ID NO: 23290 - DNA, 491 bp, Muscodor strobelii
  misc_feature: SGI EST ID NO. CUFF.54789.0
  misc_feature: Variant of the nucleotide sequence at SEQ ID NO 23288
ttctctcaaggatcgacggctgtggcttttcaccctcatctgggcgttcttcactgtaggaactcaaggtgtccgcttttaccagtcaaccgtcattgcgaatttaggcttcacaacaatcgcgcaagctcagcttttaaatctacccatctctatcaccggtctcgtcgtcataggcgtcacgggatggatcgctgataaaggaagaataccgcgaccgctgttccccttgacttttcttataattatcatcgcagcatatggtgttttggtagcttatccaagcgttggtggtgtctatgctgccacattagtcgcgaatgccgtgacagtagcttggtaccccctcatgtggccctggcgcgtgcagacgacaagccgagcaactgggtccgcattctcaatcggcttcgtcaactcgtacgggcagattggcggcgcaattggtcctcaaattttccagagcatgtacgagcctcactacaccatcc

SEQ ID NO: 23291 - DNA, 1005 bp, Muscodor strobelii
  misc_feature: SGI cDNA ID NO. 567921
  misc_feature: Encodes the peptide sequence at SEQ ID NO 23292
atgtcagtcgcatcagcgctccatggtgtcggatccgtaatatacgggaaattcttcacttcacttccaatacctacaagtacaccacaactaggagaatcaatcattatcgttaccggagccaacaccggactcggtttcgagtcttgcaaacatttatcccggcttggcgttgggaagctgatcatggcagtacggaccctaaagaagggcgaggatgccaagaagacgatcctggcatcaacagggcgaccagaatcgtcgattgacatctggtctattgatatggacaattactcttcgattgaggccttcgtgatccgcgcttcgggactgccacgactcgacggcgttctagcaaacgccggactgatgacgactcagttcactttgagtaataacaacgagaagaatctccacgtcaatgtgattagcacattcttgctttatcttctcctattaccgaagatgcgcgagtcgtcagcaaatactggcaacccttgtcggttctctattccgaatagtgcactgcactatgtcgcccagctgagcgagctgaaaggagacgattcgaatattatagatgggctcaatgatcaggaaaagaccgacatggccaatcgctacaacctcaccaagctactggtcatatacgccgtgcgcgaatttgcgaaaaggacagagtcgaagaagggtacatgcatcatcaatacacccaatccgagcttctgcaaatcgggccttgcgaatgagagtgcagattctgctgcattcggtgtttttgaatccgtgatggctcgttcaaccgaggaaggaagccgggcgctagtcaatggaattctttcaggtcccgagacgaatggccaatatctcacaaactgcaaagttcaagttccagcttgtcatgtgacgaacgactggggccaagaatttcagaagagattcgttaatgatctcatcaagaaacttgaagcaatccaccccggaatttcatccaatatctga

SEQ ID NO: 23292 - protein, 334 aa, Muscodor strobelii
  misc_feature: SGI Peptide ID NO. 567921
  misc_feature (34)..(192): Pfam Id: PF00106 Pfam Desc: short chain dehydrogenase
  misc_feature (34)..(159): Pfam Id: PF00106 Pfam Desc: short chain dehydrogenase
  misc_feature (1)..(332): NCBI GI: 242815257 Blast Desc: short-chain dehydrogenase, [Talaromyces stipitatus ATCC 10500] gi|218714873|gb|EED14296.1| short-chain dehydrogenase, [Talaromyces stipitatus ATCC 10500]
  misc_feature (1)..(332): NCBI GI: 212545312 Blast Desc: short-chain dehydrogenase, [Penicillium marneffei ATCC 18224] gi|210065779|gb|EEA19873.1| short-chain dehydrogenase, [Penicillium marneffei ATCC 18224]
  misc_feature (1)..(334): NCBI GI: 46139071 Blast Desc: FG11050.1 [Gibberella zeae PH-1]
  misc_feature (1)..(297): NCBI GI: 116196722 Blast Desc: CHGG_04959 [Chaetomium globosum CBS 148.51] gi|88180872|gb|EAQ88340.1| CHGG_04959 [Chaetomium globosum CBS 148.51]
  misc_feature (1)..(305): NCBI GI: 255940660 Blast Desc: Pc16g07760 [Penicillium chrysogenum Wisconsin 54-1255] gi|211585722|emb|CAP93446.1| Pc16g07760 [Penicillium chrysogenum Wisconsin 54-1255]
  misc_feature (12)..(333): NCBI GI: 154312603 Blast Desc: BC1G_05904 [Botryotinia fuckeliana B05.10] gi|150850005|gb|EDN25198.1| BC1G_05904 [Botryotinia fuckeliana B05.10]
  misc_feature (12)..(330): NCBI GI: 189202836 Blast Desc: retinol dehydrogenase 12 [Pyrenophora tritici-repentis Pt-1C-BFP] gi|187984853|gb|EDU50341.1| retinol dehydrogenase 12 [Pyrenophora tritici-repentis Pt-1C-BFP]
  misc_feature (14)..(334): NCBI GI: 212529402 Blast Desc: short-chain dehydrogenase, [Penicillium marneffei ATCC 18224] gi|210074256|gb|EEA28343.1| short-chain dehydrogenase, [Penicillium marneffei ATCC 18224]
  misc_feature (14)..(334): NCBI GI: 169605103 Blast Desc: SNOG_05567 [Phaeosphaeria nodorum SN15] gi|111065511|gb|EAT86631.1| SNOG_05567 [Phaeosphaeria nodorum SN15]
  misc_feature (22)..(334): NCBI GI: 256720631 Blast Desc: NECHADRAFT_72184 [Nectria haematococca mpVI 77-13-4]
  misc_feature (25)..(232): SWISSPROT Homolog: EC 1.3.1.33 Protochlorophyllide reductase
MSVASALHGVGSVIYGKFFTSLPIPTSTPQLGESIIIVTGANTGLGFESCKHLSRLGVGKLIMAVRTLKKGEDAKKTILASTGRPESSIDIWSIDMDNYSSIEAFVIRASGLPRLDGVLANAGLMTTQFTLSNNNEKNLHVNVISTFLLYLLLLPKMRESSANTGNPCRFSIPNSALHYVAQLSELKGDDSNIIDGLNDQEKTDMANRYNLTKLLVIYAVREFAKRTESKKGTCIINTPNPSFCKSGLANESADSAAFGVFESVMARSTEEGSRALVNGILSGPETNGQYLTNCKVQVPACHVTNDWGQEFQKRFVNDLIKKLEAIHPGISSNI

SEQ ID NO: 23293 - DNA, 1038 bp, Muscodor strobelii
  misc_feature: SGI cDNA ID NO. 567922
  misc_feature: Encodes the peptide sequence at SEQ ID NO 23294
atgcgccgacgactttggctgaatatcgtccagattgaagcactcatgtcatatcagactggatttccgagcatgattccttctgaattctgcgatgcaaaggttccattcaatttagaatattccgatcttcgccgtgatatgacagcagtaccaccgggacgggtgctatctgaacaaacgccagtccgctatgctatctgcaagcacccagtcatgcttgcgtttaaaaagatagtcagtcatacacagtccttattgcttgagtccggcgtcgacacctacaccaaaattaccagtttgcacgacgaaatgaatggtgcatataacaggcttccagatgtgctaaagcgacgcgatatcagtcgctcattcctcgactcgtctcagctgatggtcgagcgagcgacgatagagaacatatatcacaagggactgatcgttcttcaccgacgattcatcagctacgaggcccgaacccagagtcttgaccagtctaatcagtctcgaaacgcctgcgtcgaagctgcgcttgccatgctacatcgccaggccgacttgtacaaagcatgcgacccaggaggccgactatacgatgatcgatggatggtatataccctgccagctcacgattggcttcttgcagccatggtcatttgtctagatctttctgtttccatgcaactacaaaaatcggatgcagagacaatcgagcaacagcagctccagagacgggaatatgaagcgctagagatatcacggaaaatttgggttgcaaatagtgctgggtcttctgaggcgcacattgcatcccttgcacttggtctgatgatccgcaaagttgacgagcacagaggtgttatcactatggctgcccatgctcctttacaagaggatgcgatgacaagtttcacctcagatttccaacatgcgggcgccatgtcgcagatgattgacggatctgacaacgtcgactgggctttattagatcactacctctatgatctcgacggattgaacactgaagggctaatgtga

SEQ ID NO: 23294 - protein, 345 aa, Muscodor strobelii
  misc_feature: SGI Peptide ID NO. 567922
  misc_feature (1)..(43): Pfam Id: PF04082 Pfam Desc: Fungal specific transcription factor domain
  misc_feature (1)..(326): NCBI GI: 255940662 Blast Desc: Pc16g07770 [Penicillium chrysogenum Wisconsin 54-1255] gi|211585723|emb|CAP93447.1| Pc16g07770 [Penicillium chrysogenum Wisconsin 54-1255]
  misc_feature (1)..(335): NCBI GI: 212545314 Blast Desc: conserved [Penicillium marneffei ATCC 18224] gi|210065780|gb|EEA19874.1| conserved [Penicillium marneffei ATCC 18224]
  misc_feature (1)..(337): NCBI GI: 242815262 Blast Desc: conserved [Talaromyces stipitatus ATCC 10500] gi|218714874|gb|EED14297.1| conserved [Talaromyces stipitatus ATCC 10500]
  misc_feature (1)..(281): NCBI GI: 212535250 Blast Desc: conserved [Penicillium marneffei ATCC 18224] gi|210070180|gb|EEA24270.1| conserved [Penicillium marneffei ATCC 18224]
  misc_feature (1)..(333): NCBI GI: 242792522 Blast Desc: conserved [Talaromyces stipitatus ATCC 10500] gi|218718559|gb|EED17979.1| conserved [Talaromyces stipitatus ATCC 10500]
  misc_feature (1)..(335): NCBI GI: 46139073 Blast Desc: FG11051.1 [Gibberella zeae PH-1]
  misc_feature (1)..(306): NCBI GI: 242800087 Blast Desc: C6 transcription factor, [Talaromyces stipitatus ATCC 10500] gi|218716860|gb|EED16281.1| C6 transcription factor, [Talaromyces stipitatus ATCC 10500]
  misc_feature (1)..(337): NCBI GI: 259482307 Blast Desc: TPA: Zn(II)2Cys6 transcription factor (Eurofung) [Aspergillus nidulans FGSC A4]
  misc_feature (1)..(337): NCBI GI: 67537334 Blast Desc: AN4837.2 [Aspergillus nidulans FGSC A4] gi|40740882|gb|EAA60072.1| AN4837.2 [Aspergillus nidulans FGSC A4]
  misc_feature (1)..(287): NCBI GI: 256731862 Blast Desc: NECHADRAFT_40978 [Nectria haematococca mpVI 77-13-4]
MRRRLWLNIVQIEALMSYQTGFPSMIPSEFCDAKVPFNLEYSDLRRDMTAVPPGRVLSEQTPVRYAICKHPVMLAFKKIVSHTQSLLLESGVDTYTKITSLHDEMNGAYNRLPDVLKRRDISRSFLDSSQLMVERATIENIYHKGLIVLHRRFISYEARTQSLDQSNQSRNACVEAALAMLHRQADLYKACDPGGRLYDDRWMVYTLPAHDWLLAAMVICLDLSVSMQLQKSDAETIEQQQLQRREYEALEISRKIWVANSAGSSEAHIASLALGLMIRKVDEHRGVITMAAHAPLQEDAMTSFTSDFQHAGAMSQMIDGSDNVDWALLDHYLYDLDGLNTEGLM

SEQ ID NO: 23295 - DNA, 2695 bp, Muscodor strobelii
  misc_feature: SGI EST ID NO. CUFF.54964.0
  misc_feature: Variant of the nucleotide sequence at SEQ ID NO 23293
ctagtatgagcgtttctgggaaaatccaatgtctgcaccgcctctttggactgcgctagtgttttctatgttgagcgtcatggctgttttgcatacagtctcaaacccgaccgaggtggaccgatcaatccctcccctgcatgatcttcaacaaagaacagtacagtgtcttgtgctcggacgttatgcaactgcgaatgagtacgcgctggaagcctttgtccttcatttactcagttgtatgcttagtcaagatcaaccccccgtcaacctatggttcgaaatgggcacagtcattcgtttggcatttcgaatgggctaccaccgcgacccaagcaggctgccccgagtctccgcattcgacggcgaaatgcgccgacgactttggctgaatatcgtccagattgaagcactcatgtcatatcagactggatttccgagcatgattccttctgaattctgcgatgcaaaggttccattcaatttagaatattccgatcttcgccgtgatatgacagcagtaccaccgggacgggtgctatctgaacaaacgccagtccgctatgctatctgcaagcacccagtcatgcttgcgtttaaaaagatagtcagtcatacacagtccttattgcttgagtccggcgtcgacacctacaccaaaattaccagtttgcacgacgaaatgaatggtgcatataacaggcttccagatgtgctaaagcgacgcgatatcagtcgctcattcctcgactcgtctcagctgatggtcgagcgagcgacgatagagaacatatatcacaagggactgatcgttcttcaccgacgattcatcagctacgaggcccgaacccagagtcttgaccagtctaatcagtctcgaaacgcctgcgtcgaagctgcgcttgccatgctacatcgccaggccgacttgtacaaagcatgcgacccaggaggccgactatacgatgatcgatggatggtatataccctgccagctcacgattggcttcttgcagccatggtcatttgtctagatctttctgtttccatgcaactacaaaaatcggatgcagagacaatcgagcaacagcagctccagagacgggaatatgaagcgctagagatatcacggaaaatttgggttgcaaatagtgctgggtcttctgaggcgcacattgcatcccttgcacttggtctgatgatccgcaaagttgacgagcacagaggtgttatcactatggctgcccatgctcctttacaagaggatgcgatgacaagtttcacctcagatttccaacatgcgggcgccatgtcgcagatgattgacggatctgacaacgtcgactgggctttattagatcactacctctatgatctcgacggattgaacactgaagggctaatgtgaccaggtcattgtgttaccactcctaaacatccactcacacctgcacgtagtggatcaaatggtaaagagaactcagatgtgaagttgtcgaaatagactacagcactcaatacgcacgatgctctcggtattgatctactactacttcgcatgcgacagtatttcctgaagatatcgtgcttcgcggatatgaccccaacctcgctggatagcccaggccttcaggttcggatacgaaacgagccttggacgctgaaggacccaattatcagttgctgaatgtcaacgcagcaataataacatcttctgaacccgcccctcatgccgtacatcgcaaattgatcatcgcgatgagatattgtttgccacacttagcgtattccgcgacgaactgttttgaggtgctaatccctgacgcggctgcaaccatacttcaatactctagcttgagttccggctcgatgccctccatctcatcaagtgtatcctcgcaatggccttcggcaacctgattgcgatatcgcggtacaagggtgtaggtcacatcgccaagtagcttgacattgttgtggagatcaaaagccaactccaggagatctcgatcacgaactcgagcgccatcagaatgtcgccatccgtttcgagcgcaggtgtgtacccatgtgttcctacgcacaaaccgtattttgtcagctcagcacttacatgcaacatgttgcttgtctaagttataagccctgactcacatgcatctaactgcaaatcgacttgcactgcgtatctcgacgtcgagtctcggacggtcgcgcaatgagcggtgcctctttagagtccaatcgagtgctaggatgataggaaagatcgcaaccctttgcttcgatggctgaggatgacttttcatacttctcgctctccagccatagcgcccgtcgcgattcattgagcaacacgatgcagcaccgatggcgcgcggagaaccgctatgtcggcaggcgccgtcgacgttgtaggtcatgatgaataccatgttgaacgcaggagggtttcagagatgatgcgtttgaggagaggtgcgagatcgaacgcgcgacgcgacaatctgagtatatagaaggttttgatgtagatcgtgttgacattaccgacttgtactgcggcgtttctactcgcaattgagcgtggaggaagcagacagaaagtcaaatagtaagggactataggcgcaaaatgcgcgtccacgtgatatcatgagcaacgagatgagcatcgcagcaaccacattctgaa

SEQ ID NO: 23296 - DNA, 2112 bp, Muscodor strobelii
  misc_feature: SGI cDNA ID NO. 567923
  misc_feature: Encodes the peptide sequence at SEQ ID NO 23297
atggacccagcaccgaggagcattgaaaagcgcaaccgcagacctgtctcatgtgaacagtgtaggctacgaaaactgaaatgcaatcgcggacttccatgcgagaactgcatcaaacgccgcaagcaatcgcaatgtcactatgctgccaacgccaaccgggctaaccccactgcgtcaaagcaaaaagatatgaaggctaggctcaacactttagagaagttggtctcttcattcatatcaggcaacgcagtcgtccatcctgccggcagtgcaaatgtgcctgttgacccagcttcagatggcatgatctcaccttcaactcaatccagcttcaggctcaatgagctagcgttaactccgagaagcgatgagcagacagacacagcactgaccccagaaacgccccatttgcaagagactggcgacggacaagtcaattacatcgacaaaagtcattggcagtcaattctggaagacatacaggaggtccgagagcatctttcggcgacgagtcaacaaaatgaattgaatgatggcgagaatcgtgtcttacatgacgcgagctttctctttgattctgtccccagcgctacttatgccgaaatactgacctcactaccatcgcaaccgatttatgacaaactcttagcgaagtacttcacatcctgcatcttcgtttccggcaagttcatcactctgattcaaatgttgacagacgagtatgagcgtttctgggaaaatccaatgtctgcaccgcctctttggactgcgctagtgttttctatgttgagcgtcatggctgttttgcatacagtctcaaacccgaccgaggtggaccgatcaatccctcccctgcatgatcttcaacaaagaacagtacagtgtcttgtgctcggacgttatgcaactgcgaatgagtacgcgctggaagcctttgtccttcatttactcagttgtatgcttagtcaagatcaaccccccgtcaacctatggttcgaaatgggcacagtcattcgtttggcatttcgaatgggctaccaccgcgacccaagcaggctgccccgagtctccgcattcgacggcgaaatgcgccgacgactttggctgaatatcgtccagattgaagcactcatgtcatatcagactggatttccgagcatgattccttctgaattctgcgatgcaaaggttccattcaatttagaatattccgatcttcgccgtgatatgacagcagtaccaccgggacgggtgctatctgaacaaacgccagtccgctatgctatctgcaagcacccagtcatgcttgcgtttaaaaagatagtcagtcatacacagtccttattgcttgagtccggcgtcgacacctacaccaaaattaccagtttgcacgacgaaatgaatggtgcatataacaggcttccagatgtgctaaagcgacgcgatatcagtcgctcattcctcgactcgtctcagctgatggtcgagcgagcgacgatagagaacatatatcacaagggactgatcgttcttcaccgacgattcatcagctacgaggcccgaacccagagtcttgaccagtctaatcagtctcgaaacgcctgcgtcgaagctgcgcttgccatgctacatcgccaggccgacttgtacaaagcatgcgacccaggaggccgactatacgatgatcgatggatggtatataccctgccagctcacgattggcttcttgcagccatggtcatttgtctagatctttctgtttccatgcaactacaaaaatcggatgcagagacaatcgagcaacagcagctccagagacgggaatatgaagcgctagagatatcacggaaaatttgggttgcaaatagtgctgggtcttctgaggcgcacattgcatcccttgcacttggtctgatgatccgcaaagttgacgagcacagaggtgttatcactatggctgcccatgctcctttacaagaggatgcgatgacaagtttcacctcagatttccaacatgcgggcgccatgtcgcagatgattgacggatctgacaacgtcgactgggtgggttcgactcgtctattgtcttgcaattaccgcgttttctaa

SEQ ID NO: 23297 - protein, 703 aa, Muscodor strobelii
  misc_feature: SGI Peptide ID NO. 567923
  misc_feature (16)..(55): Pfam Id: PF00172 Pfam Desc: Fungal Zn(2)-Cys(6) binuclear cluster domain
  misc_feature (306)..(406): Pfam Id: PF04082 Pfam Desc: Fungal specific transcription factor domain
  misc_feature (8)..(696): NCBI GI: 255940662 Blast Desc: Pc16g07770 [Penicillium chrysogenum Wisconsin 54-1255] gi|211585723|emb|CAP93447.1| Pc16g07770 [Penicillium chrysogenum Wisconsin 54-1255]
  misc_feature (1)..(689): NCBI GI: 212545314 Blast Desc: conserved [Penicillium marneffei ATCC 18224] gi|210065780|gb|EEA19874.1| conserved [Penicillium marneffei ATCC 18224]
  misc_feature (1)..(689): NCBI GI: 242815262 Blast Desc: conserved [Talaromyces stipitatus ATCC 10500] gi|218714874|gb|EED14297.1| conserved [Talaromyces stipitatus ATCC 10500]
  misc_feature (6)..(645): NCBI GI: 119484582 Blast Desc: C6 transcription factor, [Neosartorya fischeri NRRL 181] gi|119410226|gb|EAW20173.1| C6 transcription factor, [Neosartorya fischeri NRRL 181]
  misc_feature (6)..(645): NCBI GI: 212545795 Blast Desc: C6 transcription factor, [Penicillium marneffei ATCC 18224] gi|210064571|gb|EEA18666.1| C6 transcription factor, [Penicillium marneffei ATCC 18224]
  misc_feature (6)..(645): NCBI GI: 242820501 Blast Desc: C6 transcription factor, [Talaromyces stipitatus ATCC 10500] gi|218713987|gb|EED13411.1| C6 transcription factor, [Talaromyces stipitatus ATCC 10500]
  misc_feature (6)..(644): NCBI GI: 121719872 Blast Desc: C6 transcription factor, [Aspergillus clavatus NRRL 1] gi|119404846|gb|EAW15208.1| C6 transcription factor, [Aspergillus clavatus NRRL 1]
  misc_feature (6)..(645): NCBI GI: 70983604 Blast Desc: C6 transcription factor [Aspergillus fumigatus Af293] gi|66844955|gb|EAL85291.1| C6 transcription factor, [Aspergillus fumigatus Af293]
  misc_feature (6)..(645): NCBI GI: 159123665 Blast Desc: C6 transcription factor, [Aspergillus fumigatus A1163]
  misc_feature (6)..(648): NCBI GI: 238845115 Blast Desc: conserved [Microsporum canis CBS 113480]
MDPAPRSIEKRNRRPVSCEQCRLRKLKCNRGLPCENCIKRRKQSQCHYAANANRANPTASKQKDMKARLNTLEKLVSSFISGNAVVHPAGSANVPVDPASDGMISPSTQSSFRLNELALTPRSDEQTDTALTPETPHLQETGDGQVNYIDKSHWQSILEDIQEVREHLSATSQQNELNDGENRVLHDASFLFDSVPSATYAEILTSLPSQPIYDKLLAKYFTSCIFVSGKFITLIQMLTDEYERFWENPMSAPPLWTALVFSMLSVMAVLHTVSNPTEVDRSIPPLHDLQQRTVQCLVLGRYATANEYALEAFVLHLLSCMLSQDQPPVNLWFEMGTVIRLAFRMGYHRDPSRLPRVSAFDGEMRRRLWLNIVQIEALMSYQTGFPSMIPSEFCDAKVPFNLEYSDLRRDMTAVPPGRVLSEQTPVRYAICKHPVMLAFKKIVSHTQSLLLESGVDTYTKITSLHDEMNGAYNRLPDVLKRRDISRSFLDSSQLMVERATIENIYHKGLIVLHRRFISYEARTQSLDQSNQSRNACVEAALAMLHRQADLYKACDPGGRLYDDRWMVYTLPAHDWLLAAMVICLDLSVSMQLQKSDAETIEQQQLQRREYEALEISRKIWVANSAGSSEAHIASLALGLMIRKVDEHRGVITMAAHAPLQEDAMTSFTSDFQHAGAMSQMIDGSDNVDWVGSTRLLSCNYRVF

SEQ ID NO: 23298 - DNA, 2695 bp, Muscodor strobelii; identical to SEQ ID NO: 23295
  misc_feature: SGI EST ID NO. CUFF.54964.0
  misc_feature: Variant of the nucleotide sequence at SEQ ID NO 23296

SEQ ID NO: 23299 - DNA, 1143 bp, Muscodor strobelii
  misc_feature: SGI cDNA ID NO. 567924
  misc_feature: Encodes the peptide sequence at SEQ ID NO 23300
atgatcaagactcctccaccattcatgaaatccttgcattcgcttctagatatgaccaagctctggaagcgctgggtgctcgatagtgaagtggctgggaccatcggaattattgatctacttgaggctttcgacgattttcagtgcaaagacacgagggatcggatatatgctcttgcaggtcttgcagcagacgtcaatatgaaccccgctacttcaacctcgacaggacaactcttactgcctgctgattacaattctcctgaggaagctgtctataccaaattctccgtggacgtgatggcccacgacaacgaaccgatgaagtatcacatgttgcggtcaagcttggcgaggtgtgataacggttcaaatattcagaataagctcccaacctgggttcctgattggcgcgtatctgcggagagaaagcccttctataaatacattgcgtacaactccttgttgcgcatcgactacatggccgaaggactgcgactgcaaggccaatgtgttttaaccgctaattctcaggtcgtagaggtattcgagccgctgccatgccagccactgtcaccgtcagatataatcgattggcttcgagcagtgggtgatctgtggttaactaaatatccagatatgggggtcgcaccatacgccagtttcgtcataacttgtgcgcgatatgctggcttgcaaatatctgatgccagtgttcattccatgttatcgattatcatgtccgatggtactttacagcactctgatcttgaacatcatgtttatacgctcgttgatattggctcgctctttaaaggaaggcgtttgttctcatggtcagtcctagatgacgatctaccacctgcgcttggaattggaccggatcacattcgaataggtgaccgtttcctaggtacgcagcgaccggactcggatgactactcattccaatcggctctcatgttgagaaacgtgcacactgagccaagcatgcaatggcccatggcgcagatggttggtgatgctgtgttggtggtgtctctcgagaaagccacttttttggttcccgtcgcctccgtggacggttactatcgtttagtctaccgagcgatacacatgtcgaggttgatctgtcgcgcctga

SEQ ID NO: 23300 - protein, 380 aa, Muscodor strobelii
  misc_feature: SGI Peptide ID NO. 567924
  misc_feature (37)..(151): NCBI GI: 189203447 Blast Desc: conserved [Pyrenophora tritici-repentis Pt-1C-BFP] gi|187985158|gb|EDU50646.1| conserved [Pyrenophora tritici-repentis Pt-1C-BFP]
  misc_feature (28)..(139): NCBI GI: 145245067 Blast Desc: An11g08370 [Aspergillus niger] gi|134079496|emb|CAK46028.1| protein product [Aspergillus niger]
  misc_feature (36)..(150): NCBI GI: 46127485 Blast Desc: FG08120.1 [Gibberella zeae PH-1]
  misc_feature (38)..(137): NCBI GI: 171694736 Blast Desc: protein product [Podospora anserina] gi|170947610|emb|CAP59772.1| protein product [Podospora anserina]
MIKTPPPFMKSLHSLLDMTKLWKRWVLDSEVAGTIGIIDLLEAFDDFQCKDTRDRIYALAGLAADVNMNPATSTSTGQLLLPADYNSPEEAVYTKFSVDVMAHDNEPMKYHMLRSSLARCDNGSNIQNKLPTWVPDWRVSAERKPFYKYIAYNSLLRIDYMAEGLRLQGQCVLTANSQVVEVFEPLPCQPLSPSDIIDWLRAVGDLWLTKYPDMGVAPYASFVITCARYAGLQISDASVHSMLSIIMSDGTLQHSDLEHHVYTLVDIGSLFKGRRLFSWSVLDDDLPPALGIGPDHIRIGDRFLGTQRPDSDDYSFQSALMLRNVHTEPSMQWPMAQMVGDAVLVVSLEKATFLVPVASVDGYYRLVYRAIHMSRLICRA

SEQ ID NO: 23301 - DNA, 408 bp, Muscodor strobelii
  misc_feature: SGI EST ID NO. CUFF.54822.0
  misc_feature: Variant of the nucleotide sequence at SEQ ID NO 23299
ggttaactaaatatccagatatgggggtcgcaccatacgccagtttcgtcataacttgtgcgcgatatgctggcttgcaaatatctgatgccagtgttcattccatgttatcgattatcatgtccgatggtactttacagcactctgatcttgaacatcatgtttatacgctcgttgatattggctcgctctttaaaggaaggcgtttgttctcatggtcagtcctagatgacgatctaccacctgcgcttggaattggaccggatcacattcgaataggtgaccgtttcctaggtacgcagcgaccggactcggatgactactcattccaatcggctctcatgttgagaaacgtgcacactgagccaagcatgcaatggcccatggcgcagatggttggtgatgctg

SEQ ID NO: 23302 - DNA, 1602 bp, Muscodor strobelii
  misc_feature: SGI cDNA ID NO. 567925
  misc_feature: Encodes the peptide sequence at SEQ ID NO 23303
atgctcgaactgctgctattgggcgtcgttacgctacttaccacatgggtttacagtcgcttgaggtatcttcgatctgaacagtatgctcatctcccgcagctgaaaagcaatttgctttgggggcatctcaagacaatgggtgaactgatgaaacaggcgaggcccgcggataatgcagatgtagtcttcgagcggatgtggtcgtcgatcggccgccctcctgtcatgcttttcgacttccgaccgctcaacccacccatggtgatgataaccgatcacgaagtggccgaacagataaccaagtcatcgaaagatttccctctgagcacaccaaaatcatcgactgtcgatttcatggacccgatgattggagaggcctcgatgcttcgtatttcgggtagtcactggaaagagactcggaagatgtacaatcctgggttttcatctaaatacttgtcgtctcttctaccgcttatacttgatgaaatgaaaccattcctttcatacttggatcaatatgccgcctcaggaggtgaattctctcttgatcatctgttagcgaacctcacatttgatatcatcggagctgcagtgatgggtgtgagcctccaggcacagcacccgacagatcgaggagatctagtcaaaaagttcgaggatcttggtgaaacatactggggcgatacatctaatcttgcgtggtgggtgacaccgatcgtcaccgtcaagagacgtcgactatcaagacagatgaatcgattggtagaggatatcattaagcagcaatattacaaagccggacgagatgggcatcgagtggagagcatcatgtcgcttgggttcaaagacgccaaatcactcacaccagctttattatctgaaatatctgatcaggtcaagacgtttctctttgctggacaagacacgaattcaacagctttacaatgggccttttacgaattgagccgtacaccccgtgcgcggaaagcggtgtgtgatgaactagacgcaatattaggcccagagacagatccctacaagatatgtgagctaatcgcgcaggagaaagaaagtgttttccctcgcatgcattacatcaatgccgtaatcaaggagacacttcgcctccaccctcctgctggcacagctcgaatgactgctccaggcactggttttacggttcgcacgtcaggcggtaaggagtactgtcttgatgggcttgtcatgtatatgccacagaggattatacatcgcaaccaggaagtatttggcgacactgcggaccactggatccctgagcggtggctggaagagaacaattatccacccggcgcgtatcggccatttgagaggggaccgagaaattgcgccggtgttgagctcgcgaatcttgagtcaaggatcattatcgctgtcgtgacgcgaaattacgagttcacgaaaatgggtctcggcgaatctgcgctagacgagaaaggtttcccagtgctgaatgaacacggccaatacaaggtcaagtctgagttgtacaatactcgtcggatcactgcaaagccagtggatggcacagttatgagagtcagagtttcaaaacaatga

SEQ ID NO: 23303 - protein, 533 aa, Muscodor strobelii
  misc_feature: SGI Peptide ID NO. 567925
  misc_feature (33)..(506): Pfam Id: PF00067 Pfam Desc: Cytochrome P450
  misc_feature (295)..(381): Pfam Id: PF00067 Pfam Desc: Cytochrome P450
  misc_feature (417)..(506): Pfam Id: PF00067 Pfam Desc: Cytochrome P450
  misc_feature (87)..(209): Pfam Id: PF00067 Pfam Desc: Cytochrome P450
  misc_feature (5)..(532): NCBI GI: 255941984 Blast Desc: Pc16g14640 [Penicillium chrysogenum Wisconsin 54-1255] gi|211586384|emb|CAP94134.1| Pc16g14640 [Penicillium chrysogenum Wisconsin 54-1255]
  misc_feature (1)..(511): NCBI GI: 256724246 Blast Desc: NECHADRAFT_97703 [Nectria haematococca mpVI 77-13-4]
  misc_feature (1)..(530): NCBI GI: 115401374 Blast Desc: [Aspergillus terreus NIH2624] gi|114190216|gb|EAU31916.1| [Aspergillus terreus NIH2624]
  misc_feature (13)..(530): NCBI GI: 261356973 Blast Desc: cytochrome P450 52A11 [Verticillium albo-atrum VaMs.102]
  misc_feature (15)..(527): NCBI GI: 116200542 Blast Desc: CHGG_10816 [Chaetomium globosum CBS 148.51] gi|88175530|gb|EAQ82998.1| CHGG_10816 [Chaetomium globosum CBS 148.51]
  misc_feature (15)..(533): NCBI GI: 145239211 Blast Desc: An08g01340 [Aspergillus niger] gi|134076756|emb|CAK39815.1| protein product [Aspergillus niger]
  misc_feature (5)..(533): NCBI GI: 39957517 Blast Desc: MGG_09179 [Magnaporthe grisea 70-15] gi|145013386|gb|EDJ98027.1| MGG_09179 [Magnaporthe grisea 70-15]
  misc_feature (14)..(513): NCBI GI: 145252778 Blast Desc: An16g05940 [Aspergillus niger] gi|134083456|emb|CAK46934.1| protein product [Aspergillus niger]
  misc_feature (1)..(513): NCBI GI: 159128346 Blast Desc: cytochrome P450 monooxygenase, [Aspergillus fumigatus A1163]
  misc_feature (1)..(513): NCBI GI: 146323181 Blast Desc: cytochrome P450 monooxygenase [Aspergillus fumigatus Af293] gi|129556505|gb|EAL86483.2| cytochrome P450 monooxygenase, [Aspergillus fumigatus Af293]
  misc_feature (89)..(479): SWISSPROT Homolog: EC 1.14.14.1 Unspecific monooxygenase
MLELLLLGVVTLLTTWVYSRLRYLRSEQYAHLPQLKSNLLWGHLKTMGELMKQARPADNADVVFERMWSSIGRPPVMLFDFRPLNPPMVMITDHEVAEQITKSSKDFPLSTPKSSTVDFMDPMIGEASMLRISGSHWKETRKMYNPGFSSKYLSSLLPLILDEMKPFLSYLDQYAASGGEFSLDHLLANLTFDIIGAAVMGVSLQAQHPTDRGDLVKKFEDLGETYWGDTSNLAWWVTPIVTVKRRRLSRQMNRLVEDIIKQQYYKAGRDGHRVESIMSLGFKDAKSLTPALLSEISDQVKTFLFAGQDTNSTALQWAFYELSRTPRARKAVCDELDAILGPETDPYKICELIAQEKESVFPRMHYINAVIKETLRLHPPAGTARMTAPGTGFTVRTSGGKEYCLDGLVMYMPQRIIHRNQEVFGDTADHWIPERWLEENNYPPGAYRPFERGPRNCAGVELANLESRIIIAVVTRNYEFTKMGLGESALDEKGFPVLNEHGQYKVKSELYNTRRITAKPVDGTVMRVRVSKQ

SEQ ID NO: 23304 - DNA, 2047 bp, Muscodor strobelii
  misc_feature: SGI EST ID NO. CUFF.54828.0
  misc_feature: Variant of the nucleotide sequence at SEQ ID NO 23302
tgtgtcgagagaatagctcagaaggactaagaatatccgccaggcactatgctcgaactgctgctattgggcgtcgttacgctacttaccacatgggtttacagtcgcttgaggtatcttcgatctgaacagtatgctcatctcccgcagctgaaaagcaatttgctttgggggcatctcaagacaatgggtgaactgatgaaacaggcgaggcccgcggataatgcagatgtagtcttcgagcggatgtggtcgtcgatcggccgccctcctgtcatgcttttcgacttccgaccgctcaacccacccatggtgatgataaccgatcacgaagtggccgaacagataaccaagtcatcgaaagatttccctctgagcacaccaaaatcatcgactgtcgatttcatggacccgatgattggagaggcctcgatgcttcgtatttcgggtagtcactggaaagagactcggaagatgtacaatcctgggttttcatctaaatacttgtcgtctcttctaccgcttatacttgatgaaatgaaaccattcctttcatacttggatcaatatgccgcctcaggaggtgaattctctcttgatcatctgttagcgaacctcacatttgatatcatcggagctgcagtgatgggtgtgagcctccaggcacagcacccgacagatcgaggagatctagtcaaaaagttcgaggatcttggtgaaacatactggggcgatacatctaatcttgcgtggtgggtgacaccgatcgtcaccgtcaagagacgtcgactatcaagacagatgaatcgattggtagaggatatcattaagcagcaatattacaaagccggacgagatgggcatcgagtggagagcatcatgtcgcttgggttcaaagacgccaaatcactcacaccagctttattatctgaaatatctgatcaggtcaagacgtttctctttgctggacaagacacgaattcaacagctttacaatgggccttttacgaattgagccgtacaccccgtgcgcggaaagcggtgtgtgatgaactagacgcaatattaggcccagagacagatccctacaagatatgtgagctaatcgcgcaggagaaagaaagtgttttccctcgcatgcattacatcaatgccgtaatcaaggagacacttcgcctccaccctcctgctggcacagctcgaatgactgctccaggcactggttttacggttcgcacgtcaggcggtaaggagtactgtcttgatgggcttgtcatgtatatgccacagaggattatacatcgcaaccaggaagtatttggcgacactgcggaccactggatccctgagcggtggctggaagagaacaattatccacccggcgcgtatcggccatttgagaggggaccgagaaattgcgccggtgttgagctcgcgaatcttgagtcaaggatcattatcgctgtcgtgacgcgaaattacgagttcacgaaaatgggtctcggcgaatctgcgctagacgagaaaggtttcccagtgctgaatgaacacggccaatacaaggtcaagtctgagttgtacaatactcgtcggatcactgcaaagccagtggatggcacagttatgagagtcagagtttcaaaacaatgagatgactcgattttcgtactgttgaaaaccttatattgttgacggtgcatctgcgtacgcagatagaggcgaccaccacatatacactcctaaacccctgcatcaggtgccaccgagcatggtgtattgcctcacaaccctgacttcgaataagtgagccacttcgtgacactaattagcagacgtaattagattcgcgatgtgaccatttctgtagcctttctagatcatgcctttctccgaaggaatgactgtcggcttgactacttctacttattcaattcactagtcgtatcaatacaaagctgctcaagagctctcggtagtgaagcgaaaggtgacgattgcaatatagataagatatgagcttgactgctaatgagcaacatgtccaacc

SEQ ID NO: 23305 - DNA, 624 bp, Muscodor strobelii
  misc_feature: SGI cDNA ID NO. 567926
  misc_feature: Encodes the peptide sequence at SEQ ID NO 23306
atgaagtttcttgccatcatctccatggcttgtgccctggttctgagtgccgtcattgataagctgcccggcggaatgtctgtcagaaacagccttccatacaactatactgtcggagacatcacttggaccttgcccattgctgaaggcggcgaggactacaccttcacaggcactgttcaggaagtctttgcaaaagtcaacaaggagcgcaagaagagaggtattgcccctctcgacgaacctaatgccaccaatggaaccatcgctccgcgctctctcgaggatcgagcctggaccaatacattgtgcaaggtcggtctacctggacctgcttcggtatctcgcatcacgcagggcatcaactacctgagcaaagttaagggccagtgtacaaacggagccggacctggaaactgcggtcgtatctcgtgcagttacaatgctgccatcttctggtgcaacgacaatgatcacgctgtcacgtacgactgctcgcactttgccgagtatgccgccaaagtcgtcgatttctgcagctactcggacggcggagatgtgacttggggccagtctttcgactccgacaacttcaacgttatggccggcaaggatagttgttaa

SEQ ID NO: 23306 - protein, 207 aa, Muscodor strobelii
  misc_feature: SGI Peptide ID NO. 567926
  misc_feature (36)..(207): NCBI GI: 121717032 Blast Desc: conserved [Aspergillus clavatus NRRL 1] gi|119404141|gb|EAW14558.1| conserved [Aspergillus clavatus NRRL 1]
  misc_feature (1)..(207): NCBI GI: 238839568 Blast Desc: [Microsporum canis CBS 113480]
  misc_feature (13)..(200): NCBI GI: 171679114 Blast Desc: protein product [Podospora anserina] gi|170937628|emb|CAP62287.1| protein product [Podospora anserina]
  misc_feature (1)..(207): NCBI GI: 256723698 Blast Desc: NECHADRAFT_86628 [Nectria haematococca mpVI 77-13-4]
  misc_feature (35)..(207): NCBI GI: 170940149 Blast Desc: protein product [Podospora anserina]
  misc_feature (9)..(207): NCBI GI: 46133985 Blast Desc: FG09132.1 [Gibberella zeae PH-1]
  misc_feature (9)..(207): NCBI GI: 171680404 Blast Desc: protein product [Podospora anserina] gi|170939829|emb|CAP65054.1| protein product [Podospora anserina]
  misc_feature (3)..(207): NCBI GI: 238486654 Blast Desc: conserved [Aspergillus flavus NRRL3357] gi|220699444|gb|EED55783.1| conserved [Aspergillus flavus NRRL3357]
  misc_feature (1)..(207): NCBI GI: 85111034 Blast Desc: NCU09372 [Neurospora crassa OR74A] gi|28925468|gb|EAA34507.1| [Neurospora crassa OR74A]
  misc_feature (111)..(207): NCBI GI: 261355532 Blast Desc: conserved [Verticillium albo-atrum VaMs.102]
MKFLAIISMACALVLSAVIDKLPGGMSVRNSLPYNYTVGDITWTLPIAEGGEDYTFTGTVQEVFAKVNKERKKRGIAPLDEPNATNGTIAPRSLEDRAWTNTLCKVGLPGPASVSRITQGINYLSKVKGQCTNGAGPGNCGRISCSYNAAIFWCNDNDHAVTYDCSHFAEYAAKVVDFCSYSDGGDVTWGQSFDSDNFNVMAGKDSC

SEQ ID NO: 23307 - DNA, 1533 bp, Muscodor strobelii
  misc_feature: SGI cDNA ID NO. 567927
  misc_feature: Encodes the peptide sequence at SEQ ID NO 23308
atgcccccccgaagatcccataagaagtccagagccggttgcaagcgctgcaaggcgaggaagatcaaatgcgatgaagtgcacccccgctgcggcaactgctccaagcacggcgtgccctgcgacttcgagcaccccaacattaaagacacctacacaccgacatctaacaaatcagacaacgagatacaacgaccgccctcctcagcgtccgcctcggcgcctccgtctgttgcccatgatggcagcccctccaacaccaccgaccacacgacgcccaccatggctgccactacgcccggcggcaatgcatccatgtataaaaacccagacatgaatcctttgcctgggagatcgaataagaatcgcatgctggagctgaggctgcttcatcattacattaccgtcacgagcgaaaccctggccatctcttcaccggtcagcaccatcagcgagaagatatggcgagagacggttccgcatctagccttctccggtgctggctacgttgcagacgcgttattagccgtggcagctcttcatatgcgatcgatcaacccgagggatcgagaagttgtgcaggcaggccattcttatatggcctcgactttatcggaatatggcgcgagtctgcgcgagggtatcactgagaccaatgctgaatcattgtttttaacagcagcactgattgctttccagtccacggcttctcgaatctttgcccgagaagatgtgagcgagccgactaatgtgtactcactacctatggcctggttccactctttccagggtgtcaaagcagtagtggcagcgagctggatgtggttgcgcaacagtagtatcgtcatacccatcatcgaatcacagcctgcgctaaacttggatctttctggcgacttgacgtttttcagtgacctcatggtgggggtcgaagaagaagtccaaaagttcgaggcagacaacctcaccacacagatgtcaacgcggatggcgtaccaacatgccattgctgtgctggactgggctcacaagattccccataccggagcgcctcttgtgtttctcgctactgtatcgcgccgcttcgtcgaattgctagagacccgaagaccccgcgccttagccatcctcgctagctacttcgccttgctcaaatgtctagacaacgtctggtggctcaagggcgtcgcgcgacgcgaaatcatgggcatcgtttcacttttcaatccagatgacgaagagtggtggccgagactacaatggccactacgaatcgcgcttcatgatgatccaatcattccgccccaagtctggggtgccgacttcctcgctgatgcgagtgttctggaacaaacgaaccaaagcggtggctttgtcagccatattgagcttgtcagcgagatgttctcatcaatgccccaggctgatcctgaggacctggaaccggctcatgaatatgtgcttgagcaacagaataatatgagggatcaaatgcttatccctgaagaattagagatattgccagttgattga

SEQ ID NO: 23308 - protein, 510 aa, Muscodor strobelii
  misc_feature: SGI Peptide ID NO. 567927
  misc_feature (12)..(50): Pfam Id: PF00172 Pfam Desc: Fungal Zn(2)-Cys(6) binuclear cluster domain
  misc_feature (12)..(41): Pfam Id: PF00172 Pfam Desc: Fungal Zn(2)-Cys(6) binuclear cluster domain
  misc_feature (1)..(471): NCBI GI: 85111025 Blast Desc: NCU08594 [Neurospora crassa OR74A] gi|28925463|gb|EAA34503.1| conserved [Neurospora crassa OR74A]
  misc_feature (1)..(472): NCBI GI: 171687595 Blast Desc: protein product [Podospora anserina] gi|170943759|emb|CAP69411.1| protein product [Podospora anserina]
  misc_feature (1)..(480): NCBI GI: 46108588 Blast Desc: FG01176.1 [Gibberella zeae PH-1]
  misc_feature (24)..(472): NCBI GI: 116180596 Blast Desc: CHGG_00926 [Chaetomium globosum CBS 148.51] gi|88185223|gb|EAQ92691.1| CHGG_00926 [Chaetomium globosum CBS 148.51]
  misc_feature (1)..(470): NCBI GI: 256734378 Blast Desc: [Nectria haematococca mpVI 77-13-4]
  misc_feature (169)..(470): NCBI GI: 261357613 Blast Desc: conserved [Verticillium albo-atrum VaMs.102]
  misc_feature (122)..(394): NCBI GI: 145614778 Blast Desc: MGG_10381 [Magnaporthe grisea 70-15] gi|145021663|gb|EDK05792.1| MGG_10381 [Magnaporthe grisea 70-15]
  misc_feature (152)..(470): NCBI GI: 156063170 Blast Desc: SS1G_01701 [Sclerotinia sclerotiorum 1980] gi|154697037|gb|EDN96775.1| SS1G_01701 [Sclerotinia sclerotiorum 1980]
  misc_feature (155)..(476): NCBI GI: 154308984 Blast Desc: BC1G_08020 [Botryotinia fuckeliana B05.10] gi|150852646|gb|EDN27838.1| BC1G_08020 [Botryotinia fuckeliana B05.10]
  misc_feature (12)..(421): NCBI GI: 256733788 Blast Desc: NECHADRAFT_99482 [Nectria haematococca mpVI 77-13-4]
MPPRRSHKKSRAGCKRCKARKIKCDEVHPRCGNCSKHGVPCDFEHPNIKDTYTPTSNKSDNEIQRPPSSASASAPPSVAHDGSPSNTTDHTTPTMAATTPGGNASMYKNPDMNPLPGRSNKNRMLELRLLHHYITVTSETLAISSPVSTISEKIWRETVPHLAFSGAGYVADALLAVAALHMRSINPRDREVVQAGHSYMASTLSEYGASLREGITETNAESLFLTAALIAFQSTASRIFAREDVSEPTNVYSLPMAWFHSFQGVKAVVAASWMWLRNSSIVIPIIESQPALNLDLSGDLTFFSDLMVGVEEEVQKFEADNLTTQMSTRMAYQHAIAVLDWAHKIPHTGAPLVFLATVSRRFVELLETRRPRALAILASYFALLKCLDNVWWLKGVARREIMGIVSLFNPDDEEWWPRLQWPLRIALHDDPIIPPQVWGADFLADASVLEQTNQSGGFVSHIELVSEMFSSMPQADPEDLEPAHEYVLEQQNNMRDQMLIPEELEILPVD

SEQ ID NO: 23309 - DNA, 3243 bp, Muscodor strobelii
  misc_feature: SGI EST ID NO. CUFF.54909.0
  misc_feature: Variant of the nucleotide sequence at SEQ ID NO 23307
ccaccgtagaattcccaaaaagttgaaacgcaacagagaacgaaacaaaacccacgtttccacacccatcagtgctttagctcgcccacagtaaaaggcccggattgttggaaggtcccttcggtcccttgacctgctggttccttggtagctcccgtctgtgccgctactttcgcgggcttgggtgggcaattgaactgggtccgggcaggcatctcagccaagccaacagtaggaggagctgccgcttgctgacctgatcggaatccttcctcttgcgtttttgttatctctgaatctgtctggacgaggtgctcttgtccatcgagaccatagcataatagctgacaactttctgtcctgaatcaccgtagcatcgccaacaaataatgagccaatgcctcgagcatcgcctgtccacctcttccttcatggcggccaagtccactcactgtactcctagtagctatttgtctaaggcccatttcttgcattgcgggactctgtgatagcttcagagctgcgtagctgctccggcaggcatagcgttcaacaccatgcccccccgaagatcccataagaagtccagagccggttgcaagcgctgcaaggcgaggaagatcaaatgcgatgaagtgcacccccgctgcggcaactgctccaagcacggcgtgccctgcgacttcgagcaccccaacattaaagacacctacacaccgacatctaacaaatcagacaacgagatacaacgaccgccctcctcagcgtccgcctcggcgcctccgtctgttgcccatgatggcagcccctccaacaccaccgaccacacgacgcccaccatggctgccactacgcccggcggcaatgcatccatgtataaaaacccagacatgaatcctttgcctgggagatcgaataagaatcgcatgctggagctgaggctgcttcatcattacattaccgtcacgagcgaaaccctggccatctcttcaccggtcagcaccatcagcgagaagatatggcgagagacggttccgcatctagccttctccggtgctggctacgttgcagacgcgttattagccgtggcagctcttcatatgcgatcgatcaacccgagggatcgagaagttgtgcaggcaggccattcttatatggcctcgactttatcggaatatggcgcgagtctgcgcgagggtatcactgagaccaatgctgaatcattgtttttaacagcagcactgattgctttccagtccacggcttctcgaatctttgcccgagaagatgtgagcgagccgactaatgtgtactcactacctatggcctggttccactctttccagggtgtcaaagcagtagtggcagcgagctggatgtggttgcgcaacagtagtatcgtcatacccatcatcgaatcacagcctgcgctaaacttggatctttctggcgacttgacgtttttcagtgacctcatggtgggggtcgaagaagaagtccaaaagttcgaggcagacaacctcaccacacagatgtcaacgcggatggcgtaccaacatgccattgctgtgctggactgggctcacaagattccccataccggagcgcctcttgtgtttctcgctactgtatcgcgccgcttcgtcgaattgctagagacccgaagaccccgcgccttagccatcctcgctagctacttcgccttgctcaaatgtctagacaacgtctggtggctcaagggcgtcgcgcgacgcgaaatcatgggcatcgtttcacttttcaatccagatgacgaagagtggtggccgagactacaatggccactacgaatcgcgcttcatgatgatccaatcattccgccccaagtctggggtgccgacttcctcgctgatgcgagtgttctggaacaaacgaaccaaagcggtggctttgtcagccatattgagcttgtcagcgagatgttctcatcaatgccccaggctgatcctgaggacctggaaccggctcatgaatatgtgcttgagcaacagaataatatgagggatcaaatgcttatccctgaagaattagagatattgccagttgattgagctcatctccagttacaggatttactattattaccggcgcgggttgaacccgcctctgtctggcaacgccttgcgtgatgcaggactatgactgcgtctatgtcgaacggcgatgtcgacattctggagtgtatggcctgacatctgctcattagtagttccaacccgccctcagcgtgatctggagactacatccatgaataagtcttgaccgagtcttttgctccccgattgttgtacgcactgagcgttacatgactagtcggagttgaattactatttgatccatacgctgccgacactgcccacgctgtgccgcctctatggcaaaaccagtaacgaccttagacattacgctcaacctgcgcctttggccctcgtccgcatacactatcccgctgggcccttacacccgtcattggtgtcggatcttcgagacgagcaagagtggacggcactgtacatcgaccttgccttgtcatggccgctactctgaagaaaccagtattaggcagaacagagttattcctggaacgaacgctgagcacagtatcgcgacgttactttttacattgttataacatacgcaacaaagtcgatgcttgtggcaacacaatttgttgcacacatcaccgcttacgcgcgcttctcacgaataatgtatcggagatggcaggcttttcattttaagcaagtcaccaatacgtgggaaacaagcggcagcgctcatgaccatcgcctcgtgagttggcgcgaaggtagcactggagttcagtgtgaccccaggacggttagtctatataaatacacagcaattcagcaatgatttacgaatccatatgacgaaagcgagccttttcggagccttctctccgaagtccgaatgcgtggaagaatatgcagcggtcaacagatggatagtctagttcctctcgtacttttatatatagacctgcgcttcgcaggacgcgaaagaccatagaggcttcgaagcctaggaggttatgaggagcttagatctatcttacgtaatgagaataggatatttcaagaagatttgaatacttgataccgcattgcaacgtaggtagctaaaaacctcccacaacaatgtacgacttatcatcttctgagtcaatatgcacgtacttag

SEQ ID NO: 23310 - DNA, 1413 bp, Muscodor strobelii
  misc_feature: SGI cDNA ID NO. 567928
  misc_feature: Encodes the peptide sequence at SEQ ID NO 23311
atgcctggagccaaagaggcatcgtacacaagcgcacgtacgaattatggcgaagttctaaagacccctggactagcctacgatcgaacgatcaatcgcactaaagatgatgatacgggttttaacaccgcaagaacatgccgactggggaagcctggggaatcagtgcaacatctcgaagatctaccggccgagttgagaacaatgatcctagtgaatatgccaactttgacaactttgcgttcgctgatatacgcctcgcctgtcatgaacgctcagtttcgaaacaacccacgcctaattcttcaagaatgcttgcatcgtgaggtggatggcttcattgtcgacgcctatgctactgccatgtcactaccacagagcctgcccgtgagatcgactcaaacgatcaaacagttcatgcgcacatacgagacgtcgctacaaaaggatgaagtcacgattatgatgtcaattgatccgcattgcatcgagtggcttgtggcgttccacatgcgcgtcgctcaaccgttggctcgaatgtacactgactgggctcttcgaatggtgcgaaatcaaacagcggaatggagcacaaagcagcatgtggcgaataacgacaccagcttgagcagagcagaggaaatccgtatttttcgagctctttatcgctatcagacttatcaacacctgttcggtcgaaacaagaccgttcgacggggtagttttctaaaatttgagaataatgaggtgttcttctgcaactttgacccctgggaggtagaagagatcggctgcatggacatattcatgagaaacgcatatgagtctttattcaacgaggtgaaggtagatctggatcctaagaacccgcggttcaggcagccgaatggggtctacaacccccaaggctcggtagatttggagctagagcacgacgatctcatgaatggaacaatttctttaggtttaccaacagctgtgcatttgttgtcgatcaaagaccatgagaaactcgttatcgaaatggagcaaaacgttgcgtatttccacaaccaagatgcaaccgtggaagaggcactacagatcggtgcgcagttcgatcggcgcgatgatccgtcccatgccttcaacgcccgagatttggcagagcagagacgagaaaagatccagttcgtcggagatctcgatccccctaagtcggccccattcgcctgggttgctctctggggtggcaagtattctaatctctatggcgaatatgtgccctttgcactgaggctacgtagctacgtcatgtgggatcagcgccgatgggaggatatgggagttgacgagactcacattgtggcacaatggattcctgctcttcttgatgagatcgaaaatctgaatgactggaggccagatgtgtga

SEQ ID NO: 23311 - protein, 470 aa, Muscodor strobelii
  misc_feature: SGI Peptide ID NO. 567928
  misc_feature (59)..(452): NCBI GI: 238504638 Blast Desc: conserved [Aspergillus flavus NRRL3357] gi|220691021|gb|EED47370.1| conserved [Aspergillus flavus NRRL3357]
  misc_feature (59)..(421): NCBI GI: 116201281 Blast Desc: CHGG_08525 [Chaetomium globosum CBS 148.51] gi|88177043|gb|EAQ84511.1| CHGG_08525 [Chaetomium globosum CBS 148.51]
  misc_feature (59)..(432): NCBI GI: 115449853 Blast Desc: [Aspergillus terreus NIH2624] gi|114187662|gb|EAU29362.1| [Aspergillus terreus NIH2624]
  misc_feature (43)..(467): NCBI GI: 145228595 Blast Desc: An01g01670 [Aspergillus niger] gi|134054697|emb|CAK43538.1| protein product [Aspergillus niger]
  misc_feature (56)..(422): NCBI GI: 256727223 Blast Desc: NECHADRAFT_75869 [Nectria haematococca mpVI 77-13-4]
  misc_feature (46)..(452): NCBI GI: 256725269 Blast Desc: NECHADRAFT_82982 [Nectria haematococca mpVI 77-13-4]
  misc_feature (57)..(279): NCBI GI: 242760006 Blast Desc: TSTA_060120 [Talaromyces stipitatus ATCC 10500] gi|218723097|gb|EED22514.1| TSTA_060120 [Talaromyces stipitatus ATCC 10500]
  misc_feature (59)..(308): NCBI GI: 256730223 Blast Desc: NECHADRAFT_82499 [Nectria haematococca mpVI 77-13-4]
  misc_feature (166)..(307): NCBI GI: 115397721 Blast Desc: [Aspergillus terreus NIH2624] gi|114192643|gb|EAU34343.1| [Aspergillus terreus NIH2624]
  misc_feature (54)..(455): NCBI GI: 171693521 Blast Desc: protein product [Podospora anserina] gi|170946709|emb|CAP73512.1| protein product [Podospora anserina]
MPGAKEASYTSARTNYGEVLKTPGLAYDRTINRTKDDDTGFNTARTCRLGKPGESVQHLEDLPAELRTMILVNMPTLTTLRSLIYASPVMNAQFRNNPRLILQECLHREVDGFIVDAYATAMSLPQSLPVRSTQTIKQFMRTYETSLQKDEVTIMMSIDPHCIEWLVAFHMRVAQPLARMYTDWALRMVRNQTAEWSTKQHVANNDTSLSRAEEIRIFRALYRYQTYQHLFGRNKTVRRGSFLKFENNEVFFCNFDPWEVEEIGCMDIFMRNAYESLFNEVKVDLDPKNPRFRQPNGVYNPQGSVDLELEHDDLMNGTISLGLPTAVHLLSIKDHEKLVIEMEQNVAYFHNQDATVEEALQIGAQFDRRDDPSHAFNARDLAEQRREKIQFVGDLDPPKSAPFAWVALWGGKYSNLYGEYVPFALRLRSYVMWDQRRWEDMGVDETHIVAQWIPALLDEIENLNDWRPDV

SEQ ID NO: 23312 - DNA, 1434 bp, Muscodor strobelii
  misc_feature: SGI cDNA ID NO. 567929
  misc_feature: Elevated expression when VOC is produced
  misc_feature: Encodes the peptide sequence at SEQ ID NO 23313
atgacactcagctctaaaggagctgtccaagctcaactcggatcagaattagctggttccagagacgattgccttgagagcagtcggcactggctcgagacaacgttgagcccgatttctctactggagaatttgccggcggagttgagatctcttatcctgctgcacgtacctgacttgtgtacactacgcgccctcgtcaaagcatcaccggtgatgcatgcccaatatcaacatgggcgcaacaggattctacgcacatgtctgtatcgcgaattgaatgggttcttccctgatgcctatgcgacggttatgtctcgagtggagaggctagagactaggactgataaagttattacccgacacctgggtgcctatgcggactggcttgcagatccatctgtaggaccagacgtggacttgatcaccgcttctcgcattcgctggatggtgactttccacatgtctgttgctcagccacttgctcgcttctatagtgattgggccctctccaacttgcatagagcagtatcatcattaagagctcaacaagacgagccagaccatgaaacggaaaagggaatcaaaaacatacctgttacgacaaatggccgtgaactaagccgcgctgaacaaatacggatctatcgggcactctaccgctttcaaacttatcaacatctttttggtcacaataaagcccggcgccatggttcgatgaccagctatgagatcaatgagttgttcttctgcaaattcgatccttgggaagccgaagcagtcggctgtatcgaaaggtttataaggaatagatacgaacatatctttgatgacgtgaaacgagatctatctccaaaaaacactcgctttctgcaagagaacggcgtcttcaatcctgaaggctctgtcgatttagataacgagcatgacagctacatggatggaacaattgctcatggccttaaaatgatggtacaattactgcagattgacaaccacgaaaagctcgtcacgaaaacgcaacgttgccttacccgattccccaacgctgacgcgactatagaggacgcgcttggtatagtggctcagcttgaccgacgtgaggagttatctcagagcctcactagcgatgatgatgctcaacaaagacgagagccaatgcatttcgctggcgacgcattgtcagccgagtcggctcctttcgcatggattgctttatgggaagaaaaatattctaatatctatggagaatatgtgccgcattcgctaagagattggggttacgtaatatgggatcaacggcgatgggccaatttacacgtaaacgcaggtttcattgcgaatcaatggttggtagagccagagctcatggaagtcattgaaacccactactcctggcggcctggtacgatcttcgccgcaccaccagaataa

SEQ ID NO: 23313 - protein, 477 aa, Muscodor strobelii
  misc_feature: SGI Peptide ID NO. 567929
  misc_feature (5)..(450): NCBI GI: 238504638 Blast Desc: conserved [Aspergillus flavus NRRL3357] gi|220691021|gb|EED47370.1| conserved [Aspergillus flavus NRRL3357]
  misc_feature (42)..(430): NCBI GI: 116201281 Blast Desc: CHGG_08525 [Chaetomium globosum CBS 148.51] gi|88177043|gb|EAQ84511.1| CHGG_08525 [Chaetomium globosum CBS 148.51]
  misc_feature (42)..(430): NCBI GI: 115449853 Blast Desc: [Aspergillus terreus NIH2624] gi|114187662|gb|EAU29362.1| [Aspergillus terreus NIH2624]
  misc_feature (42)..(435): NCBI GI: 145228595 Blast Desc: An01g01670 [Aspergillus niger] gi|134054697|emb|CAK43538.1| protein product [Aspergillus niger]
  misc_feature (42)..(435): NCBI GI: 256725269 Blast Desc: NECHADRAFT_82982 [Nectria haematococca mpVI 77-13-4]
  misc_feature (39)..(420): NCBI GI: 256727223 Blast Desc: NECHADRAFT_75869 [Nectria haematococca mpVI 77-13-4]
  misc_feature (37)..(451): NCBI GI: 171693521 Blast Desc: protein product [Podospora anserina] gi|170946709|emb|CAP73512.1| protein product [Podospora anserina]
  misc_feature (42)..(277): NCBI GI: 242760006 Blast Desc: TSTA_060120 [Talaromyces stipitatus ATCC 10500] gi|218723097|gb|EED22514.1| TSTA_060120 [Talaromyces stipitatus ATCC 10500]
  misc_feature (150)..(305): NCBI GI: 115397721 Blast Desc: [Aspergillus terreus NIH2624] gi|114192643|gb|EAU34343.1| [Aspergillus terreus NIH2624]
  misc_feature (42)..(307): NCBI GI: 256730223 Blast Desc: NECHADRAFT_82499 [Nectria haematococca mpVI 77-13-4]
  misc_feature: Useful for introducing or modulating the production of volatile compounds
MTLSSKGAVQAQLGSELAGSRDDCLESSRHWLETTLSPISLLENLPAELRSLILLHVPDLCTLRALVKASPVMHAQYQHGRNRILRTCLYRELNGFFPDAYATVMSRVERLETRTDKVITRHLGAYADWLADPSVGPDVDLITASRIRWMVTFHMSVAQPLARFYSDWALSNLHRAVSSLRAQQDEPDHETEKGIKNIPVTTNGRELSRAEQIRIYRALYRFQTYQHLFGHNKARRHGSMTSYEINELFFCKFDPWEAEAVGCIERFIRNRYEHIFDDVKRDLSPKNTRFLQENGVFNPEGSVDLDNEHDSYMDGTIAHGLKMMVQLLQIDNHEKLVTKTQRCLTRFPNADATIEDALGIVAQLDRREELSQSLTSDDDAQQRREPMHFAGDALSAESAPFAWIALWEEKYSNIYGEYVPHSLRDWGYVIWDQRRWANLHVNAGFIANQWLVEPELMEVIETHYSWRPGTIFAAPPE

SEQ ID NO: 23314 - DNA, 2332 bp, Muscodor strobelii
  misc_feature: SGI EST ID NO. CUFF.54867.0
  misc_feature: Variant of the nucleotide sequence at SEQ ID NO 23312
ctacctgatccgtatcatatcacgctcatctaggattttccccggctcatttttgtttcattgctgctatctacgagacgtaggtaactcccactcatcatcctctacgctgctactctatcatttcgaagtacgctggaacaagatgacactcagctctaaaggagctgtccaagctcaactcggatcagaattagctggttccagagacgattgccttgagagcagtcggcactggctcgagacaacgttgagcccgatttctctactggagaatttgccggcggagttgagatctcttatcctgctgcacgtacctgacttgtgtacactacgcgccctcgtcaaagcatcaccggtgatgcatgcccaatatcaacatgggcgcaacaggattctacgcacatgtctgtatcgcgaattgaatgggttcttccctgatgcctatgcgacggttatgtctcgagtggagaggctagagactaggactgataaagttattacccgacacctgggtgcctatgcggactggcttgcagatccatctgtaggaccagacgtggacttgatcaccgcttctcgcattcgctggatggtgactttccacatgtctgttgctcagccacttgctcgcttctatagtgattgggccctctccaacttgcatagagcagtatcatcattaagagctcaacaagacgagccagaccatgaaacggaaaagggaatcaaaaacatacctgttacgacaaatggccgtgaactaagccgcgctgaacaaatacggatctatcgggcactctaccgctttcaaacttatcaacatctttttggtcacaataaagcccggcgccatggttcgatgaccagctatgagatcaatgagttgttcttctgcaaattcgatccttgggaagccgaagcagtcggctgtatcgaaaggtttataaggaatagatacgaacatatctttgatgacgtgaaacgagatctatctccaaaaaacactcgctttctgcaagagaacggcgtcttcaatcctgaaggctctgtcgatttagataacgagcatgacagctacatggatggaacaattgctcatggccttaaaatgatggtacaattactgcagattgacaaccacgaaaagctcgtcacgaaaacgcaacgttgccttacccgattccccaacgctgacgcgactatagaggacgcgcttggtatagtggctcagcttgaccgacgtgaggagttatctcagagcctcactagcgatgatgatgctcaacaaagacgagagccaatgcatttcgctggcgacgcattgtcagccgagtcggctcctttcgcatggattgctttatgggaagaaaaatattctaatatctatggagaatatgtgccgcattcgctaagagattggggttacgtaatatgggatcaacggcgatgggccaatttacacgtaaacgcaggtttcattgcgaatcaatggttggtagagccagagctcatggaagtcattgaaacccactactcctggcggcctggtacgatcttcgccgcaccaccagaataagacactagggtgtctataatactgattgggttccttgaaggcagatattctcactagtatgccagttattcaggtcctcgccatatgcaatcagcgattctcgcgcaagcgtcatacagggcttaagattatatgtacacaggtgccattcaactatctatatgatagtaaagttaaataattagtcagaactttggactagctagagtgctttcttaggcttccgcgatcatggtgctctccactctgcgagagaagtgaatgccggcctagcatggaaggatgggcttgaaatacgaggcatcatgcatgtatcattttgcaaatccgtcgaaagagaactttgaatttgaagcgagcgtcgatcatgtcgccagcttccctcaacgatttcaaaaggatgagcacagaagctaaaaacacagagcagcggagtttcggaattccgaactcccgatttgtgtattcgatactggaacgcatgtttcgttggagtccgccggatttgtaccatcattattatataaatctgtacgcatggtcttaatgtcttgctataaatcgcaatacgcattgcggcgaaagaagaggtagttgacatttgttgttttgtgtctttatttgaaacatggcggccactcacgctgcaaccgccgatcaatggggaacggaggcggaaaagagtctcaacgagaagtcctggagggacaaaatgttcctcgacacaattccctgggagcatgaacggtttcg

SEQ ID NO: 23315 - DNA, 906 bp, Muscodor strobelii
  misc_feature: SGI cDNA ID NO. 567930
  misc_feature: Encodes the peptide sequence at SEQ ID NO 23316
atggcggccactcacgctgcaaccgccgatcaatggggaacggaggcggaaaagagtctcaacgagaagtcctggagggacaaaatgttcctcgacacaattccctgggagcatgaacggtttcgcgagctgttggaaaaatacagtaaaatccccaaggatcaaattacaccagagattttcaagattcggaacaaagcatgggaagttgcaaagtatccatgcgttggttccttcacctacgtccgcctccatgaattcggcagcaacaatccggaaatgcagagcgtcattgagcggctgaaggcccctgaatcccgagacacgtttcttgagctcggtgggttcatttgtcaaacaattcggcagcttgtatacgagggcatcgactccacccggttgtatggtaccgatctgcatccggagttcatcgagttgggatacgagcaattccgcgaccgtgacacattgaaatctacctttgtagcaggggacatgctcctcccagacgaagagtatgcaatttctgatctttccaaaactctagacggcaagatttcaattgtgcacgcgtcgaatttctttcacctttttagctgggagacacagctcatcatctgcgagcggatcgtccgcttccttcgacgtgatttgacaggacaggagccggctatcgtattcgggacacattctggtagcatcaagccaggcaagatagagcactttagtgtgttcctccatgacgagtcaacttttcaaactctgtgggatgaggtcgggaagaaaacggatacgcgctggacagttagcatgcaacctgtttcgaactcgcctccgaagccgaatgctttcggggagaactcgagaatcatgcgatatgttgttagagagtctgtagcgaaatga

SEQ ID NO: 23316 - protein, 301 aa, Muscodor strobelii
  misc_feature: SGI Peptide ID NO. 567930
  misc_feature (19)..(297): NCBI GI: 46128027 Blast Desc: FG08391.1 [Gibberella zeae PH-1]
  misc_feature (2)..(296): NCBI GI: 242809401 Blast Desc: conserved [Talaromyces stipitatus ATCC 10500] gi|218715986|gb|EED15408.1| conserved [Talaromyces stipitatus ATCC 10500]
  misc_feature (42)..(296): NCBI GI: 145246226 Blast Desc: An12g02830 [Aspergillus niger] gi|134080076|emb|CAK41122.1| protein product [Aspergillus niger]
  misc_feature (22)..(296): NCBI GI: 238483841 Blast Desc: conserved [Aspergillus flavus NRRL3357] gi|220701209|gb|EED57547.1| conserved [Aspergillus flavus NRRL3357]
  misc_feature (39)..(269): NCBI GI: 255936301 Blast Desc: Pc13g07470 [Penicillium chrysogenum Wisconsin 54-1255] gi|211583797|emb|CAP91816.1| Pc13g07470 [Penicillium chrysogenum Wisconsin 54-1255]
  misc_feature (24)..(296): NCBI GI: 169610844 Blast Desc: SNOG_08529 [Phaeosphaeria nodorum SN15] gi|111062577|gb|EAT83697.1| SNOG_08529 [Phaeosphaeria nodorum SN15]
  misc_feature (42)..(269): NCBI GI: 169615148 Blast Desc: SNOG_10728 [Phaeosphaeria nodorum SN15] gi|111061002|gb|EAT82122.1| SNOG_10728 [Phaeosphaeria nodorum SN15]
  misc_feature (41)..(269): NCBI GI: 189202166 Blast Desc: conserved [Pyrenophora tritici-repentis Pt-1C-BFP] gi|187984518|gb|EDU50006.1| conserved [Pyrenophora tritici-repentis Pt-1C-BFP]
  misc_feature (62)..(274): NCBI GI: 154320562 Blast Desc: BC1G_01753 [Botryotinia fuckeliana B05.10] gi|150853442|gb|EDN28634.1| BC1G_01753 [Botryotinia fuckeliana B05.10]
  misc_feature (31)..(296): NCBI GI: 189207667 Blast Desc: conserved [Pyrenophora tritici-repentis Pt-1C-BFP] gi|187976260|gb|EDU42886.1| conserved [Pyrenophora tritici-repentis Pt-1C-BFP]
MAATHAATADQWGTEAEKSLNEKSWRDKMFLDTIPWEHERFRELLEKYSKIPKDQITPEIFKIRNKAWEVAKYPCVGSFTYVRLHEFGSNNPEMQSVIERLKAPESRDTFLELGGFICQTIRQLVYEGIDSTRLYGTDLHPEFIELGYEQFRDRDTLKSTFVAGDMLLPDEEYAISDLSKTLDGKISIVHASNFFHLFSWETQLIICERIVRFLRRDLTGQEPAIVFGTHSGSIKPGKIEHFSVFLHDESTFQTLWDEVGKKTDTRWTVSMQPVSNSPPKPNAFGENSRIMRYVVRESVAK

SEQ ID NO: 23317 - DNA, 1347 bp, Muscodor strobelii
  misc_feature: SGI cDNA ID NO. 567931
  misc_feature: Encodes the peptide sequence at SEQ ID NO 23318
atgcgacatggtccaaaccgcctagttttcaactccgccgaagcagtacgtgacatttaccagaatcctagagtcactaagtcgtcagtgtactctcatgttgctgcggagggagcgacatttatattcaatgctattcgccctgatgtgcaccttagaaaacgcaaaatcatcgccccagctctcaccgaacgatctatgcgccttttcgaacctacggtagttaagcaggtcgaggtgttcctgggccatctgtttcgagcagctagcgcagatgataatatcccaacggaaccccttaatttgaccgacctgtccaaacgactcacaatggacgtcgcgggtcatcttggcttcggcttcccgcttggcttacaaacacaagaaacccatcacttcattctcgacggcattagtgctgctaatttccgggtcaatgcttacatgaattatcctttcctctcaaagctgcaacttgaccgtatctttaagttgaacccaatacgactcaaatggaggcaactcattgggcagatgatatctgcgcgccttgcgcaaagtatagatgcagtacacgacttttactcgttcgtagcaggtaatctggatgctgcgacgggtgacataaaacaaagcgagcttttcaatgaatctgtcttctttatgtcagcagctggtgacaccgtctcggtcgcaattgcggctctttttttctacctatcacgatatccggcatgctatgctgctcttgccaatgagatacgcacaactttcgagtcggagagcgaaatcagaggaggaccaaaactgtctagctgtgtttatctccgcgcgtgcattgatgaggccctgcggatgtcgcctccaattgctgggactctatggcgtcagcttgatggtagcaacgaaaaaggccgctttgagccgcttgtaatagatggtgtcgtcattcctcgtggaacacatgtgggtgtcaacatatactcaattcatcataacgaagagtattttccagatcctttcgcgttcaagccggagcgatggctagcgggcaccgagaagtcaaagagctacggcgtcaacgcccagaagacatttcttcccttttctgttggtgttcgctcatgtgccggaaagtcgctcgcgtatcttgaaccgagtctaattttggcaatgacactttggaattttgacttcgaagcaccgaataaccatcttagtactattggtggcggacgctcgagccttggtgaaggtagaagaatcgctaaagagtttcagttagatgatgtactcacgtcacgtcatgatggaccatatttggtcttcaagtctcgagtaccttga

SEQ ID NO: 23318 - protein, 448 aa, Muscodor strobelii
  misc_feature: SGI Peptide ID NO. 567931
  misc_feature (1)..(425): Pfam Id: PF00067 Pfam Desc: Cytochrome P450
  misc_feature (221)..(400): Pfam Id: PF00067 Pfam Desc: Cytochrome P450
  misc_feature (1)..(446): NCBI GI: 145256217 Blast Desc: An10g00660 [Aspergillus niger CBS 513.88] gi|134078632|emb|CAK40505.1| protein product [Aspergillus niger]
  misc_feature (1)..(447): NCBI GI: 258572362 Blast Desc: conserved [Uncinocarpus reesii 1704] gi|237905213|gb|EEP79614.1| conserved [Uncinocarpus reesii 1704]
  misc_feature (6)..(447): NCBI GI: 145241738 Blast Desc: An09g02000 [Aspergillus niger] gi|134078055|emb|CAK40138.1| protein product [Aspergillus niger]
  misc_feature (1)..(446): NCBI GI: 255954725 Blast Desc: Pc21g10830 [Penicillium chrysogenum Wisconsin 54-1255] gi|211589826|emb|CAP95980.1| Pc21g10830 [Penicillium chrysogenum Wisconsin 54-1255]
  misc_feature (1)..(446): NCBI GI: 145608110 Blast Desc: MGG_03375 [Magnaporthe grisea 70-15] gi|145015610|gb|EDK00100.1| MGG_03375 [Magnaporthe grisea 70-15]
  misc_feature (149)..(446): NCBI GI: 156056276 Blast Desc: SS1G_05490 [Sclerotinia sclerotiorum 1980] gi|154703274|gb|EDO03013.1| SS1G_05490 [Sclerotinia sclerotiorum 1980]
  misc_feature (1)..(446): NCBI GI: 242771379 Blast Desc: cytochrome P450, [Talaromyces stipitatus ATCC 10500] gi|218721449|gb|EED20867.1| cytochrome P450, [Talaromyces stipitatus ATCC 10500]
  misc_feature (1)..(446): NCBI GI: 85092131 Blast Desc: NCU06895 [Neurospora crassa OR74A] gi|28920645|gb|EAA30006.1| conserved [Neurospora crassa OR74A]
  misc_feature (1)..(447): NCBI GI: 121710976 Blast Desc: benzoate 4-monooxygenase cytochrome P450 [Aspergillus clavatus NRRL 1] gi|119401254|gb|EAW11678.1| benzoate 4-monooxygenase cytochrome P450 [Aspergillus clavatus NRRL 1]
  misc_feature (1)..(446): NCBI GI: 169621787 Blast Desc: SNOG_14106 [Phaeosphaeria nodorum SN15] gi|160704625|gb|EAT78343.2| SNOG_14106 [Phaeosphaeria nodorum SN15]
  misc_feature (53)..(400): SWISSPROT Homolog: EC 1.14.14.1 Unspecific monooxygenase
MRHGPNRLVFNSAEAVRDIYQNPRVTKSSVYSHVAAEGATFIFNAIRPDVHLRKRKIIAPALTERSMRLFEPTVVKQVEVFLGHLFRAASADDNIPTEPLNLTDLSKRLTMDVAGHLGFGFPLGLQTQETHHFILDGISAANFRVNAYMNYPFLSKLQLDRIFKLNPIRLKWRQLIGQMISARLAQSIDAVHDFYSFVAGNLDAATGDIKQSELFNESVFFMSAAGDTVSVAIAALFFYLSRYPACYAALANEIRTTFESESEIRGGPKLSSCVYLRACIDEALRMSPPIAGTLWRQLDGSNEKGRFEPLVIDGVVIPRGTHVGVNIYSIHHNEEYFPDPFAFKPERWLAGTEKSKSYGVNAQKTFLPFSVGVRSCAGKSLAYLEPSLILAMTLWNFDFEAPNNHLSTIGGGRSSLGEGRRIAKEFQLDDVLTSRHDGPYLVFKSRVP

SEQ ID NO: 23319 - DNA, 789 bp, Muscodor strobelii
  misc_feature: SGI cDNA ID NO. 567932
  misc_feature: Encodes the peptide sequence at SEQ ID NO 23320
atgatcaccacccaaagtcttcctccaattccttgcgacacaactggctaccgagtccaatcaacggcgatctaccgcctagatattgacacgggcgaggagacaacattcagctctcaagtgggcatgggcgaggtcagcgccatgggatataacaccagagacaatcgactatacgcagtcgacaatatagacagtggtactcgacttgcaaataacaaccttatagtgatcggcggcaatggtgcttacaagcatgttgcgactttacctaggacgccgtcactcgcagcctatgacataggcgacgtggatgatcttggccccggttatttcacaaatagtcaagattggtattatgtcaaagtcgacgttgatcccaggtctagtacctacggctcaattctggcccaagggagcccgacgccgcccgaattccgccccggggattgggctatcatcaacagccaattgctatacgggctcggcaccgacacgggccaaaaccacacagtcttagtgtatttcgaaatagcgtcagcaacttggaagaccgaccaggacttcggtcccattgctggcactaacgtctggagctctgtgtatgcaggctcagatctaacgatatatggtcaagaagacaccactggtcagatctggcggtttccgatcccagactcgaactttggtccgccgcagataatctcgcaagcgactccacagcctcctataagcgatggagctttatgtctcgaggctactattggattcaagagagatacgcagtga

SEQ ID NO: 23320 - protein, 262 aa, Muscodor strobelii
  misc_feature: SGI Peptide ID NO. 567932
  misc_feature (138)..(253): NCBI GI: 46140247 Blast Desc: FG11638.1 [Gibberella zeae PH-1]
  misc_feature (8)..(250): NCBI GI: 2352910 Blast Desc: proline rich protein 5MeD [Metarhizium anisopliae]
  misc_feature (4)..(250): NCBI GI: 2352910 Blast Desc: proline rich protein 5MeD [Metarhizium anisopliae]
  misc_feature (8)..(255): NCBI GI: 255034344 Blast Desc: Dfer_0535 [Dyadobacter fermentans DSM 18053] gi|254947100|gb|ACT91800.1| Dfer_0535 [Dyadobacter fermentans DSM 18053]
  misc_feature (7)..(255): NCBI GI: 46117462 Blast Desc: FG04573.1 [Gibberella zeae PH-1]
MITTQSLPPIPCDTTGYRVQSTAIYRLDIDTGEETTFSSQVGMGEVSAMGYNTRDNRLYAVDNIDSGTRLANNNLIVIGGNGAYKHVATLPRTPSLAAYDIGDVDDLGPGYFTNSQDWYYVKVDVDPRSSTYGSILAQGSPTPPEFRPGDWAIINSQLLYGLGTDTGQNHTVLVYFEIASATWKTDQDFGPIAGTNVWSSVYAGSDLTIYGQEDTTGQIWRFPIPDSNFGPPQIISQATPQPPISDGALCLEATIGFKRDTQ

SEQ ID NO: 23321 - DNA, 1053 bp, Muscodor strobelii
  misc_feature: SGI cDNA ID NO. 567933
  misc_feature: Elevated expression when VOC is produced
  misc_feature: Encodes the peptide sequence at SEQ ID NO 23322
atggcgcgtcacctaacgagaaacttggtgctactgccaactatactagcatcgttggcggccgctttgccagcttcaaatccgcgcgcagttgcagccgacacgtgcgcaactaaaggcagaccatccggcaaggtactccaaggttattgggaaaactgggacggtgcttccaacggtgtccatcccggtcttggttggactccaattgggaatccagacattaagggacatggatacaacgtaatccaggctgcatttcctattatcttgccagatggaacagctgagtggttcgacggcatggataccggcgtgaaagtgccgactccaagcgatatctgtgcagctaaagccgcgggtgccaccattcttctgtctatcggtggcgctaccgccgcccttgatctcacatccagatccgttgccgataaattcatctcaactatcgtcccgattctgaagaacaacaacttcgatggtatcgatattgaccttgagagtggtctgaccggcagcggcaacattgacactctgtcaacttcacagacaaacctgatatacgtcatcgacggtattctggcacaaatgcctagcaatttcggtttaacaatggccccagaaacggcctacgttacgggagcaagcatcacttatggctcgatttggggttcctatataccgattatcaagaaatacgtcgacaacggacgactatggtggttgaacatgcaatattacaacggtgacatgtatggctgttccggagactcgtacgccgccggaacagttgcaggattcattgcccaaacagactgcctgaacaaaggattgaaagtcggagatgttaccctcacagtcccctacgacaagcaagtcccaggtctacccgcccagagcggtgctggaggcggttacatgacccctgatctggttggacaagcttgggatcattacaacggcgcactgaagggcttgatgacgtggtccattaattgggatggctcaaagggctggacattcggtaataatctcaaggggcgcatctggtaa

SEQ ID NO: 23322 - protein, 350 aa, Muscodor strobelii
  misc_feature: SGI Peptide ID NO. 567933
  misc_feature (45)..(334): Pfam Id: PF00704 Pfam Desc: Glycosyl hydrolases family 18
  misc_feature (45)..(169): Pfam Id: PF00704 Pfam Desc: Glycosyl hydrolases family 18
  misc_feature (1)..(349): NCBI GI: 126032271 Blast Desc: TPA: TPA_inf: chitinase 18-15 [Hypocrea jecorina]
  misc_feature (1)..(349): NCBI GI: 269137313 Blast Desc: endochitinase [Beauveria bassiana]
  misc_feature (25)..(349): NCBI GI: 24209900 Blast Desc: chitinase [Beauveria bassiana] gi|194025185|gb|ACF32998.1| chitinase [Beauveria bassiana]
  misc_feature (1)..(344): NCBI GI: 22135429 Blast Desc: AF525753_1 37 kDa chitinase [Hypocrea lixii]
  misc_feature (1)..(344): NCBI GI: 22135431 Blast Desc: AF525754_1 37 kDa chitinase [Trichoderma inhamatum]
  misc_feature (1)..(349): NCBI GI: 126506574 Blast Desc: endochitinase [Trichoderma atroviride] gi|148246378|gb|ABQ53133.1| chitinase Chit36 [Trichoderma sp. BTM-T3]
  misc_feature (3)..(349): NCBI GI: 88696575 Blast Desc: 37 kDa endochitinase [Bionectria ochroleuca]
  misc_feature (1)..(349): NCBI GI: 110226711 Blast Desc: chitinase [Trichoderma asperellum]
  misc_feature (10)..(346): NCBI GI: 256787875 Blast Desc: chitinase precursor [Streptomyces lividans TK24]
  misc_feature (1)..(349): NCBI GI: 15529619 Blast Desc: AF406791_1 endochitinase Chit36Y [Hypocrea lixii]
  misc_feature (42)..(343): SWISSPROT Homolog: EC 3.2.1.14 Chitinase
  misc_feature: Useful for introducing or modulating the production of volatile compounds
MARHLTRNLVLLPTILASLAAALPASNPRAVAADTCATKGRPSGKVLQGYWENWDGASNGVHPGLGWTPIGNPDIKGHGYNVIQAAFPIILPDGTAEWFDGMDTGVKVPTPSDICAAKAAGATILLSIGGATAALDLTSRSVADKFISTIVPILKNNNFDGIDIDLESGLTGSGNIDTLSTSQTNLIYVIDGILAQMPSNFGLTMAPETAYVTGASITYGSIWGSYIPIIKKYVDNGRLWWLNMQYYNGDMYGCSGDSYAAGTVAGFIAQTDCLNKGLKVGDVTLTVPYDKQVPGLPAQSGAGGGYMTPDLVGQAWDHYNGALKGLMTWSINWDGSKGWTFGNNLKGRIW

SEQ ID NO: 23323 - DNA, 1513 bp, Muscodor strobelii
  misc_feature: SGI EST ID NO. CUFF.54918.0
  misc_feature: Variant of the nucleotide sequence at SEQ ID NO 23321
ggtccaccaacgtatgtggttatcttcgtctggtggccagtcaagtcgttgtcttggcattggcgaatgataccacccctaatccacccctaatcatgagacaaccacactggatctgtagatgtcaatgttcccaatgtcatcctacgttgcaatcttccaaatgtcaaagtacttcaacttcagtaatatcggctagtatctcccctgctacactatgtttcacgtgcaacatccaagtggactgagacggtccgatggcccaatatctcggctctggcatagccgtataaagaaacatgctcttcctgtgaaaacatctgattccggatatcaagtgctatcagtattgttactcatccacctcgtatccctagcctaggacatcttcacgatggcgcgtcacctaacgagaaacttggtgctactgccaactatactagcatcgttggcggccgctttgccagcttcaaatccgcgcgcagttgcagccgacacgtgcgcaactaaaggcagaccatccggcaaggtactccaaggttattgggaaaactgggacggtgcttccaacggtgtccatcccggtcttggttggactccaattgggaatccagacattaagggacatggatacaacgtaatccaggctgcatttcctattatcttgccagatggaacagctgagtggttcgacggcatggataccggcgtgaaagtgccgactccaagcgatatctgtgcagctaaagccgcgggtgccaccattcttctgtctatcggtggcgctaccgccgcccttgatctcacatccagatccgttgccgataaattcatctcaactatcgtcccgattctgaagaacaacaacttcgatggtatcgatattgaccttgagagtggtctgaccggcagcggcaacattgacactctgtcaacttcacagacaaacctgatatacgtcatcgacggtattctggcacaaatgcctagcaatttcggtttaacaatggccccagaaacggcctacgttacgggagcaagcatcacttatggctcgatttggggttcctatataccgattatcaagaaatacgtcgacaacggacgactatggtggttgaacatgcaatattacaacggtgacatgtatggctgttccggagactcgtacgccgccggaacagttgcaggattcattgcccaaacagactgcctgaacaaaggattgaaagtcggagatgttaccctcacagtcccctacgacaagcaagtcccaggtctacccgcccagagcggtgctggaggcggttacatgacccctgatctggttggacaagcttgggatcattacaacggcgcactgaagggcttgatgacgtggtccattaattgggatggctcaaagggctggacattcggtaataatctcaaggggcgcatctggtaaaggatctggcggccatttcagatttcgatgtactttatataagcatttaatgagacatgataagac

SEQ ID NO: 23324 - DNA, 432 bp, Muscodor strobelii
  misc_feature: SGI cDNA ID NO. 567934
  misc_feature: Encodes the peptide sequence at SEQ ID NO 23325
atgagtttcaatcagcgaactggctcttgcctctgcggcaaagtgtcagttcaactcgtcggcgagccagtgcaaaacgttttgtgtcactgcatctcctgcaagaaatcgagcggttctatatttggggccaacttcttcatgaacaagaaggacgtcgaaataacagatgccgagagtgttattcggggatacgaggacagctcatgtgacaatggtagcattgtgttgagatccttttgtagcatctgtggatcgaatgtgcataccgtcaacctcaaaaatccagacatcaagccattccttatcatccctatggggctgatggatacgctgcacaacagtacgcctacgagtgagttctatgtcaagcgaagagcagattggtatggtggaacagagaactctaaagagtaccaggttatgacatga

SEQ ID NO: 23325 - protein, 143 aa, Muscodor strobelii
  misc_feature: SGI Peptide ID NO. 567934
  misc_feature (27)..(132): Pfam Id: PF04828 Pfam Desc: Glutathione-dependent formaldehyde-activating enzyme
  misc_feature (7)..(137): NCBI GI: 145250811 Blast Desc: An15g03810 [Aspergillus niger] gi|134082443|emb|CAK97251.1| protein product [Aspergillus niger]
  misc_feature (1)..(140): NCBI GI: 255941004 Blast Desc: Pc16g09590 [Penicillium chrysogenum Wisconsin 54-1255] gi|211585894|emb|CAP93629.1| Pc16g09590 [Penicillium chrysogenum Wisconsin 54-1255]
  misc_feature (1)..(129): NCBI GI: 212531425 Blast Desc: DUF636 domain protein [Penicillium marneffei ATCC 18224] gi|210071233|gb|EEA25322.1| DUF636 domain protein [Penicillium marneffei ATCC 18224]
  misc_feature (5)..(142): NCBI GI: 145615402 Blast Desc: MGG_13117 [Magnaporthe grisea 70-15] gi|145022236|gb|EDK06256.1| MGG_13117 [Magnaporthe grisea 70-15]
  misc_feature (6)..(142): NCBI GI: 258573873 Blast Desc: [Uncinocarpus reesii 1704] gi|237901384|gb|EEP75785.1| [Uncinocarpus reesii 1704]
  misc_feature (7)..(142): NCBI GI: 159124606 Blast Desc: DUF636 domain protein [Aspergillus fumigatus A1163]
  misc_feature (7)..(142): NCBI GI: 70992375 Blast Desc: DUF636 domain protein [Aspergillus fumigatus Af293] gi|66848669|gb|EAL88998.1| DUF636 domain protein [Aspergillus fumigatus Af293]
  misc_feature (8)..(142): NCBI GI: 238506325 Blast Desc: DUF636 domain protein [Aspergillus flavus NRRL3357] gi|220689077|gb|EED45428.1| DUF636 domain protein [Aspergillus flavus NRRL3357]
  misc_feature (6)..(127): NCBI GI: 169613096 Blast Desc: SNOG_09678 [Phaeosphaeria nodorum SN15] gi|111061823|gb|EAT82943.1| SNOG_09678 [Phaeosphaeria nodorum SN15]
  misc_feature (8)..(142): NCBI GI: 169785329 Blast Desc: [Aspergillus oryzae RIB40] gi|83775873|dbj|BAE65992.1| protein product [Aspergillus oryzae]
MSFNQRTGSCLCGKVSVQLVGEPVQNVLCHCISCKKSSGSIFGANFFMNKKDVEITDAESVIRGYEDSSCDNGSIVLRSFCSICGSNVHTVNLKNPDIKPFLIIPMGLMDTLHNSTPTSEFYVKRRADWYGGTENSKEYQVMT

SEQ ID NO: 23326 - DNA, 710 bp, Muscodor strobelii
  misc_feature: SGI EST ID NO. CUFF.54922.0
  misc_feature: Variant of the nucleotide sequence at SEQ ID NO 23324
gcctgatggacttcacgaattggcagtatgtgctctcatatattaacccaggtatcaggccaatttacaggcgcgttttatatctaaaatactgtctaattcttgattcagtaacgacggttcctgaagggactagcgaaaatcacaacatgagtttcaatcagcgaactggctcttgcctctgcggcaaagtgtcagttcaactcgtcggcgagccagtgcaaaacgttttgtgtcactgcatctcctgcaagaaatcgagcggttctatatttggggccaacttcttcatgaacaagaaggacgtcgaaataacagatgccgagagtgttattcggggatacgaggacagctcatgtgacaatggtagcattgtgttgagatccttttgtagcatctgtggatcgaatgtgcataccgtcaacctcaaaaatccagacatcaagccattccttatcatccctatggggctgatggatacgctgcacaacagtacgcctacgagtgagttctatgtcaagcgaagagcagattggtatggtggaacagagaactctaaagagtaccaggttatgacatgatggtactaggaactataatcatggctgtatgctgtacattgactataccatatgctggatgtctttcttcatagtggttcagttggataccccctttaaacagttatgcctcaagtagcaatcaacaac

SEQ ID NO: 23327 - DNA, 558 bp, Muscodor strobelii
  misc_feature: SGI cDNA ID NO. 567935
  misc_feature: Elevated expression when VOC is produced
  misc_feature: Encodes the peptide sequence at SEQ ID NO 23328
atggccgcgaacccctcgctcacctcagcagtcaacttcacaccacaagacctgaatcacctccgccgcactattgcgcttgcatcggagtcactaagtcaaggtgatgctcctttcggctccgtgttggtttcttcattgggcgacatcctagcagaagacagaaatcgaatcaaaacacttaatgacggtacgaagcaccccgaaatcgagctagcgagatgggccgcctcaaatatttcttcgccagttgaaaggaaagcaactaccatgtacacttctggagaacattgccctatgtgctcggctgctcatgcctgggttggactgggaaggatcgtatatgttgcttcatcgaaacagttggaggcttggcagacagaatttagggaaagtgtgggaaacaaacaagaagagtggaaggacactgtcttttcgctatctataaacagcgtcgcccccggaattgaggtcgtcggtcctgttccggagcttgagagggagatatttgagcttcatcgcgcttacgcagcgaagaaggagacagaggacgcctag

SEQ ID NO: 23328 - protein, 185 aa, Muscodor strobelii
  misc_feature: SGI Peptide ID NO. 567935
  misc_feature (14)..(117): Pfam Id: PF00383 Pfam Desc: Cytidine and deoxycytidylate deaminase zinc-binding region
  misc_feature (1)..(176): NCBI GI: 256812151 Blast Desc: SgriT_03075 [Streptomyces griseoflavus Tu4000]
  misc_feature (17)..(179): NCBI GI: 163792387 Blast Desc: BAL199_16108 [alpha proteobacterium BAL199] gi|159182092|gb|EDP66601.1| BAL199_16108 [alpha proteobacterium BAL199]
  misc_feature (17)..(176): NCBI GI: 126348142 Blast Desc: cytidine and deoxycytidylate deaminase [Streptomyces ambofaciens ATCC 23877]
  misc_feature (17)..(180): NCBI GI: 21225535 Blast Desc: SCO7258 [Streptomyces coelicolor A3(2)] gi|256783445|ref|ZP_05521876.1| SlivT_03045 [Streptomyces lividans TK24] gi|4835337|emb|CAB42959.1| [Streptomyces A3(2)]
  misc_feature (17)..(176): NCBI GI: 239932948 Blast Desc: SghaA1_32303 [Streptomyces ghanaensis ATCC 14672]
  misc_feature (16)..(173): NCBI GI: 46138639 Blast Desc: FG10834.1 [Gibberella zeae PH-1]
  misc_feature (13)..(182): NCBI GI: 212528944 Blast Desc: conserved [Penicillium marneffei ATCC 18224] gi|210074027|gb|EEA28114.1| conserved [Penicillium marneffei ATCC 18224]
  misc_feature (16)..(173): NCBI GI: 169630540 Blast Desc: cytidine/deoxycytidylate deaminase [Mycobacterium abscessus ATCC 19977] gi|169242507|emb|CAM63535.1| cytidine/deoxycytidylate deaminase [Mycobacterium abscessus]
  misc_feature (17)..(174): NCBI GI: 258651398 Blast Desc: CMP/dCMP deaminase zinc-binding [Nakamurella multipartita DSM 44233] gi|258554623|gb|ACV77565.1| CMP/dCMP deaminase zinc-binding [Nakamurella multipartita DSM 44233]
  misc_feature (16)..(173): NCBI GI: 256729113 Blast Desc: NECHADRAFT_93328 [Nectria haematococca mpVI 77-13-4]
  misc_feature (18)..(137): SWISSPROT Homolog: EC 3.5.4.3 Guanine deaminase
  misc_feature: Useful for introducing or modulating the production of volatile compounds
MAANPSLTSAVNFTPQDLNHLRRTIALASESLSQGDAPFGSVLVSSLGDILAEDRNRIKTLNDGTKHPEIELARWAASNISSPVERKATTMYTSGEHCPMCSAAHAWVGLGRIVYVASSKQLEAWQTEFRESVGNKQEEWKDTVFSLSINSVAPGIEVVGPVPELEREIFELHRAYAAKKETEDA

SEQ ID NO: 23329 - DNA, 1461 bp, Muscodor strobelii
  misc_feature: SGI EST ID NO. CUFF.54924.0
  misc_feature: Variant of the nucleotide sequence at SEQ ID NO 23327
gcaagtcgtagattactatctggtatgagatggcgaagagggccaatgaaaggccatcattgattaagtctgcacttcttgtcgagacgaagccggccgccacacgttcggtcctcaagctcgagttcttgagtttatatttcagaagggtggtttctcaaagaatgaatagccaagggttttgaagatatacgcgggaatgaatttgttcttaaatagtgtaagatgcggtcctttgttgattggagctgatcaatcagctaatccttgctgcaggttacaggacactacgatgactcttaatccacttgatgtcgacccctcctttctcatcaatccgtctccacatgtttgggatcatcaagcgactaacatgatgggggcagtgcctctgctccggtagaacctgtagtcaaaattacattcatcgtttcgatagcagtaaacattgttatcaatatcgttacaaaggaaagtcttttcaagtcttgaaaaagcagcctcaaaatggccgcgaacccctcgctcacctcagcagtcaacttcacaccacaagacctgaatcacctccgccgcactattgcgcttgcatcggagtcactaagtcaaggtgatgctcctttcggctccgtgttggtttcttcattgggcgacatcctagcagaagacagaaatcgaatcaaaacacttaatgacggtacgaagcaccccgaaatcgagctagcgagatgggccgcctcaaatatttcttcgccagttgaaaggaaagcaactaccatgtacacttctggagaacattgccctatgtgctcggctgctcatgcctgggttggactgggaaggatcgtatatgttgcttcatcgaaacagttggaggcttggcagacagaatttagggaaagtgtgggaaacaaacaagaagagtggaaggacactgtcttttcgctatctataaacagcgtcgcccccggaattgaggtcgtcggtcctgttccggagcttgagagggagatatttgagcttcatcgcgcttacgcagcgaagaaggagacagaggacgcctaggcctgagatctactggatgtgaaccaactaacacatttgaattataaggttgttgctatgcagtatgtgttcagaaagtgaataaaccaagacagtgaccagtcaaactatgaaacggaaaaccggatagtccgatcaccaataacttgtgcgtggttcatggacgacgggacgggccagcggcaagtaggccgagatgtataacgccaaaaggtagtgacagacttagtattcagttggaaagcttgtgatatcgcgagatgcaaaacataggacatctagggaatcaggagaattagaaccaataagaggaccgaaaccaagccacacgccatcgccaacctcaagcctgacaatatatcgacgcccatttgagacaagtaatgggcatttgaa

SEQ ID NO: 23330 - DNA, 1545 bp, Muscodor strobelii
  misc_feature: SGI cDNA ID NO. 567936
  misc_feature: Encodes the peptide sequence at SEQ ID NO 23331
atggctacgcaaactcgcagaccagatcgtgagctccgcaagatcgtcaccatgggggcaattcctaccgaagtcaagcagatgattcttcaggagcttgatcccgtctccttgatgaacgctgcgctctcctgtcgtgacttctacaccacatatctaggtgcaaaagagctcatcgctcaccgttccttgctctgctgtatcgacgaggatgttttgcccgaggcctatcgactccataagtcgtggactattggccttccatcagaaaatcaaggcaaagctgcctactttgccgtacatgactgcaaactccgagaacttccgaatcaactcaaattaagcgacgcaatggcaatggccaacttccacaagtttgtgcacgcccttgcagatgacgctgctcgcgatgcgctgcagcgcacgtgccgtctcactgaatttgaccaacccgcggtcgccacccgcgaggaaatccatcgtttccagagggccatttaccgattccagctctattgtaacgtggttggagcggtcgaacacgatcgttcatacgaggtcgcgcagtggttcttccaaggggcaagtgcaatcgagaacgagcagcttgcctgcattcacgatttccttgttcgcgtaattgctgaacctttcaaccgcctggtcgaccacgatattgactggggccaccgacgtgtctcgtacatcgatgattatgactcgcctcaggccagagcaatcatggccaagggattggaggcggtttactacctgaatgaggcaatcaagcgtggacatcccgacgatgtcttgaagtccgtcgccgaatatggtcatatcttcgcccgttggggcttaggcggtttagagccgttacccgatttcctatacgaagatctgaagtctctcggtacctcagcccttaggatgacagccgttcatgattgcacggtatcagagttagccggtacagaagactattggtacatccgaggagttgacaactacgttgagcttgatggcggaccacaggcaatgtggacacatctgaccagagacatgcatatccacgatgtcgtcaaccagcgtgaactagctgcggaaagattgtgggcctttcctttctggaacttgtcacgactggaggcaggtggtatacttcttgaccaggggatcccactgcctcaagctatcaaccaccgcattggactgttacaatactcaaaccccacacgtctgcacaaccttgagtctttgcggtctgagcgatcaaaactctggagtgtacatgcttcgggctattacaaccatcaagacctaagcttcgtccaatggagccccggtgcactccagaatgtcgctgaaacgttcctacgcatgacagagcacggatatatctatccaggaggaagattgactgaccaggttcaccaacgcatcattcacatgagtatccatgatcactataatccttactggatttatattatatctaaggtcatggaatggtgtccttgggctctgaagatccgccaagtggtttag

SEQ ID NO: 23331 - protein, 514 aa, Muscodor strobelii
  misc_feature: SGI Peptide ID NO. 567936
  misc_feature (14)..(444): NCBI GI: 238845280 Blast Desc: conserved [Microsporum canis CBS 113480]
  misc_feature (112)..(261): NCBI GI: 154294559 Blast Desc: [Botryotinia fuckeliana B05.10] gi|150844722|gb|EDN19915.1| [Botryotinia fuckeliana B05.10]
  misc_feature (18)..(387): NCBI GI: 119182895 Blast Desc: [Coccidioides immitis RS]
  misc_feature (18)..(214): NCBI GI: 240109431 Blast Desc: CPC735_029360 [Coccidioides posadasii C735 delta SOWgp]
  misc_feature (105)..(258): NCBI GI: 238841616 Blast Desc: conserved [Microsporum canis CBS 113480]
  misc_feature (18)..(240): NCBI GI: 258567816 Blast Desc: [Uncinocarpus reesii 1704] gi|237906098|gb|EEP80499.1| [Uncinocarpus reesii 1704]
  misc_feature (18)..(387): NCBI GI: 256731130 Blast Desc: NECHADRAFT_85066 [Nectria haematococca mpVI 77-13-4]
  misc_feature (18)..(387): NCBI GI: 258571307 Blast Desc: [Uncinocarpus reesii 1704] gi|237904727|gb|EEP79128.1| [Uncinocarpus reesii 1704]
  misc_feature (16)..(352): NCBI GI: 46123015 Blast Desc: FG05885.1 [Gibberella zeae PH-1]
  misc_feature (10)..(357): NCBI GI: 115449853 Blast Desc: [Aspergillus terreus NIH2624] gi|114187662|gb|EAU29362.1| [Aspergillus terreus NIH2624]
MATQTRRPDRELRKIVTMGAIPTEVKQMILQELDPVSLMNAALSCRDFYTTYLGAKELIAHRSLLCCIDEDVLPEAYRLHKSWTIGLPSENQGKAAYFAVHDCKLRELPNQLKLSDAMAMANFHKFVHALADDAARDALQRTCRLTEFDQPAVATREEIHRFQRAIYRFQLYCNVVGAVEHDRSYEVAQWFFQGASAIENEQLACIHDFLVRVIAEPFNRLVDHDIDWGHRRVSYIDDYDSPQARAIMAKGLEAVYYLNEAIKRGHPDDVLKSVAEYGHIFARWGLGGLEPLPDFLYEDLKSLGTSALRMTAVHDCTVSELAGTEDYWYIRGVDNYVELDGGPQAMWTHLTRDMHIHDVVNQRELAAERLWAFPFWNLSRLEAGGILLDQGIPLPQAINHRIGLLQYSNPTRLHNLESLRSERSKLWSVHASGYYNHQDLSFVQWSPGALQNVAETFLRMTEHGYIYPGGRLTDQVHQRIIHMSIHDHYNPYWIYIISKVMEWCPWALKIRQVV

SEQ ID NO: 23332 - DNA, 843 bp, Muscodor strobelii
  misc_feature: SGI cDNA ID NO. 567937
  misc_feature: Encodes the peptide sequence at SEQ ID NO 23333
atggcaagcaacagcggggtggtcaatcgcttaaacgcgaaggctcaggaagttgcacaagaagactatgagaaagccagagttctcttgtcatctgctgcaaaaagcggcgcatacctctatccgttcaagggcatcgtctattttctaactcacaaggctttatggaagcccttcacctcgcgactcttgcctgttctaggcttgactgcgggcaccacgattgccatgtttttcttcacatatgtcccacagcttgcgatcatggttttcgttgatggccctcttgctgcactcacgactgctctcctggtattgaacgagagctcgactctggtcaacatattctcgcgcaacttcctcatccaagaagcccttctagataccttcgacggaacgctagtcgccagggatgcaacgaatattgtgagtgaggggcggcaactcaagtcaggcagcgacccaatgtcaagacttggaaaggtcctcaaaagcccgttttccaaattcacgccgaaggccctcatccgctacgttatgtacctcccattgaacttcattcctggtcgtacaaggggcaccacggtccatggtcgatactttcaattaaaacgctggtcttcatctcaacagcacgactggctagagcgacatgctggtccgtataccacattcggtacaattgcaacacttctagaaatgattccaattgtgtcaattttcttctctttcacaaatacagtcggcgcagctctgtgggcagccgatattgagcagaaaaacacacagatgacagcgagcacggcgccaaatctgcgagaatcagcgaagcagaccgaatga

SEQ ID NO: 23333 - protein, 280 aa, Muscodor strobelii
  misc_feature: SGI Peptide ID NO. 567937
  misc_feature (5)..(280): NCBI GI: 38567067 Blast Desc: conserved [Neurospora crassa]
  misc_feature (7)..(280): NCBI GI: 46128253 Blast Desc: FG08504.1 [Gibberella zeae PH-1]
  misc_feature (9)..(280): NCBI GI: 171685103 Blast Desc: protein product [Podospora anserina] gi|170942512|emb|CAP68164.1| protein product [Podospora anserina]
  misc_feature (5)..(280): NCBI GI: 85115345 Blast Desc: NCU01989 [Neurospora crassa OR74A] gi|28926650|gb|EAA35618.1| conserved [Neurospora crassa OR74A]
  misc_feature (7)..(280): NCBI GI: 256733485 Blast Desc: [Nectria haematococca mpVI 77-13-4]
  misc_feature (1)..(265): NCBI GI: 39970349 Blast Desc: MGG_02641 [Magnaporthe grisea 70-15] gi|145017575|gb|EDK01938.1| MGG_02641 [Magnaporthe grisea 70-15]
  misc_feature (18)..(280): NCBI GI: 261353509 Blast Desc: conserved [Verticillium albo-atrum VaMs.102]
  misc_feature (5)..(280): NCBI GI: 154297138 Blast Desc: BC1G_12228 [Botryotinia fuckeliana B05.10] gi|150843057|gb|EDN18250.1| BC1G_12228 [Botryotinia fuckeliana B05.10]
  misc_feature (10)..(277): NCBI GI: 189201902 Blast Desc: conserved [Pyrenophora tritici-repentis Pt-1C-BFP] gi|187984386|gb|EDU49874.1| conserved [Pyrenophora tritici-repentis Pt-1C-BFP]
  misc_feature (5)..(280): NCBI GI: 156057161 Blast Desc: SS1G_04311 [Sclerotinia sclerotiorum 1980] gi|154702097|gb|EDO01836.1| SS1G_04311 [Sclerotinia sclerotiorum 1980]
MASNSGVVNRLNAKAQEVAQEDYEKARVLLSSAAKSGAYLYPFKGIVYFLTHKALWKPFTSRLLPVLGLTAGTTIAMFFFTYVPQLAIMVFVDGPLAALTTALLVLNESSTLVNIFSRNFLIQEALLDTFDGTLVARDATNIVSEGRQLKSGSDPMSRLGKVLKSPFSKFTPKALIRYVMYLPLNFIPGRTRGTTVHGRYFQLKRWSSSQQHDWLERHAGPYTTFGTIATLLEMIPIVSIFFSFTNTVGAALWAADIEQKNTQMTASTAPNLRESAKQTE

SEQ ID NO: 23334 - DNA, 1483 bp, Muscodor strobelii
  misc_feature: SGI EST ID NO. CUFF.55006.1
  misc_feature: Variant of the nucleotide sequence at SEQ ID NO 23332
ggggtcgcgtcttgcctcagaaggtatctagccagacaaaggaaatcaatcaatacatcaacaaactcgtctacgccctacgcgctctcacgtctcacttattgcaactctaaactccccatcggatcgtcgcaactgggaagagcaaagatggcaagcaacagcggggtggtcaatcgcttaaacgcgaaggctcaggaagttgcacaagaagactatgagaaagccagagttctcttgtcatctgctgcaaaaagcggcgcatacctctatccgttcaagggcatcgtctattttctaactcacaaggctttatggaagcccttcacctcgcgactcttgcctgttctaggcttgactgcgggcaccacgattgccatgtttttcttcacatatgtcccacagcttgcgatcatggttttcgttgatggccctcttgctgcactcacgactgctctcctggtattgaacgagagctcgactctggtcaacatattctcgcgcaacttcctcatccaagaagcccttctagataccttcgacggaacgctagtcgccagggatgcaacgaatattgtgagtgaggggcggcaactcaagtcaggcagcgacccaatgtcaagacttggaaaggtcctcaaaagcccgttttccaaattcacgccgaaggccctcatccgctacgttatgtacctcccattgaacttcattcctgtcgtcggaaccgtcattttcattggccttcagggtcgtacaaggggcaccacggtccatggtcgatactttcaattaaaacgctggtcttcatctcaacagcacgactggctagagcgacatgctggtccgtataccacattcggtacaattgcaacacttctagaaatgattccaattgtgtcaattttcttctctttcacaaatacagtcggcgcagctctgtgggcagccgatattgagcagaaaaacacacagatgacagcgagcacggcgccaaatctgcgagaatcagcgaagcagaccgaatgaagagttacacgagatacacaaggccgacatctccgagattgattgatccacgttccacagccttgtgcgcaaagagatgtattgcacccggtcgcgcaaaagactgatctctagaggatggatgacggtgcacctggatctattgtaacctttgaaggcattgaactcggtcgcgtatggaaccaagtgctgggaatcgcttgtgagtgcgtatagataccaagacgagcttactttttttaagttttaggtagttgataaactttatctcctttatgggtctgcgggatcaacccttcatagaactcacgtgcgtcgagcaacccccgctaagtacggagagtagcaatttgtagctttaaatggcccatcatactgcgtactcttccttgtctctgagtcgtactatgatggtcgcagattgagttggtagcagattttatctatacagtgtcat

SEQ ID NO: 23335 - DNA, 930 bp, Muscodor strobelii
  misc_feature: SGI cDNA ID NO. 567938
  misc_feature: Encodes the peptide sequence at SEQ ID NO 23336
atggcaagcaacagcggggtggtcaatcgcttaaacgcgaaggctcaggaagttgcacaagaagactatgagaaagccagagttctcttgtcatctgctgcaaaaagcggcgcatacctctatccgttcaagggcatcgtctattttctaactcacaaggctttatggaagcccttcacctcgcgactcttgcctgttctaggcttgactgcgggcaccacgattgccatgtttttcttcacatatgtcccacagcttgcgatcatggttttcgttgatggccctcttgctgcactcacgactgctctcctggtattgaacgagagctcgactctggtcaacatattctcgcgcaacttcctcatccaagaagcccttctagataccttcgacggaacgctagtcgccagggatgcaacgaatattgtgagtgaggggcggcaactcaagtcaggcagcgacccaatgtcaagacttggaaaggtcctcaaaagcccgttttccaaattcacgccgaaggccctcatccgctacgttatgtacctcccattgaacttcattcctgtcgtcggaaccgtcattttcattggccttcagggtgtcgtacaaggggcaccacggtccatggtcgagttcgtttccccccttttttgcgctgagacaaggtttaatttgagtcgacagtactttcaattaaaacgctggtcttcatctcaacagcacgactggctagagcgacatgctggtccgtataccacattcggtacaattgcaacacttctagaaatgattccaattgtgtcaattttcttctctttcacaaatacagtcggcgcagctctgtgggcagccgatattgagcagaaaaacacacagatgacagcgagcacggcgccaaatctgcgagaatcagcgaagcagaccgaatga

SEQ ID NO: 23336 - protein, 309 aa, Muscodor strobelii
  misc_feature: SGI Peptide ID NO. 567938
  misc_feature (5)..(309): NCBI GI: 38567067 Blast Desc: conserved [Neurospora crassa]
  misc_feature (7)..(309): NCBI GI: 46128253 Blast Desc: FG08504.1 [Gibberella zeae PH-1]
  misc_feature (7)..(309): NCBI GI: 256733485 Blast Desc: [Nectria haematococca mpVI 77-13-4]
  misc_feature (5)..(309): NCBI GI: 85115345 Blast Desc: NCU01989 [Neurospora crassa OR74A] gi|28926650|gb|EAA35618.1| conserved [Neurospora crassa OR74A]
  misc_feature (9)..(309): NCBI GI: 171685103 Blast Desc: protein product [Podospora anserina] gi|170942512|emb|CAP68164.1| protein product [Podospora anserina]
  misc_feature (1)..(294): NCBI GI: 39970349 Blast Desc: MGG_02641 [Magnaporthe grisea 70-15] gi|145017575|gb|EDK01938.1| MGG_02641 [Magnaporthe grisea 70-15]
  misc_feature (20)..(309): NCBI GI: 261353509 Blast Desc: conserved [Verticillium albo-atrum VaMs.102]
  misc_feature (5)..(309): NCBI GI: 154297138 Blast Desc: BC1G_12228 [Botryotinia fuckeliana B05.10] gi|150843057|gb|EDN18250.1| BC1G_12228 [Botryotinia fuckeliana B05.10]
  misc_feature (5)..(309): NCBI GI: 156057161 Blast Desc: SS1G_04311 [Sclerotinia sclerotiorum 1980] gi|154702097|gb|EDO01836.1| SS1G_04311 [Sclerotinia sclerotiorum 1980]
  misc_feature (10)..(306): NCBI GI: 189201902 Blast Desc: conserved [Pyrenophora tritici-repentis Pt-1C-BFP] gi|187984386|gb|EDU49874.1| conserved [Pyrenophora tritici-repentis Pt-1C-BFP]
MASNSGVVNRLNAKAQEVAQEDYEKARVLLSSAAKSGAYLYPFKGIVYFLTHKALWKPFTSRLLPVLGLTAGTTIAMFFFTYVPQLAIMVFVDGPLAALTTALLVLNESSTLVNIFSRNFLIQEALLDTFDGTLVARDATNIVSEGRQLKSGSDPMSRLGKVLKSPFSKFTPKALIRYVMYLPLNFIPVVGTVIFIGLQGVVQGAPRSMVEFVSPLFCAETRFNLSRQYFQLKRWSSSQQHDWLERHAGPYTTFGTIATLLEMIPIVSIFFSFTNTVGAALWAADIEQKNTQMTASTAPNLRESAKQTE

SEQ ID NO: 23337 - DNA, 1483 bp, Muscodor strobelii; identical to SEQ ID NO: 23334
  misc_feature: SGI EST ID NO. CUFF.55006.1
  misc_feature: Variant of the nucleotide sequence at SEQ ID NO 23335

SEQ ID NO: 23338 - DNA, 1923 bp, Muscodor strobelii
  misc_feature: SGI cDNA ID NO. 567939
  misc_feature: Encodes the peptide sequence at SEQ ID NO 23339
atgttcgataatggatacggtactgtctggctgatattggccactgatatagtactcgatgtcagactgacaccaggagatgacgaaccaactctagtgatcgagctatttcctagaccggatgtaggtgcagatgaattggtgataggaaacggcgttggtaggctcgtgctggtaagcggcttggtagtcaaggtcaaattggacatagaaactgtagaaccagcgctatttggcatgctgattgttacactgatcacagtgactgaagaattcattatagataagcttgttgtcgggctgactgtggccgctggaacggtacttgagttcaaaccggcagtcgagattagccggctggtaccaatcgatatgccatttatcgaagtcaacgtagacatggagaagttggtcctgggaaatggtgtaatctggctgatgtttaaagaagtcgtcatagtcatcgatgccgacacatttgttgaggtcaatgtttcacttgaccctgaaccgttgctgctgttcagtacaagacttgtagtgctgactgaaggaccggaagagttcgtgagcgggaataaagttgtcccacttatcgtaacagtactcgactgcgaggaaagtgaagaatttatctctgtcgagacagtagcgacaactgtgcttgcgatagacacgcttgttgacactgtcggtcctgtgctcgctactgttgtgtttgtgataggatatggaggggatgaagaagagtttgtcaacggaaatggtatagttgaaatcgacgttaagaaattggaggtagtggcaatgccactggtggtcaatgaaaatgttgtaatattcacaatcacactagtttcagatggcgagaacagtaccgagttattgctattcgacacgccgactgaagtagtgatcgcagagctctcggaactaaatccgaggcttgatatgacggattctgtgctcggaatgaacatagtcatgttgcttggtgcgagagaactcggcacaacggtggtattaatgagcggtacattagtagaagcagaaagggtgagagtatttgatacaaaagatgttgcgttgcttataaccgaagttgtctgcgatgtgcctgatgatgtacttgttacaatgcctatcgtcgatgacgaacttggcatagtcgaagctgcgctgactgtagcatttggagatgagtatgaattgctcgacgggaccacaaccgagccattactcgtgactggtgtgaatattgaagagacagctgttgctctgcttgttgaattggacaatggatatggaccagagcttgaaatcgtggggattagggaacttagcacaccggacgcttcagatggagacgagccggttcgcgagagcgtgacaggcgtggtcgaattgatggtcatcgaggcactattcgttgctgtgctaggtgggacactgctgaagccggaagaatttccttcaaagaaagatgtcatgggagttatagacatgctcttagttgcggtgctcaactctggacctcgagtgtccgaagctgtagacgagttgttcgtggggtatggcgttgatgtcatggtgaacgagatactggattggttggtctcgattatggagctggccaatgtggactcagtgctgaatcctgtcgttactggcgttgtgttctggctcatagtcatcgtggaattgcctgacggtggctgcgtagatgttgagaccatcggtgatgagattgtctccgtacctgtagttgtgttggctggtaatggcaccgatgatccggttctttcagaactcgaaaaagtttcaagtctgcttgtgaccgaagtgttcattcccaccgtcgagcgaaatgaagtcgatggcgacatcgaactaggctgcagtgtagaggactcaatgctttga

SEQ ID NO: 23339 - protein, 640 aa, Muscodor strobelii
  misc_feature: SGI Peptide ID NO. 567939
MFDNGYGTVWLILATDIVLDVRLTPGDDEPTLVIELFPRPDVGADELVIGNGVGRLVLVSGLVVKVKLDIETVEPALFGMLIVTLITVTEEFIIDKLVVGLTVAAGTVLEFKPAVEISRLVPIDMPFIEVNVDMEKLVLGNGVIWLMFKEVVIVIDADTFVEVNVSLDPEPLLLFSTRLVVLTEGPEEFVSGNKVVPLIVTVLDCEESEEFISVETVATTVLAIDTLVDTVGPVLATVVFVIGYGGDEEEFVNGNGIVEIDVKKLEVVAMPLVVNENVVIFTITLVSDGENSTELLLFDTPTEVVIAELSELNPRLDMTDSVLGMNIVMLLGARELGTTVVLMSGTLVEAERVRVFDTKDVALLITEVVCDVPDDVLVTMPIVDDELGIVEAALTVAFGDEYELLDGTTTEPLLVTGVNIEETAVALLVELDNGYGPELEIVGIRELSTPDASDGDEPVRESVTGVVELMVIEALFVAVLGGTLLKPEEFPSKKDVMGVIDMLLVAVLNSGPRVSEAVDELFVGYGVDVMVNEILDWLVSIMELANVDSVLNPVVTGVVFWLIVIVELPDGGCVDVETIGDEIVSVPVVVLAGNGTDDPVLSELEKVSSLLVTEVFIPTVERNEVDGDIELGCSVEDSML

SEQ ID NO: 23340 - DNA, 1290 bp, Muscodor strobelii
  misc_feature: SGI cDNA ID NO. 567940
  misc_feature: Encodes the peptide sequence at SEQ ID NO 23341
atgggcgaagcgcccggcgagaaggtgagtgttgtgattgttcctgactgcgtgatggtcgtttcggtgcaagttgtatcgattgatgatgcgatttccgaagaaaatgtgatgacagtagtcgttcctgattgggtgattgttgtctcgctacaagtcgtatcgattgaagcaactggtacagtggaagagaatgtgaggactgtcgtggtgccagatacagtgagcgtcgtctcgctgcaagttgtgtcccatgaccacgaagagttgggtgcaagcatagatgaagcgccggaaagagtcgttgtgtcggcattcgacggtgagagcactggtctagacgtgacggagttacctgttgtcattcctgaagtgatctcggacgagaatgtcctagtaggaccgacggaaacggtggatgtagtgttgctcatcgggaaaggccccgatgtagatgaggcggtgacgaggctgtttgacggcacagctgatgacatactcgttgttggtgctaaattcgtcgaagatgatacctcgctgctgcttgagatggagagagacgaattagcgtacagactttggctattaggaagactggatgacccaatctcagtcaccgaacttagaggtgccgacaatgttgcatttacgatcgtcgacgaggccgtcaaagtgccggaaacttggcttgatgatgtaatcaatgatgaaaccaccgttccgttcgctactggcacagcagtactactggtcgtaggcgaaaagactgctgtgccagaagcggtacttgtcctctcgccaaccgaggaattcatcgaggggaaaggtggtaaattggaagagaaggcagtcaagccactgctgatgcctgtttcaagtgttgaactgaatggcggtcccctcattgttgatgtctgtatcgcggtgttactcaacgacggactcgtgaatagtgagattgattcgattgatgagaagtttctaagattcgaggacgttgcaatgatgctgctagggccggtcgtcgacatcccagttcctgtgatgctgctggagaaaatcgatgcattcgaaaatggatacgaggcaaatgaagaggttgtgagagagcctgatgtctcagtagatgtggctccagtattcgaaaacggcgtggagaggattgtacgttgggtatttgaactcccagttcccatggtggcgccggtcggagacgtggaatttgtgaaagtatacggccccgttgatgagccagtaacagaagccaatcctccagtagaggacgattga

SEQ ID NO: 23341 - protein, 429 aa, Muscodor strobelii
  misc_feature: SGI Peptide ID NO. 567940
MGEAPGEKVSVVIVPDCVMVVSVQVVSIDDAISEENVMTVVVPDWVIVVSLQVVSIEATGTVEENVRTVVVPDTVSVVSLQVVSHDHEELGASIDEAPERVVVSAFDGESTGLDVTELPVVIPEVISDENVLVGPTETVDVVLLIGKGPDVDEAVTRLFDGTADDILVVGAKFVEDDTSLLLEMERDELAYRLWLLGRLDDPISVTELRGADNVAFTIVDEAVKVPETWLDDVINDETTVPFATGTAVLLVVGEKTAVPEAVLVLSPTEEFIEGKGGKLEEKAVKPLLMPVSSVELNGGPLIVDVCIAVLLNDGLVNSEIDSIDEKFLRFEDVAMMLLGPVVDIPVPVMLLEKIDAFENGYEANEEVVREPDVSVDVAPVFENGVERIVRWVFELPVPMVAPVGDVEFVKVYGPVDEPVTEANPPVEDD

SEQ ID NO: 23342 - DNA, 1725 bp, Muscodor strobelii
  misc_feature: SGI cDNA ID NO. 567941
  misc_feature: Encodes the peptide sequence at SEQ ID NO 23343
atggcgaaccctcctcacggcggtgtcctcaaggatcttctagccagagatcttcccagacatgccgagcttgccgctgaggctgagacactccccgccgttgttctaaccgagagacaactttgcgatctcgaattaattctcaatggcggtttctcgcccctagaaggtttcatgaacgaagctgattacaagggtgtcgtaaaggagaaccgtctcgcagatggagctctattctctatgcccatcaccctggatgtgtcggaggagacgatcaaagaggtggggttgaaggccggtttgagagtcactcttcgcgacttgcgcgacgaccgcaatcttgctatcctcacaattgacgacatctacaagcccgacaagcatttggaagctgtggaagtctttggtgctgatgatgaggcgcatccggccgtcaagtacctgcacaagatcgctggcgactactatgtcggtggtaaggttgaagccatcaaccgcctccagcactatgactttgtcgaccttcgatacactcctgccgaactcagattacatttcgataagctcggatggactcgtgtcgtcgctttccagaccagaaaccccatgcaccgcgctcaccgtgagttgactgtacgagctgctcggtcgcaccatgccaatgtccttatccaccctgttgtcggtctcacgaaaccgggagatatcgaccacttcacacgtgtgcgcgtatacaaggctcttctaccccgctaccccaacggcatggccgtcttgggtttgctacccctcgccatgagaatgggtggaccccgtgaagccatctggcacgccattatccgcaagaaccacggtgccacacacttcatcgtcggtcgtgaccatgccggccccggcaagaacagccaaggcgtcgatttctacggaccctatgatgcccagtacgccgtggagaagtaccgcgacgagctcggcatcgaagtcgtgcctttccagatggtgacctacctccctgacaaggacgagtacgcacccatcgaccagatccccaaggacacccgcacattgaacatctccggcacggaactccgctccagactccgaagcggacgggagatccccgagtggttctcatacccagaggtcgtcaaggtcctccgggaatcacacccggcgcgcggagcgcagggtttcaccgtcttcctgacgggctacacgaactcaggcaaggaccaaatcgcccgcgccctcgaactcaccctcaaccagcaaggcggccgctcggtctccttgctcctcggcgagaccgtccgttccgagttgtcatccgagctcggcttcagccgtgaggaccgcagcaagaacatcgcccgtatcgccttcgtcgccggcgaactgacgcgctccggcaccgccgtcatcgccgctcccatcgcgcccttcgaggacgaccgcgtagcagccaaagaagccgtcgagaaattcggcgatttcttcctcgtccacgtcgccactcccctcgactactgcgagaagacggacaagcgcggtatctacgcccgcgcccgccggggtgaagtcaagggcttcactggcgtagatgacccctatgagacgcccgtcaagcccaacctcgtcgtcgatgctgagaagcagagcgttagatctattgttcaccagattgtcctcatgcttgagggaactggattgttggatcgcctatag

SEQ ID NO: 23343 - protein, 574 aa, Muscodor strobelii
  misc_feature: SGI Peptide ID NO. 567941
  misc_feature (396)..(554): Pfam Id: PF01583 Pfam Desc: Adenylylsulphate kinase
  misc_feature (71)..(394): Pfam Id: PF01747 Pfam Desc: ATP-sulfurylase
  misc_feature (1)..(574): NCBI GI: 85112452 Blast Desc: sulfate adenylyltransferase [Neurospora crassa OR74A] gi|74618118|sp|Q7SE75.1|MET3_NEUCR RecName: Full=Sulfate adenylyltransferase; AltName: Full=Sulfate adenylate transferase;
  misc_feature (1)..(574): NCBI GI: 116193687 Blast Desc: conserved [Chaetomium globosum CBS 148.51] gi|121785132|sp|Q2H454.1|MET3_CHAGB RecName: Full=Sulfate adenylyltransferase; AltName: Full=Sulfate adenylate transferase;
  misc_feature (1)..(574): NCBI GI: 171685099 Blast Desc: protein product [Podospora anserina] gi|170942510|emb|CAP68162.1| protein product [Podospora anserina]
  misc_feature (1)..(574): NCBI GI: 169595162 Blast Desc: SNOG_00315 [Phaeosphaeria nodorum SN15] gi|121931169|sp|Q0V6P9.1|MET3_PHANO RecName: Full=Sulfate adenylyltransferase; AltName: Full=Sulfate adenylate transferase;
  misc_feature (1)..(574): NCBI GI: 156057169 Blast Desc: ATP sulfurylase [Sclerotinia sclerotiorum 1980] gi|154702101|gb|EDO01840.1| ATP sulfurylase [Sclerotinia sclerotiorum 1980]
  misc_feature (1)..(574): NCBI GI: 154297166 Blast Desc: BC1G_12242 [Botryotinia fuckeliana B05.10] gi|150843071|gb|EDN18264.1| BC1G_12242 [Botryotinia fuckeliana B05.10]
  misc_feature (1)..(573): NCBI GI: 242813193 Blast Desc: ATP sulphurylase [Talaromyces stipitatus ATCC 10500] gi|218714456|gb|EED13879.1| ATP sulphurylase [Talaromyces stipitatus ATCC 10500]
  misc_feature (1)..(573): NCBI GI: 71000539 Blast Desc: ATP sulphurylase [Aspergillus fumigatus Af293] gi|74673925|sp|Q4WWN8.1|MET3_ASPFU RecName: Full=Sulfate adenylyltransferase; AltName: Full=Sulfate adenylate transferase;
  misc_feature (1)..(573): NCBI GI: 212544696 Blast Desc: ATP sulphurylase [Penicillium marneffei ATCC 18224] gi|210065471|gb|EEA19565.1| ATP sulphurylase [Penicillium marneffei ATCC 18224]
  misc_feature (1)..(573): NCBI GI: 119493160 Blast Desc: ATP sulphurylase [Neosartorya fischeri NRRL 181] gi|143353880|sp|A1D858.1|MET3_NEOFI RecName: Full=Sulfate adenylyltransferase; AltName: Full=Sulfate adenylate transferase;
  misc_feature (1)..(574): SWISSPROT Homolog: EC 2.7.7.4 Sulfate adenylyltransferase
MANPPHGGVLKDLLARDLPRHAELAAEAETLPAVVLTERQLCDLELILNGGFSPLEGFMNEADYKGVVKENRLADGALFSMPITLDVSEETIKEVGLKAGLRVTLRDLRDDRNLAILTIDDIYKPDKHLEAVEVFGADDEAHPAVKYLHKIAGDYYVGGKVEAINRLQHYDFVDLRYTPAELRLHFDKLGWTRVVAFQTRNPMHRAHRELTVRAARSHHANVLIHPVVGLTKPGDIDHFTRVRVYKALLPRYPNGMAVLGLLPLAMRMGGPREAIWHAIIRKNHGATHFIVGRDHAGPGKNSQGVDFYGPYDAQYAVEKYRDELGIEVVPFQMVTYLPDKDEYAPIDQIPKDTRTLNISGTELRSRLRSGREIPEWFSYPEVVKVLRESHPARGAQGFTVFLTGYTNSGKDQIARALELTLNQQGGRSVSLLLGETVRSELSSELGFSREDRSKNIARIAFVAGELTRSGTAVIAAPIAPFEDDRVAAKEAVEKFGDFFLVHVATPLDYCEKTDKRGIYARARRGEVKGFTGVDDPYETPVKPNLVVDAEKQSVRSIVHQIVLMLEGTGLLDRL

SEQ ID NO: 23344 - DNA, 4926 bp, Muscodor strobelii
  misc_feature: SGI EST ID NO. CUFF.55119.1
  misc_feature: Variant of the nucleotide sequence at SEQ ID NO 23342
ctgaatcgtttcaccagcggccgagcacgccatccaagctaaaaccgacgtttggagtcaagcccgcattgaatggttgcgctgcatatctaaaaatgtcatatgccgtgccaattacatcgcgtggcattagacgtcgtcaaaagtcttcaagggcttcagatttttaccttcattgttagttccgggcgagctttttgtaaccctgcctgcctgcaccctctgcttactcgcaggatttggtccagcagtgaatggttgatcaggatcatcatccgcagacggaacccctcgttcgctaacttgtccagggatcttacattggagcccggctgggtctataatctgtcctctcactataatccttctccttgcttctttcaactcgtacattgtgtaattgaacctgctattgcgcctcttcttgagcacacactacggttctttcaccactgtagctattcttccctccgctcctatatcgaataagtcacaacctcagattcactatggcgaaccctcctcacggcggtgtcctcaaggatcttctagccagagatcttcccagacatgccgagcttgccgctgaggctgagacactccccgccgttgttctaaccgagagacaactttgcgatctcgaattaattctcaatggcggtttctcgcccctagaaggtttcatgaacgaagctgattacaagggtgtcgtaaaggagaaccgtctcgcagatggagctctattctctatgcccatcaccctggatgtgtcggaggagacgatcaaagaggtggggttgaaggccggtttgagagtcactcttcgcgacttgcgcgacgaccgcaatcttgctatcctcacaattgacgacatctacaagcccgacaagcatttggaagctgtggaagtctttggtgctgatgatgaggcgcatccggccgtcaagtacctgcacaagatcgctggcgactactatgtcggtggtaaggttgaagccatcaaccgcctccagcactatgactttgtcgaccttcgatacactcctgccgaactcagattacatttcgataagctcggatggactcgtgtcgtcgctttccagaccagaaaccccatgcaccgcgctcaccgtgagttgactgtacgagctgctcggtcgcaccatgccaatgtccttatccaccctgttgtcggtctcacgaaaccgggagatatcgaccacttcacacgtgtgcgcgtatacaaggctcttctaccccgctaccccaacggcatggccgtcttgggtttgctacccctcgccatgagaatgggtggaccccgtgaagccatctggcacgccattatccgcaagaaccacggtgccacacacttcatcgtcggtcgtgaccatgccggccccggcaagaacagccaaggcgtcgatttctacggaccctatgatgcccagtacgccgtggagaagtaccgcgacgagctcggcatcgaagtcgtgcctttccagatggtgacctacctccctgacaaggacgagtacgcacccatcgaccagatccccaaggacacccgcacattgaacatctccggcacggaactccgctccagactccgaagcggacgggagatccccgagtggttctcatacccagaggtcgtcaaggtcctccgggaatcacacccggcgcgcggagcgcagggtttcaccgtcttcctgacgggctacacgaactcaggcaaggaccaaatcgcccgcgccctcgaactcaccctcaaccagcaaggcggccgctcggtctccttgctcctcggcgagaccgtccgttccgagttgtcatccgagctcggcttcagccgtgaggaccgcagcaagaacatcgcccgtatcgccttcgtcgccggcgaactgacgcgctccggcaccgccgtcatcgccgctcccatcgcgcccttcgaggacgaccgcgtagcagccaaagaagccgtcgagaaattcggcgatttcttcctcgtccacgtcgccactcccctcgactactgcgagaagacggacaagcgcggtatctacgcccgcgcccgccggggtgaagtcaagggcttcactggcgtagatgacccctatgagacgcccgtcaagcccaacctcgtcgtcgatgctgagaagcagagcgttagatctattgttcaccagattgtcctcatgcttgagggaactggattgttggatcgcctatagatggtgcgatgttgggataataaataaatgaagtaaaaggaaatcatatggaaaaattataccttagacatagatctacacacaaaatacacagacaggcgcctgctcagcgttgataaaacttggacttcttcgcaatttttgtcttgtcttgtcgtggaattgattaaagtaaggaatgtgtgcacttgaattaccccgtatgcacactgcctggtcaacatcatcaatcacgtctcgtgtctcaaaacaatgtcctacaccattccacgcaatcttcaatcctctcgacattggtctagcggtatagcatacaaatatttcgaggagagtctatcgtaccatctaacgcggaccccaacatcacatcataacgcatcaagcaagcacccgcgatcccggccctagttcactgcaagacggcaagctgcctacccggctcacccgtaggtccgcaacctcgcatcaagccaaagccaaagccgtacacgatcaaacaaaagcctcacaggcacacaatcagcccagcttctcgtccaacacctcatcctcatcctcttcctcattcacaacagcctcaacaatcaaattacccgacctcccaattctcttacccagtgtctgctcatcatcaggccgaaacacctctctcggcaacggcgccacaatgcggaaagcatacacatgcgaatactcatccggtttctcggcgggcagatcaacctcatcctcctctcttttcccattctcccctccattcaactccggattcgaagtaagaatatcataacactccacaaaagcatacaactcctcgaccgtcgtccccttatcaaacttcctcacaactctaccgctcggcagcataagagccaatctaaccacatctttcggatccgtgctagcctcaggctcagggttgatcgtagtagcgcgccagcgtctccattgctgtttcttattctccagtcgttcagcagcttccttatcctctttctcctttatctcggccgccgccgcagcggcttcggcttccttgcgccgtctcacgcgctctctatcctgtgccagagatcgttcgtacgcagagtcttgctctgtgcggaggtttctggagacttcctgtgctgtgcgctcggcccggactccggctatgtcggggctgtatttgttgatggcagtctgtaactctgcgagataggtagcggaggagagggggccgactaatctcttcacgatgctcatgcgcgtgcttccctcctttggcgtgagacagacgagacaagaaaaggggtatttggagcaattgtattcactagcgacttggaaagcctcggagtcaagaacattccctccccagagaatgatgttgtttgctgggtcgttgatgaagctcacgacttccggagcaagcagcgtgtctctcgtaaaggactcggtgtcgtcgtgctcgggtgacatgaggacgatgagcaagaacttgaggtcccgcttggcagtgtcgagggcctgagcaaagccaccttcgtggaagggcagagcgtcggtgccgtattcctcttcgaactctcgcttgaagcgtgcggcggtgtcgcggggcatcaacatcctacgtcctgctgtccctctgaagcccgtggtcatcgtcgtggttatcgcgcggggccgtatcgaggctgggaggaatgtgaagatgtacatgaatgtgcggaagacggtcgagacggtgcgcaagcctatgttgaaaggggcgaagatgatggcgaggaggaagggcgtgcgggctgtctttgtgggctgaggtactatcctcggggcgggatcgggtctgtcgcggggtcgagggcgactagaagggtcaagaaaggtatcttgaaggttctcgtggcgtgatgcctgcgctgggatgtggttctgggccgcgacggcctcagcgacagggtcggggccctcgccgtcgaagaactttgctatagctatctggacgttccattgcgatctttcgagaagcggcacggcgtctttgatgtcttggtcggtgacctgtgtgtattgctgcagagcggcctgctgctcagccgagagctggcttatgtcgatcgccgagtcgctcgccattatgatgatcagccgcggctagcgaacttctgttttgtcccttgatgtaccgtctttagggatcgcgcggatgtaccggcattctagatgaaggacgactagcgtggcgtagaaaagttttacaattacaattgagattcgtgacggttcgttttgtgcccgctcgcagaaagctgcctgttcacggcccagataacctctgtaccaataatcggtatgacaaaacagaaacaggcggtaatgaattcaagcggattagtgttggttcggatactaatagttgactttgatctaagacaatggcaattctagaagagtggccgagcttcggtaaggctgcaccagatgcggatggtggtttgtcgttggaaagtttggaggtagtcctcgagagtagtggcttcgtgtcaattgaggatatgggacccactcgatgatgtcgatttggctgaggtgaagctggggaacgatgacggaaggcgggtgccagcaggtaggcacgatggcggtcactggttactggttactggttggggacgacctcggagcacgttaggcaattgcccgtggtccg

SEQ ID NO: 23345 - DNA, 1125 bp, Muscodor strobelii
  misc_feature: SGI cDNA ID NO. 567942
  misc_feature: Encodes the peptide sequence at SEQ ID NO 23346
atgaccacgggcttcagagggacagcaggacgtaggatgttgatgccccgcgacaccgccgcacgcttcaagcgagagttcgaagaggaatacggcaccgacgctctgcccttccacgaaggtggctttgctcaggccctcgacactgccaagcgggacctcaagttcttgctcatcgtcctcatgtcacccgagcacgacgacaccgagtcctttacgagagacacgctgcttgctccggaagtcgtgagcttcatcaacgacccagcaaacaacatcattctctggggagggaatgttcttgactccgaggctttccaagtcgctagtgaatacaattgctccaaataccccttttcttgtctcgtctgtctcacgccaaaggagggaagcacgcgcatgagcatcgtgaagagattagtcggccccctctcctccgctacctatctcgcagagttacagactgccatcaacaaatacagccccgacatagccggagtccgggccgagcgcacagcacaggaagtctccagaaacctccgcacagagcaagactctgcgtacgaacgatctctggcacaggatagagagcgcgtgagacggcgcaaggaagccgaagccgctgcggcggcggccgagataaaggagaaagaggataaggaagctgctgaacgactggagaataagaaacagcaatggagacgctggcgcgctactacgatcaaccctgagcctgaggctagcacggatccgaaagatgtggttagattggctcttatgctgccgagcggtagagttgtgaggaagtttgataaggggacgacggtcgaggagttgtatgcttttgtggagtgttatgatattcttacttcgaatccggagttgaatggaggggagaatgggaaaagagaggaggatgaggttgatctgcccgccgagaaaccggatgagtattcgcatgtgtatgctttccgcattgtggcgccgttgccgagagaggtgtttcggcctgatgatgagcagacactgggtaagagaattgggaggtcgggtaatttgattgttgaggctgttgtgaatgaggaagaggatgaggatgaggtgttggacgagaagctgggctga

SEQ ID NO: 23346 - protein, 374 aa, Muscodor strobelii
  misc_feature: SGI Peptide ID NO. 567942
  misc_feature (249)..(357): Pfam Id: PF00789 Pfam Desc: UBX domain
  misc_feature (1)..(358): NCBI GI: 46130646 Blast Desc: FG08927.1 [Gibberella zeae PH-1]
  misc_feature (4)..(366): NCBI GI: 261353420 Blast Desc: UBX domain-containing protein [Verticillium albo-atrum VaMs.102]
  misc_feature (1)..(365): NCBI GI: 116193795 Blast Desc: CHGG_06615 [Chaetomium globosum CBS 148.51] gi|88182528|gb|EAQ89996.1| CHGG_06615 [Chaetomium globosum CBS 148.51]
  misc_feature (1)..(358): NCBI GI: 256734263 Blast Desc: [Nectria haematococca mpVI 77-13-4]
  misc_feature (1)..(355): NCBI GI: 171676177 Blast Desc: protein product [Podospora anserina] gi|170936154|emb|CAP60814.1| protein product [Podospora anserina]
  misc_feature (10)..(366): NCBI GI: 39970947 Blast Desc: MGG_02940 [Magnaporthe grisea 70-15] gi|149210473|ref|XP_001522611.1| MGCH7_ch7g711 [Magnaporthe grisea 70-15] gi|86196666|gb|EAQ71304.1| MGCH7_ch7g711 grisea
  misc_feature (1)..(354): NCBI GI: 85111805 Blast Desc: NCU01928 [Neurospora crassa OR74A] gi|28925879|gb|EAA34876.1| conserved [Neurospora crassa OR74A]
  misc_feature (3)..(358): NCBI GI: 154305661 Blast Desc: BC1G_07645 [Botryotinia fuckeliana B05.10] gi|150853164|gb|EDN28356.1| BC1G_07645 [Botryotinia fuckeliana B05.10]
  misc_feature (6)..(356): NCBI GI: 189208692 Blast Desc: UBX domain containing protein [Pyrenophora tritici-repentis Pt-1C-BFP] gi|187976772|gb|EDU43398.1| UBX domain containing protein [Pyrenophora tritici-repentis
  misc_feature (6)..(355): NCBI GI: 154282727 Blast Desc: conserved [Ajellomyces capsulatus NAm1] gi|150410339|gb|EDN05727.1| conserved [Ajellomyces capsulatus NAm1]
MTTGFRGTAGRRMLMPRDTAARFKREFEEEYGTDALPFHEGGFAQALDTAKRDLKFLLIVLMSPEHDDTESFTRDTLLAPEVVSFINDPANNIILWGGNVLDSEAFQVASEYNCSKYPFSCLVCLTPKEGSTRMSIVKRLVGPLSSATYLAELQTAINKYSPDIAGVRAERTAQEVSRNLRTEQDSAYERSLAQDRERVRRRKEAEAAAAAAEIKEKEDKEAAERLENKKQQWRRWRATTINPEPEASTDPKDVVRLALMLPSGRVVRKFDKGTTVEELYAFVECYDILTSNPELNGGENGKREEDEVDLPAEKPDEYSHVYAFRIVAPLPREVFRPDDEQTLGKRIGRSGNLIVEAVVNEEEDEDEVLDEKLG

SEQ ID NO: 23347 - DNA, 1599 bp, Muscodor strobelii
  misc_feature: SGI cDNA ID NO. 567943
  misc_feature: Reduced expression when VOC is produced
  misc_feature: Encodes the peptide sequence at SEQ ID NO 23348
atggcgagcgactcggcgatcgacataagccagctctcggctgagcagcaggccgctctgcagcaatacacacaggtcaccgaccaagacatcaaagacgccgtgccgcttctcgaaagatcgcaatggaacgtccagatagctatagcaaagttcttcgacggcgagggccccgaccctgtcgctgaggccgtcgcggcccagaaccacatcccagcgcaggcatcacgccacgagaaccttcaagatacctttcttgacccttctagtcgccctcgaccccgcgacagacccgatcccgccccgaggatagtacctcagcccacaaagacagcccgcacgcccttcctcctcgccatcatcttcgcccctttcaacataggcttgcgcaccgtctcgaccgtcttccgcacattcatgtacatcttcacattcctcccagcctcgatacggccccgcgcgataaccacgacgatgaccacgggcttcagagggacagcaggacgtaggatgttgatgccccgcgacaccgccgcacgcttcaagcgagagttcgaagaggaatacggcaccgacgctctgcccttccacgaaggtggctttgctcaggccctcgacactgccaagcgggacctcaagttcttgctcatcgtcctcatgtcacccgagcacgacgacaccgagtcctttacgagagacacgctgcttgctccggaagtcgtgagcttcatcaacgacccagcaaacaacatcattctctggggagggaatgttcttgactccgaggctttccaagtcgctagtgaatacaattgctccaaataccccttttcttgtctcgtctgtctcacgccaaaggagggaagcacgcgcatgagcatcgtgaagagattagtcggccccctctcctccgctacctatctcgcagagttacagactgccatcaacaaatacagccccgacatagccggagtccgggccgagcgcacagcacaggaagtctccagaaacctccgcacagagcaagactctgcgtacgaacgatctctggcacaggatagagagcgcgtgagacggcgcaaggaagccgaagccgctgcggcggcggccgagataaaggagaaagaggataaggaagctgctgaacgactggagaataagaaacagcaatggagacgctggcgcgctactacgatcaaccctgagcctgaggctagcacggatccgaaagatgtggttagattggctcttatgctgccgagcggtagagttgtgaggaagtttgataaggggacgacggtcgaggagttgtatgcttttgtggagtgttatgatattcttacttcgaatccggagttgaatggaggggagaatgggaaaagagaggaggatgaggttgatctgcccgccgagaaaccggatgagtattcgcatgtgtatgctttccgcattgtggcgccgttgccgagagaggtgtttcggcctgatgatgagcagacactgggtaagagaattgggaggtcgggtaatttgattgttgaggctgttgtgaatgaggaagaggatgaggatgaggtgttggacgagaagctgggctga

SEQ ID NO: 23348 - protein, 532 aa, Muscodor strobelii
  misc_feature: SGI Peptide ID NO. 567943
  misc_feature (407)..(515): Pfam Id: PF00789 Pfam Desc: UBX domain
  misc_feature (4)..(516): NCBI GI: 46130646 Blast Desc: FG08927.1 [Gibberella zeae PH-1]
  misc_feature (1)..(523): NCBI GI: 116193795 Blast Desc: CHGG_06615 [Chaetomium globosum CBS 148.51] gi|88182528|gb|EAQ89996.1| CHGG_06615 [Chaetomium globosum CBS 148.51]
  misc_feature (7)..(524): NCBI GI: 261353420 Blast Desc: UBX domain-containing protein [Verticillium albo-atrum VaMs.102]
  misc_feature (3)..(516): NCBI GI: 256734263 Blast Desc: [Nectria haematococca mpVI 77-13-4]
  misc_feature (1)..(513): NCBI GI: 171676177 Blast Desc: protein product [Podospora anserina] gi|170936154|emb|CAP60814.1| protein product [Podospora anserina]
  misc_feature (3)..(524): NCBI GI: 39970947 Blast Desc: MGG_02940 [Magnaporthe grisea 70-15] gi|149210473|ref|XP_001522611.1| MGCH7_ch7g711 [Magnaporthe grisea 70-15] gi|86196666|gb|EAQ71304.1| MGCH7_ch7g711 grisea
  misc_feature (1)..(512): NCBI GI: 85111805 Blast Desc: NCU01928 [Neurospora crassa OR74A] gi|28925879|gb|EAA34876.1| conserved [Neurospora crassa OR74A]
  misc_feature (5)..(516): NCBI GI: 154305661 Blast Desc: BC1G_07645 [Botryotinia fuckeliana B05.10] gi|150853164|gb|EDN28356.1| BC1G_07645 [Botryotinia fuckeliana B05.10]
  misc_feature (7)..(513): NCBI GI: 154282727 Blast Desc: conserved [Ajellomyces capsulatus NAm1] gi|150410339|gb|EDN05727.1| conserved [Ajellomyces capsulatus NAm1]
  misc_feature (8)..(516): NCBI GI: 156031092 Blast Desc: SS1G_14154 [Sclerotinia sclerotiorum 1980] gi|154700545|gb|EDO00284.1| SS1G_14154 [Sclerotinia sclerotiorum 1980]
  misc_feature: Useful for introducing or modulating the production of volatile compounds
MASDSAIDISQLSAEQQAALQQYTQVTDQDIKDAVPLLERSQWNVQIAIAKFFDGEGPDPVAEAVAAQNHIPAQASRHENLQDTFLDPSSRPRPRDRPDPAPRIVPQPTKTARTPFLLAIIFAPFNIGLRTVSTVFRTFMYIFTFLPASIRPRAITTTMTTGFRGTAGRRMLMPRDTAARFKREFEEEYGTDALPFHEGGFAQALDTAKRDLKFLLIVLMSPEHDDTESFTRDTLLAPEVVSFINDPANNIILWGGNVLDSEAFQVASEYNCSKYPFSCLVCLTPKEGSTRMSIVKRLVGPLSSATYLAELQTAINKYSPDIAGVRAERTAQEVSRNLRTEQDSAYERSLAQDRERVRRRKEAEAAAAAAEIKEKEDKEAAERLENKKQQWRRWRATTINPEPEASTDPKDVVRLALMLPSGRVVRKFDKGTTVEELYAFVECYDILTSNPELNGGENGKREEDEVDLPAEKPDEYSHVYAFRIVAPLPREVFRPDDEQTLGKRIGRSGNLIVEAVVNEEEDEDEVLDEKLG

SEQ ID NO: 23349 - DNA, 1968 bp, Muscodor strobelii
  misc_feature: SGI cDNA ID NO. 567944
  misc_feature: Encodes the peptide sequence at SEQ ID NO 23350
atggccagtacaagaacgggcacggccagccagggcaggcagatggcctcgcccaggcctaagacgcgtgattccaaagataccctctgccgaaatgtcctgatctacggccattgtcgatacgagaatcagggttgtgcctttagacacgatcagaacaagccctccaacgatgacaaccctcccaagaaatctctaaacgtcgactctccatctttcacacctgctcagcctgggaggaaatccgccttgtcaacaaatgccacgcccttcactccgaggggaagttcggcacaagtgcccactgctgcaacgcttcagcaagatggtgggaccaacttattcaagtcagcagccttcacagactacagtcagaatcattataatttagactcatcgggtgccctgaacggcacagcagacagttcgcttggatttgatcccttcatgtccaatgtagctcagacgctcccatctacaccttacaacccatatgcagacgaccataacgccttggcggcagcgggagcttcgtattatggagcccagaacgcctatgctgccccaacacagccactacaacatcatctttactatccagggcttgccaatgctcgagagcagttgcaaccataccagcgatttctttttgacttcttcttacccgaggacttgagagagactatgcaaaagaaggcagatgcagctaggcaagtcttacctggacatgttcttcaagcgaattctcttgcacaataccattctctcgtgccactagttgcgcacgaagacagcagcgtcggcaagcataggagcacccaaagcatcttcgggcttcccacatgggcatggaaagcaacttcgaggaaggacgggaatgtttacttcctccgaagaatcgaaggcttccgtttgacaaacgaagatgctatcaaggcagttcagtcttggaagaaaatcaaccatccaggtattgtcacggttgtcgaggcttttaccactagagaatttagtgaaccatctcttatatttgctcatgcttatcacccgctgtccaagacgcttgcggagcatcacttccccgccactccgaataacagattcggccgtccgccacccgccgtgccagagaatacgctgtggagttatctggtgcaactatcaagcgcgttattggccatccacaaagcaaagttggccgcgcgctgcatcgatattaccaaggtgatcttgactgacaaaaacaaaatcaggcttagtgggtgctctattttagatgtcatgcactttgatgcccaggccggccgtcggatcgaagatattcagcaggaagacttcttcagtctcggaaaactgatactcagcgtcgctaccaagaccctgcccaagaacatgaaagactacaatgtactagtcgaacaattgggtcacgcaggctattcgcaggagctcaaggaacgaattagctggttactcaccccacctagcgcgcaattcaacaagacggcagagcagctggtttgcgacactgcccttcatatgaacgacacactagtgtccttttctgtagcccaagacgatgccttcaatcacctaggcagagagctcgagaatggtagagtcgtccggctcatggccaagctaggtaccatcaacgagcggcctgaatatgagggagagctgaattggagcgaaaacggcgagcgttatccgcttaagcttttccgcgactatgtcttccatcaagtcgatgcccagggtcatccagtcctggaccttggccatataatcagctgctttaacaaactcgataccggaacagatgagaaagtctaccttgtgagtcgggaccagcagacagccatggtcatgacctacaaagagctgcacaaccatgtcaaaaatgcctttggtgacctacaaaaagcaagtaacaagcagcaggcacaaaataatagggcatactag

SEQ ID NO: 23350 - protein, 655 aa, Muscodor strobelii
  misc_feature: SGI Peptide ID NO. 567944
  misc_feature (1)..(644): NCBI GI: 149210471 Blast Desc: MGCH7_ch7g710 [Magnaporthe grisea 70-15] gi|121794012|sp|Q2KFH6.1|PAN3_MAGGR RecName: Full=PAB-dependent poly(A)-specific ribonuclease subunit PAN3; AltName: [Magnaporthe
  misc_feature (1)..(644): NCBI GI: 158563946 Blast Desc: MGCH7_ch7g710 [Magnaporthe grisea 70-15] gi|121794012|sp|Q2KFH6.1|PAN3_MAGGR RecName: Full=PAB-dependent poly(A)-specific ribonuclease subunit PAN3; AltName: [Magnaporthe
  misc_feature (63)..(644): NCBI GI: 46130648 Blast Desc: FG08928.1 [Gibberella zeae PH-1]
  misc_feature (63)..(644): NCBI GI: 256733758 Blast Desc: [Nectria haematococca mpVI 77-13-4]
  misc_feature (1)..(646): NCBI GI: 242773719 Blast Desc: poly(A)-binding protein-dependent poly(A) ribonuclease, [Talaromyces stipitatus ATCC 10500] gi|218721915|gb|EED21333.1| poly(A)-binding protein-dependent
  misc_feature (1)..(642): NCBI GI: 212531687 Blast Desc: poly(A)-binding protein-dependent poly(A) ribonuclease, [Penicillium marneffei ATCC 18224] gi|210071364|gb|EEA25453.1| poly(A)-binding protein-dependent
  misc_feature (13)..(642): NCBI GI: 226278770 Blast Desc: PAB-dependent poly(A)-specific ribonuclease subunit PAN3 [Paracoccidioides brasiliensis Pb01]
  misc_feature (13)..(642): NCBI GI: 225561487 Blast Desc: PAB-dependent poly(A)-specific ribonuclease subunit pan3 [Ajellomyces capsulatus G186AR]
  misc_feature (1)..(644): NCBI GI: 158513220 Blast Desc: PAB-dependent poly(A)-specific ribonuclease subunit pan3 [Ajellomyces capsulatus G186AR]
  misc_feature (1)..(646): NCBI GI: 240108664 Blast Desc: Zinc finger CCCH type domain containing protein [Coccidioides posadasii C735 delta SOWgp]
MASTRTGTASQGRQMASPRPKTRDSKDTLCRNVLIYGHCRYENQGCAFRHDQNKPSNDDNPPKKSLNVDSPSFTPAQPGRKSALSTNATPFTPRGSSAQVPTAATLQQDGGTNLFKSAAFTDYSQNHYNLDSSGALNGTADSSLGFDPFMSNVAQTLPSTPYNPYADDHNALAAAGASYYGAQNAYAAPTQPLQHHLYYPGLANAREQLQPYQRFLFDFFLPEDLRETMQKKADAARQVLPGHVLQANSLAQYHSLVPLVAHEDSSVGKHRSTQSIFGLPTWAWKATSRKDGNVYFLRRIEGFRLTNEDAIKAVQSWKKINHPGIVTVVEAFTTREFSEPSLIFAHAYHPLSKTLAEHHFPATPNNRFGRPPPAVPENTLWSYLVQLSSALLAIHKAKLAARCIDITKVILTDKNKIRLSGCSILDVMHFDAQAGRRIEDIQQEDFFSLGKLILSVATKTLPKNMKDYNVLVEQLGHAGYSQELKERISWLLTPPSAQFNKTAEQLVCDTALHMNDTLVSFSVAQDDAFNHLGRELENGRVVRLMAKLGTINERPEYEGELNWSENGERYPLKLFRDYVFHQVDAQGHPVLDLGHIISCFNKLDTGTDEKVYLVSRDQQTAMVMTYKELHNHVKNAFGDLQKASNKQQAQNNRAY

SEQ ID NO: 23351 - DNA, 3069 bp, Muscodor strobelii
  misc_feature: SGI EST ID NO. CUFF.54976.0
  misc_feature: Variant of the nucleotide sequence at SEQ ID NO 23349
ttggtcttgcttagtcctgcctgcattctgagtcgcaatctcgtcctgcctcccttcctgacgaatgactaacttgactttgactttacattttgactgggggtgcacctttcgcattcattctcccagatattatagattgctttattcagtaccatagtcaattgtcatttgcaggcgtaatccgacgccccaacacgttccaaaatggggccgctttgagctcctgcctcgtcgacgtcctgcgcttctcccctccaccggactgcgaattcgacttattgcattcacaactatatgatccaacatatactctcatgctctacattaatcattgtagttctagtcgggactgatccgtgcgactgtaatgcgcctctgccataaatcacgatcccactcgcgcgcgtccgtcgtttccacacatcggggcccatctacaactcgtcgatgctataattcatatcatacctaagtccggccgggcggtgcgcatagcttctagaatctgcaacccatacaagacatcagagcctgccgtcgcggtcgtaattgaatgattttcagcatttctcctgtgtatatctgttcccatggccagtacaagaacgggcacggccagccagggcaggcagatggcctcgcccaggcctaagacgcgtgattccaaagataccctctgccgaaatgtcctgatctacggccattgtcgatacgagaatcagggttgtgcctttagacacgatcagaacaagccctccaacgatgacaaccctcccaagaaatctctaaacgtcgactctccatctttcacacctgctcagcctgggaggaaatccgccttgtcaacaaatgccacgcccttcactccgaggggaagttcggcacaagtgcccactgctgcaacgcttcagcaagatggtgggaccaacttattcaagtcagcagccttcacagactacagtcagaatcattataatttagactcatcgggtgccctgaacggcacagcagacagttcgcttggatttgatcccttcatgtccaatgtagctcagacgctcccatctacaccttacaacccatatgcagacgaccataacgccttggcggcagcgggagcttcgtattatggagcccagaacgcctatgctgccccaacacagccactacaacatcatctttactatccagggcttgccaatgctcgagagcagttgcaaccataccagcgatttctttttgacttcttcttacccgaggacttgagagagactatgcaaaagaaggcagatgcagctaggcaagtcttacctggacatgttcttcaagcgaattctcttgcacaataccattctctcgtgccactagttgcgcacgaagacagcagcgtcggcaagcataggagcacccaaagcatcttcgggcttcccacatgggcatggaaagcaacttcgaggaaggacgggaatgtttacttcctccgaagaatcgaaggcttccgtttgacaaacgaagatgctatcaaggcagttcagtcttggaagaaaatcaaccatccaggtattgtcacggttgtcgaggcttttaccactagagaatttagtgaaccatctcttatatttgctcatgcttatcacccgctgtccaagacgcttgcggagcatcacttccccgccactccgaataacagattcggccgtccgccacccgccgtgccagagaatacgctgtggagttatctggtgcaactatcaagcgcgttattggccatccacaaagcaaagttggccgcgcgctgcatcgatattaccaaggtgatcttgactgacaaaaacaaaatcaggcttagtgggtgctctattttagatgtcatgcactttgatgcccaggccggccgtcggatcgaagatattcagcaggaagacttcttcagtctcggaaaactgatactcagcgtcgctaccaagaccctgcccaagaacatgaaagactacaatgtactagtcgaacaattgggtcacgcaggctattcgcaggagctcaaggaacgaattagctggttactcaccccacctagcgcgcaattcaacaagacggcagagcagctggtttgcgacactgcccttcatatgaacgacacactagtgtccttttctgtagcccaagacgatgccttcaatcacctaggcagagagctcgagaatggtagagtcgtccggctcatggccaagctaggtaccatcaacgagcggcctgaatatgagggagagctgaattggagcgaaaacggcgagcgttatccgcttaagcttttccgcgactatgtcttccatcaagtcgatgcccagggtcatccagtcctggaccttggccatataatcagctgctttaacaaactcgataccggaacagatgagaaagtctaccttgtgagtcgggaccagcagacagccatggtcatgacctacaaagagctgcacaaccatgtcaaaaatgcctttggtgacctacaaaaagcaagtaacaagcagcaggcacaaaataatagggcatactaggagattgcccgtgaagagtacaacagctagcagcggtcgctcaccaacaaggcatattagcagaatgtccgtgaagagtgggtaatgaacaacaagcagcgggaaacaagcaacagaggatccccggaggaatccaatcatcgcgaagattcttccaaggaaccagatagtggaggttccttgaagcgccccagtcgcacaggatccttagaggaacccattaatcacccgaaagttaattcccacagcgggatatgacaatccgaaaacaatgtccacttaggaaggttttgacgcaaggcttttgctagtataggaagcgaaggatatccttgaatagcgatgttatacgggttccatggaaatcattggatctttgcatccgcagcgcgtcatgttcctacccataggttgctttgaacacacaaaggcattcgaaagaagaggatgaaaaaatcgaaaacaaaacgaaaaacgaagaatagatacaagaattgagaaatttcca

SEQ ID NO: 23352 - DNA, 414 bp, Muscodor strobelii
  misc_feature: SGI cDNA ID NO. 567945
  misc_feature: Encodes the peptide sequence at SEQ ID NO 23353
atgtccgaccgcggtcagcaccgcggcggcggcagaggcggcggccaccatcgcggcggacggggtggtcgcggtggccgaggaggaggagcacatggtggcgactcttcaggcgctccccaggaacgtgaacgtcccaagagagagaacatcttggatctcagcaagtacatggagaagcgcatcacggtcaagttcaacggaggacgagagattcagggcacactcaaaggattcgatgctctcaccaacctggtgttgacggacgtgaaagagttcatgagagatgatgagggcaaagaggccaccagggatcttggactagtcgtggctcgaggcacgttattagtagttatcagcccggtggatggcagcgaggagattgagaacccgttcgcacagcaggacgattag

SEQ ID NO: 23353 - protein, 137 aa, Muscodor strobelii
  misc_feature: SGI Peptide ID NO. 567945
  misc_feature (52)..(121): Pfam Id: PF01423 Pfam Desc: LSM domain
  misc_feature (1)..(137): NCBI GI: 46130650 Blast Desc: FG08929.1 [Gibberella zeae PH-1]
  misc_feature (1)..(137): NCBI GI: 256734264 Blast Desc: NECHADRAFT_59475 [Nectria haematococca mpVI 77-13-4]
  misc_feature (42)..(137): NCBI GI: 261353418 Blast Desc: RH73529p [Verticillium albo-atrum VaMs.102]
  misc_feature (31)..(137): NCBI GI: 238492871 Blast Desc: small nuclear ribonucleoprotein (LSM7), [Aspergillus flavus NRRL3357] gi|220696166|gb|EED52508.1| small nuclear ribonucleoprotein (LSM7), [Aspergillus flavus NRRL3357]
  misc_feature (44)..(137): NCBI GI: 239612791 Blast Desc: conserved [Ajellomyces dermatitidis ER-3]
  misc_feature (44)..(137): NCBI GI: 261194282 Blast Desc: conserved [Ajellomyces dermatitidis SLH14081] gi|239588560|gb|EEQ71203.1| conserved [Ajellomyces dermatitidis SLH14081]
  misc_feature (41)..(137): NCBI GI: 171676173 Blast Desc: protein product [Podospora anserina] gi|170936152|emb|CAP60812.1| protein product [Podospora anserina]
  misc_feature (44)..(137): NCBI GI: 226278771 Blast Desc: conserved [Paracoccidioides brasiliensis Pb01]
  misc_feature (44)..(137): NCBI GI: 225677618 Blast Desc: conserved [Paracoccidioides brasiliensis Pb03]
  misc_feature (44)..(137): NCBI GI: 225561488 Blast Desc: [Ajellomyces capsulatus G186AR]
MSDRGQHRGGGRGGGHHRGGRGGRGGRGGGAHGGDSSGAPQERERPKRENILDLSKYMEKRITVKFNGGREIQGTLKGFDALTNLVLTDVKEFMRDDEGKEATRDLGLVVARGTLLVVISPVDGSEEIENPFAQQDD

SEQ ID NO: 23354 - DNA, 1305 bp, Muscodor strobelii
  misc_feature: SGI EST ID NO. CUFF.54980.0
  misc_feature: Variant of the nucleotide sequence at SEQ ID NO 23352
tggaaatgccacgaagctctagaaacgtgcagggttgaggcagctgttcagcctttcccccacacaactaaccgaggctacaagtaacattgcagcacatcggagcttcaatcttgttacgtcttgcgttgccagattgcgacctgcaacccgacgaaaagaaacgcgccgaagtccatgtgacaacaacactttgcatctctacccccaaaccaaaccgctgccgacgttgccgactgtttgcgatcgcctacctgtcgtctgtaaactgcaatccgcccaatttgccacggacccatctgcgcaaagctaggaggtcgccacagatccattcacaccgcaatttcgctacagcgctgacagcgagcactcaatatcacaccttccgatcgcggccgcttcatcgctgcttcaccctaaccccgcgtcacatccttgagcagccacttacacaaaaacacgccatgtccgaccgcggtcagcaccgcggcggcggcagaggcggcggccaccatcgcggcggacggggtggtcgcggtggccgaggaggaggagcacatggtggcgactcttcaggcgctccccaggaacgtgaacgtcccaagagagagaacatcttggatctcagcaagtacatggagaagcgcatcacggtcaagttcaacggaggacgagagattcagggcacactcaaaggattcgatgctctcaccaacctggtgttgacggacgtgaaagagttcatgagagatgatgagggcaaagaggccaccagggatcttggactagtcgtggctcgaggcacgttattagtagttatcagcccggtggatggcagcgaggagattgagaacccgttcgcacagcaggacgattaggatgccgagttgcgtatgttgtgagagttacagaatgacatagattcataacttgaccagcatctccgaattgattggagactaatcaagggagtaagtcatcggataaacaaaacttcaatcttcagctccccaagggagtaatttcggggtttgatgcctggaacactcatgatatggcgatggatgtctcgctgagttgataatgcaccaagttgtttgcgaacgtgatgaatgcgctgcttctggcattggaggggaagagcatcatccattttctcgaccaacgaaaacttgggagcggtttgctgtcacaatagctgctatatgttctgaagtatctacatgcaggcagtcacagaataaaacatttactagcggcaggatttattgtgtgttctttcgtaacttaaaatgcgtgcgaaat

SEQ ID NO: 23355 - DNA, 1479 bp, Muscodor strobelii
  misc_feature: SGI cDNA ID NO. 567946
  misc_feature: Encodes the peptide sequence at SEQ ID NO 23356
atggaaggcaacaatgtacccataaattacttgacgaaagcacaggccgcaagacttaagctcattcaaggcgatggcgatactttttctgatgttttaggcctcatcaccgaatatgaaggggtcttgaacagacatgaaagcctcgccttcaacttgggcgcaaagctcactgggagccgcctccttaaggctatggaaggcgcttttgagggcacgatcacgacgacaccacctcagaacctcttctcccctgaccccgtaacatggcttgacattgtgagctttgccaagtcgaatcctcaaggattccagctatcttcgacgcctagcggcatgcgctactgtggattcctcttgaaaggcgttcaagtggaaattagcgaggatgactggaggctgatcaagtctggtgccttggagaggtttagacttgtcccgccgcaacctttagatgaagatgaggcagccgagcttgctacgctcgaaatcattgaacaaagattgcagattctgattaagaaggcggatgaggtagcgagaagggcacgccagctcaattatcatctgagtgggcgcaaggcatccatccacacccgccatccaccccaggctaattccggatcgaagttccaaagtgtcaataccggccagcccaacagctcaacccctggatatgatgtccatgccgacctgctccaacagtttaccgctccgtcgcaacctggcagccataggctctcctctgtgggctctctaccgccaacgccgaacctcatgtccgcgactactgcgacgccgaggacctccctgcctccacacaccctcgcaagcagtaacagaccgtcgcccacctacgcttcggaaggcgtgagagacaccgaagaagaataccgcgtacttgtgacgtcgaaaattgagcagcttacgcgcggcgacatcatccggccgccttgcgatcgatgtcgacgcctcaagacacaatgcatcaaacacctgacggcttgtcagggctgtaccaagaagcatactaaatgcacgtggaagaagttgacggaagacgaactagcgtggctcaacggagaaacgagcatggagaccgaagaggaagaggaggagccgagggaaacaacgtggagaaacacattcgcgcagcctcctcagcctccgggcttgtacgacctacgcggcaaagtggaacgtgtagaggagacggcagctgggcctccacggccgggcgtggtgattgggcgacacaacgacgacgtatggcggaaagaatcgacaaccccgacggttaaccgagacgattcgatggatatcgattctaacaaccgagcgagatattcacgcgacgagaatgcgccctacgcagcaatgcatggatcgtcggttgacccgaggatcagacaagtagcctcagccgcatcggcccgtgcggacgcggcggcttcacgagaaactgcacctcaccgatga

SEQ ID NO: 23356 - protein, 492 aa, Muscodor strobelii
  misc_feature: SGI Peptide ID NO. 567946
  misc_feature (8)..(377): NCBI GI: 46130652 Blast Desc: FG08930.1 [Gibberella zeae PH-1]
  misc_feature (8)..(368): NCBI GI: 256733759 Blast Desc: [Nectria haematococca mpVI 77-13-4]
  misc_feature (8)..(356): NCBI GI: 156031026 Blast Desc: SS1G_14121 [Sclerotinia sclerotiorum 1980] gi|154700512|gb|EDO00251.1| SS1G_14121 [Sclerotinia sclerotiorum 1980]
  misc_feature (8)..(356): NCBI GI: 154305607 Blast Desc: BC1G_07618 [Botryotinia fuckeliana B05.10] gi|150853137|gb|EDN28329.1| BC1G_07618 [Botryotinia fuckeliana B05.10]
  misc_feature (4)..(391): NCBI GI: 115492177 Blast Desc: conserved [Aspergillus terreus NIH2624] gi|114197576|gb|EAU39276.1| conserved [Aspergillus terreus NIH2624]
  misc_feature (3)..(361): NCBI GI: 85111811 Blast Desc: NCU01931 [Neurospora crassa OR74A] gi|28925882|gb|EAA34879.1| [Neurospora crassa OR74A]
  misc_feature (2)..(389): NCBI GI: 242773728 Blast Desc: C6 finger domain protein, [Talaromyces stipitatus ATCC 10500] gi|218721917|gb|EED21335.1| C6 finger domain protein, [Talaromyces stipitatus ATCC 10500]
  misc_feature (4)..(390): NCBI GI: 255941630 Blast Desc: Pc16g12850 [Penicillium chrysogenum Wisconsin 54-1255] gi|211586207|emb|CAP93955.1| Pc16g12850 [Penicillium chrysogenum Wisconsin 54-1255]
  misc_feature (4)..(356): NCBI GI: 258563076 Blast Desc: conserved [Uncinocarpus reesii 1704] gi|237907790|gb|EEP82191.1| conserved [Uncinocarpus reesii 1704]
  misc_feature (2)..(389): NCBI GI: 212531691 Blast Desc: C6 finger domain protein, [Penicillium marneffei ATCC 18224] gi|210071366|gb|EEA25455.1| C6 finger domain protein, [Penicillium marneffei ATCC 18224]
MEGNNVPINYLTKAQAARLKLIQGDGDTFSDVLGLITEYEGVLNRHESLAFNLGAKLTGSRLLKAMEGAFEGTITTTPPQNLFSPDPVTWLDIVSFAKSNPQGFQLSSTPSGMRYCGFLLKGVQVEISEDDWRLIKSGALERFRLVPPQPLDEDEAAELATLEIIEQRLQILIKKADEVARRARQLNYHLSGRKASIHTRHPPQANSGSKFQSVNTGQPNSSTPGYDVHADLLQQFTAPSQPGSHRLSSVGSLPPTPNLMSATTATPRTSLPPHTLASSNRPSPTYASEGVRDTEEEYRVLVTSKIEQLTRGDIIRPPCDRCRRLKTQCIKHLTACQGCTKKHTKCTWKKLTEDELAWLNGETSMETEEEEEEPRETTWRNTFAQPPQPPGLYDLRGKVERVEETAAGPPRPGVVIGRHNDDVWRKESTTPTVNRDDSMDIDSNNRARYSRDENAPYAAMHGSSVDPRIRQVASAASARADAAASRETAPHR

SEQ ID NO: 23357 - DNA, 8269 bp, Muscodor strobelii
  misc_feature: SGI EST ID NO. CUFF.55145.0
  misc_feature: Variant of the nucleotide sequence at SEQ ID NO 23355
cgcggcttcagattactagtaagaacttgtaatagggggcacattccagcttgtccgaacaaagttgataggtcaacatgttctagatgcgataggcagcatcctcgaatctgttttgcaaaagacgctttgccacggagcttggaagtgcaaattaatattatagccatagacattcgagagcaggtgatctaagaagctagggaagcgaggcatgctgcatgttcgctagatatctagattgcacttagagcgcaaccacgcgcctctacgaaagacgcgatgttgtcgatcatgttccctatccgtcgccgcactcgcatctgtgctacttgtcgactaggccggaaggttcgacaaaggatagcaaaaggcctctggcgacccgacgcagaacccaggaccctgagattagctgcatgggcggtaaattcgaacaaccgcaatgacgatctctaccgcattcccttttggtgccctgtacaccacgcgatctagaactccccagagcaagtgattggcacgaagcgacagggaatcatggaaatctatcatgggatcgacatggaacagacatgtaactaagacaattaattggggtaccttttttacttatggttaggtgcctcaggtgagagagggttctgctcagggctacctaaagtagtgcatgaattcgtgttgataatacggacagctcgacaaagagatactactgtagattacggatacagggacgcgatagctcaagccttaagccggaagtcggtgcatcgggcttgcccgactgtaaccgtcaggtctaacgggaattcaaaacctcatggccatatccagtaggttgcccatgggcaatcgggaattgcgctctggagacatctagaaacgctctcgaccgcctctagctctgctttgttccaatagtatatatagctgtgagctccacgacaggtagtctctttcctagaccatggagacgggtcttcgtttggtggggtgcgtgccgtgcggaactgttgcaaatttcgaagtgcgccggtgtctgtagacccgcctaccgaattcgccaatggcttcgacttcatcctcccgttttcgattgcaacactacttctgcacgacccgctgatcatcgaacagcccgtcaaatctgtgggattgttacgtctgcctacgacctgctgactgcattatagaggattatcaatctagagatgcatcagctcgcgcttattcgcgctcgttcgcagctcaccggacgagacaggcaccagtagaaatcctagcagaagcataccgcaatttaaagttcttatacagtagcacgctgcaagttgtctccaagttccgaacgtcgtctttgatgtggagtcgagcaaccttgaatctttgatcctttctgtctgcgctccgccatttagcccgtaggagtaacccaccgcaaagcccacaccacccggcttgattccgtgtcggcattgtgcgccctgtcagtccactcaataacgaaaaagctgcagtttccgcgcacatcgggaaatactgtcctaagaataatcaaaatccggtctgacccggtctgacatggtactacctagtctgccatccgacctggccgactttgcggccttcagggattaaccgtaactcataacccacttgcatgaggcctatgcgctaacagcagaacatcacaaggcgggagtgacaaggctattgtggtcgagtcgtgggcctgtacgtacaatatcaccaacgaggcaacggtctgcgcgccatgaacctcccaattgctctgttgcttttcgtgtactcgcacaagcacaccgtagttactgtactgtagaagagagaatatggaagtgtggagcgccaaggaaaccaagaaggacaaggccacagctctgaacggtcccttttcgccaatttcccagacactgttctctccctgctcatacatccccagtcgatccagcatcctagaggttatttggcttcggcttcagatcccccgctaacagctcatcaccacgcccagcctccacctctgtctcgctaacccccaaaacaccaaaatacgacttgggatcgacggaggacccctggcccctctggacgtccaactctgacgatcacctcataccttttcttcttgccgtttggtcatctcacctcattgctcattggttgacccacgtatgctaccattatcagacttcaggagttagtcgtcctctttgaaggcgcttgcgacaaacggacaagtgtgagctgcttttccgcctgtcgtatgaataggtggcttacgcatattgcgtgttgtttgttgctatattctgctctagacaggcgtgaaagattgcttacccaggattttgggtcaccaataggggctcatccgccttgccattggatctgaagcttctgcatctgttccggtcattcgcttagtacacttatgaacccatacccacgaggttccattatctctgtatctcgagcaccgactacagacttatctacccacctttactagacttatccgtcactaatacgcccgcgatcttcaactagcactatccacccgtccacgggaacgtaagcagtatatcggcaaccaccttctcgtttgtctccagggccgtcctcctgactcccccatgaatgtcctcacctcgactcagcgcagtgggctgggtgggattctcgggattgcgaggactgcataacttgtgtgtcttcgttgggcttctttgcagtatctggtagaccccaggctttcaacaggggacaatggcgcataaccttgaagccgaccagcacaaacggaaacgtgatatcgctgatgatcatcctgaccgcattcctcaaccaccgcctccatccggcaacaatgtacccataaattacttgacgaaagcacaggccgcaagacttaagctcattcaaggcgatggcgatactttttctgatgttttaggcctcatcaccgaatatgaaggggtcttgaacagacatgaaagcctcgccttcaacttgggcgcaaagctcactgggagccgcctccttaaggctatggaaggcgcttttgagggcacgatcacgacgacaccacctcagaacctcttctcccctgaccccgtaacatggcttgacattgtgagctttgccaagtcgaatcctcaaggattccagctatcttcgacgcctagcggcatgcgctactgtggattcctcttgaaaggcgttcaagtggaaattagcgaggatgactggaggctgatcaagtctggtgccttggagaggtttagacttgtcccgccgcaacctttagatgaagatgaggcagccgagcttgctacgctcgaaatcattgaacaaagattgcagattctgattaagaaggcggatgaggtagcgagaagggcacgccagctcaattatcatctgagtgggcgcaaggcatccatccacacccgccatccaccccaggctaattccggatcgaagttccaaagtgtcaataccggccagcccaacagctcaacccctggatatgatgtccatgccgacctgctccaacagtttaccgctccgtcgcaacctggcagccataggctctcctctgtgggctctctaccgccaacgccgaacctcatgtccgcgactactgcgacgccgaggacctccctgcctccacacaccctcgcaagcagtaacagaccgtcgcccacctacgcttcggaaggcgtgagagacaccgaagaagaataccgcgtacttgtgacgtcgaaaattgagcagcttacgcgcggcgacatcatccggccgccttgcgatcgatgtcgacgcctcaagacacaatgcatcaaacacctgacggcttgtcagggctgtaccaagaagcatactaaatgcacgtggaagaagttgacggaagacgaactagcgtggctcaacggagaaacgagcatggagaccgaagaggaagaggaggagccgagggaaacaacgtggagaaacacattcgcgcagcctcctcagcctccgggcttgtacgacctacgcggcaaagtggaacgtgtagaggagacggcagctgggcctccacggccgggcgtggtgattgggcgacacaacgacgacgtatggcggaaagaatcgacaaccccgacggttaaccgagacgattcgatggatatcgattctaacaaccgagcgagatattcacgcgacgagaatgcgccctacgcagcaatgcatggatcgtcggttgacccgaggatcagacaagtagcctcagccgcatcggcccgtgcggacgcggcggcttcacgagaaactgcacctcaccgatgaactacaaataacgaacacgaactggccagggagacaatatacgcatatcaatcgaagcccagtatactcaggcaatcatctattaggatcatacatgagcatcgcaggcgcagggcaaaggtggcgaaactatgtgtctacttgtatgcttgggaagaggggagtttgggtgtttggtggcgccgacggatagagaggacgggcgaccagaccgcgctcgcttttttacattcttcttttccatcgttgcggcttgaccagggcgacatgcatcgtggtcacgatagccgaggcttctttgtttacataatgatcctagactggaaatgtctgggttctcgaggttgtggtgaagggattacgcagccatgaccaaatgggtggtcatgctgtgtgggggttgaaagggggttgaaaatggatgtgccgtacataaggtgctctctcagagctaagcgagttttgtctcaccgcgcgatctgcgcgtactcatgaccaaagcctgtccaatgttgggccgttctgaagatgcatgagtcccatcctggaaggttgcattcgagagctctcaaagcccgtgtgtaagcatggctgatataaagtggcaggataaggctagagcagccgagtgccatttggacaaatctacgtagaaaatccaacttcaaggctgcctaaggggtaggaaatctaattgatacctgatttcgtctctaaacggaagctagataccaatgtctttcagctgaactaagcagaggggagattgaactgtgagttgatcccaaaaataggtcccgtgacctaggagcatacaagagcagaatatctgatgcacctagccaagcattgcatctctgaccggcgataatgaagttggtccgtcccgtggatatgcggccaaggactgtctcggcccaagagggaaaagtgatagacgcgcgggagggcaagccacagtctgatcactgatgatggatactagctgaaacgtggctcgcgtggatgcaggctcggtgcaggacagtacctggtctgcgggagcgccatctaacaggcgagacgacgggcgagcgacagacaagtgcacagtgcagtgatcccaagggcatggtgaccccttgcaagttgagattcagcaacgcggacgcggccccactccaattagaaggaagaaccatgcgaggcaggcaagacagggggaggagaggagaggaggagaatggcgaccaagtcccggggacgcgacggaaacgcggcgataaggagaatctgtggcgtcgggagtgctgcgatagcccccaattaggccatacatggagaaaaaaagttggccgtcatcatacatcgttcatacactgattttcgaatcatccttcaatcacctaccgaatccgccagtgacgtatccaaacgcattgtcataacctttgacatccgatcaacttgttcagagcctttttctacaaattcccaagtgagcgattgccggaaaaattcgaaagcaatcgccatctccatcgttggctgtgccatttgggagccgaagccaaactcatccgccgcccaaaccaacgcagctttcagccctttacgtctacgtacatcgccactgccatcacatgcaagcaccgtagactgcagccaccatgaccagcacgggaggacgccgcgaaagcgtcctcatccccgcgccgacaccactgccgcagtcccgcgagctgggcgtcgtcacgcccgacatcaccccgaaagcttcccccttcgccaaatcatggccgcatctagtcgctggaggtgtcggtggcataaccgccgcagccctgacggctcccctcgatgtcctcaaaacccgcctccagtccgacttctaccaagcccagctccgcgccgcccaagccgccaaaggccaagtgcgcctgaacccccttcaatccgcctcataccatctctccgaaaccatccaaatcttgcgcgacgtctaccgcctggaaggctggcgcgccctcttcaagggtctcggtcccaatctcgtcggcgtcatccccgcgcggagtatcaacttctacgcctacggtaccggcaagcgggcctactcagaatggacgggcctaggtcccaacaatcccgccgtgcacctcgccagcgccatcacagccggcattgcgaccgggacggcgacaaatcccatctggctcatcaaaactcggctgcagctcgacaagaacaatgccgagcgcaagggcgacgtgagcgccaggcgctataggaatagctgggactgcatcaagcaggtcatgcggaacgagggcccaacgggcttcttcaagggacttagcgccagctatcttggcgtgacggagagtacgctgcagtgggtactgtatgaagaactcaagagcaggttacgggcgcgcgaggagcgtatcgttctgagtgggagggagaagacgtggtgggaccacactgttgactggacgggcaatgcgatgggagctggtgctgccaagggtgttgccgctatactgacgtatccgcacgaggtcgcgagaacacgactacgacaagcaccgatggcagacggcagaccaaagtacacgggtcttgtgcagtgtttcaagcttgtctggaaagaggaaggcatgatcggtctatatggtggtctcacaccccacatgattcgcaccattccctcggcggccatcatgttcggcatgtatgagggcatcctcacgctgctcgatgccaagagttgagatgacccatagattgggtttatgtccccagatcttagcatatgacctgcgcaactaatcgcctcctcctgtgacacttgatcgatcgccagctcatggcttatatcgaccaaacgtcgtaccgatgtgagaacaaatcttcacgagacgctgcgacgacacccctcacgcgctgttcgagtaatcctaacgaatatcacactgtatcaacacaaataaccttcaaccaccctatcatcataatcacaccaaccaaccaacccagctctaattccctgatctggctgcgcagtgtacaaccacaaacctcacgaactgtacaaaaggacaaggagcccccaaataccaggatcaggcgcttcacttcacatctcatttacacccctacaatctacacacaaatcgcggcaggcaaggcggcaggcatcggagatatagacaggataaagagcacagcgcgagtacgcgcttgtataagtcgaggcgcattgtatatcaaaacctagcgctaatggacagcgttgaaggccaaagagagatgttcatctcttgtacttgtattatattgtacatcactctgtggctcatggcgatctatgcgcatatctgcgcatatctgtatatactgcgcaacgcaacgcagaattccgtaacgcgctagagaaaaaaatctaaatcgcatcaaacagttgagagcccatcttatgaatggtgaaatgtgttttatgtgtattgcgctatggcaccgccagatcaatcaacatcggcattctctgttctgctcaaccctcatgcttaatgacacgctgattgctaaaagccaactttgccgcatttttcataccttacaccatgcccagacttgccacactgcccgccaatgcttgctggcaaaacaatgctcgtagtagagatcataatcccccatcgtctcgttcagtctccctagtactctcactgacccaactgccctggctaccctcattcaaactctgcgctcgtccttttgtcgccaaagcctctagatttaggtgctggtactcaatgagggagataggtcgtctctttctgagtttgcgcggaacgcgacctgtggtcccagtccctcgggatccgaagaggcgcagtcaccactcgttgcggtcccatttggg

SEQ ID NO: 23358 - DNA, 1107 bp, Muscodor strobelii
  misc_feature: SGI cDNA ID NO. 567947
  misc_feature: Encodes the peptide sequence at SEQ ID NO 23359
atgaccagcacgggaggacgccgcgaaagcgtcctcatccccgcgccgacaccactgccgcagtcccgcgagctgggcgtcgtcacgcccgacatcaccccgaaagcttcccccttcgccaaatcatggccgcatctagtcgctggaggtgtcggtggcataaccgccgcagccctgacggctcccctcgatgtcctcaaaacccgcctccagtccgacttctaccaagcccagctccgcgccgcccaagccgccaaaggccaagtgcgcctgaacccccttcaatccgcctcataccatctctccgaaaccatccaaatcttgcgcgacgtctaccgcctggaaggctggcgcgccctcttcaagggtctcggtcccaatctcgtcggcgtcatccccgcgcggagtatcaacttctacgcctacggtaccggcaagcgggcctactcagaatggacgggcctaggtcccaacaatcccgccgtgcacctcgccagcgccatcacagccggcattgcgaccgggacggcgacaaatcccatctggctcatcaaaactcggctgcagctcgacaagaacaatgccgagcgcaagggcgacgtgagcgccaggcgctataggaatagctgggactgcatcaagcaggtcatgcggaacgagggcccaacgggcttcttcaagggacttagcgccagctatcttggcgtgacggagagtacgctgcagtgggtactgtatgaagaactcaagagcaggttacgggcgcgcgaggagcgtatcgttctgagtgggagggagaagacgtggtgggaccacactgttgactggacgggcaatgcgatgggagctggtgctgccaagggtgttgccgctatactgacgtatccgcacgaggtcgcgagaacacgactacgacaagcaccgatggcagacggcagaccaaagtacacgggtcttgtgcagtgtttcaagcttgtctggaaagaggaaggcatgatcggtctatatggtggtctcacaccccacatgattcgcaccattccctcggcggccatcatgttcggcatgtatgagggcatcctcacgctgctcgatgccaagagttga

SEQ ID NO: 23359 - protein, 368 aa, Muscodor strobelii
  misc_feature: SGI Peptide ID NO. 567947
  misc_feature (159)..(257): Pfam Id: PF00153 Pfam Desc: Mitochondrial carrier protein
  misc_feature (41)..(153): Pfam Id: PF00153 Pfam Desc: Mitochondrial carrier protein
  misc_feature (275)..(367): Pfam Id: PF00153 Pfam Desc: Mitochondrial carrier protein
  misc_feature (5)..(365): NCBI GI: 171676199 Blast Desc: protein product [Podospora anserina] gi|170936165|emb|CAP60825.1| protein product [Podospora anserina]
  misc_feature (19)..(364): NCBI GI: 46130654 Blast Desc: FG08931.1 [Gibberella zeae PH-1]
  misc_feature (18)..(364): NCBI GI: 116193823 Blast Desc: CHGG_06629 [Chaetomium globosum CBS 148.51] gi|88182542|gb|EAQ90010.1| CHGG_06629 [Chaetomium globosum CBS 148.51]
  misc_feature (1)..(368): NCBI GI: 261353416 Blast Desc: mitochondrial carrier protein RIM2 [Verticillium albo-atrum VaMs.102]
  misc_feature (18)..(368): NCBI GI: 85118945 Blast Desc: mitochondrial carrier protein RIM2 [Neurospora crassa OR74A] gi|28927357|gb|EAA36311.1| mitochondrial carrier protein RIM2 [Neurospora crassa OR74A]
  misc_feature (19)..(365): NCBI GI: 156056577 Blast Desc: SS1G_04019 [Sclerotinia sclerotiorum 1980] gi|154701805|gb|EDO01544.1| SS1G_04019 [Sclerotinia sclerotiorum 1980]
  misc_feature (18)..(365): NCBI GI: 39971015 Blast Desc: MGG_02974 [Magnaporthe grisea 70-15] gi|149210555|ref|XP_001522652.1| MGCH7_ch7g752 [Magnaporthe grisea 70-15] gi|86196707|gb|EAQ71345.1| MGCH7_ch7g752 grisea
  misc_feature (2)..(368): NCBI GI: 189202658 Blast Desc: calcium-binding mitochondrial carrier protein Aralar2 [Pyrenophora tritici-repentis Pt-1C-BFP] gi|187984764|gb|EDU50252.1| calcium-binding mitochondrial carrier
  misc_feature (21)..(368): NCBI GI: 115402473 Blast Desc: conserved [Aspergillus terreus NIH2624] gi|114189159|gb|EAU30859.1| conserved [Aspergillus terreus NIH2624]
  misc_feature (8)..(368): NCBI GI: 119493003 Blast Desc: mitochondrial carrier protein (Rim2), [Neosartorya fischeri NRRL 181] gi|119411917|gb|EAW21860.1| mitochondrial carrier protein (Rim2), [Neosartorya fischeri NRRL 181]
MTSTGGRRESVLIPAPTPLPQSRELGVVTPDITPKASPFAKSWPHLVAGGVGGITAAALTAPLDVLKTRLQSDFYQAQLRAAQAAKGQVRLNPLQSASYHLSETIQILRDVYRLEGWRALFKGLGPNLVGVIPARSINFYAYGTGKRAYSEWTGLGPNNPAVHLASAITAGIATGTATNPIWLIKTRLQLDKNNAERKGDVSARRYRNSWDCIKQVMRNEGPTGFFKGLSASYLGVTESTLQWVLYEELKSRLRAREERIVLSGREKTWWDHTVDWTGNAMGAGAAKGVAAILTYPHEVARTRLRQAPMADGRPKYTGLVQCFKLVWKEEGMIGLYGGLTPHMIRTIPSAAIMFGMYEGILTLLDAKS

SEQ ID NO: 23360 - DNA, 5294 bp, Muscodor strobelii
  misc_feature: SGI EST ID NO. CUFF.55145.2
  misc_feature: Variant of the nucleotide sequence at SEQ ID NO 23358
gtcataggtgctgacctcttggaaaggggtcttgaacagacatgaaagcctcgccttcaacttgggcgcaaagctcactgggagccgcctccttaaggctatggaaggcgcttttgagggcacgatcacgacgacaccacctcagaacctcttctcccctgaccccgtaacatggcttgacattgtgagctttgccaagtcgaatcctcaaggattccagctatcttcgacgcctagcggcatgcgctactgtggattcctcttgaaaggcgttcaagtggaaattagcgaggatgactggaggctgatcaagtctggtgccttggagaggtttagacttgtcccgccgcaacctttagatgaagatgaggcagccgagcttgctacgctcgaaatcattgaacaaagattgcagattctgattaagaaggcggatgaggtagcgagaagggcacgccagctcaattatcatctgagtgggcgcaaggcatccatccacacccgccatccaccccaggctaattccggatcgaagttccaaagtgtcaataccggccagcccaacagctcaacccctggatatgatgtccatgccgacctgctccaacagtttaccgctccgtcgcaacctggcagccataggctctcctctgtgggctctctaccgccaacgccgaacctcatgtccgcgactactgcgacgccgaggacctccctgcctccacacaccctcgcaagcagtaacagaccgtcgcccacctacgcttcggaaggcgtgagagacaccgaagaagaataccgcgtacttgtgacgtcgaaaattgagcagcttacgcgcggcgacatcatccggccgccttgcgatcgatgtcgacgcctcaagacacaatgcatcaaacacctgacggcttgtcagggctgtaccaagaagcatactaaatgcacgtggaagaagttgacggaagacgaactagcgtggctcaacggagaaacgagcatggagaccgaagaggaagaggaggagccgagggaaacaacgtggagaaacacattcgcgcagcctcctcagcctccgggcttgtacgacctacgcggcaaagtggaacgtgtagaggagacggcagctgggcctccacggccgggcgtggtgattgggcgacacaacgacgacgtatggcggaaagaatcgacaaccccgacggttaaccgagacgattcgatggatatcgattctaacaaccgagcgagatattcacgcgacgagaatgcgccctacgcagcaatgcatggatcgtcggttgacccgaggatcagacaagtagcctcagccgcatcggcccgtgcggacgcggcggcttcacgagaaactgcacctcaccgatgaactacaaataacgaacacgaactggccagggagacaatatacgcatatcaatcgaagcccagtatactcaggcaatcatctattaggatcatacatgagcatcgcaggcgcagggcaaaggtggcgaaactatgtgtctacttgtatgcttgggaagaggggagtttgggtgtttggtggcgccgacggatagagaggacgggcgaccagaccgcgctcgcttttttacattcttcttttccatcgttgcggcttgaccagggcgacatgcatcgtggtcacgatagccgaggcttctttgtttacataatgatcctagactggaaatgtctgggttctcgaggttgtggtgaagggattacgcagccatgaccaaatgggtggtcatgctgtgtgggggttgaaagggggttgaaaatggatgtgccgtacataaggtgctctctcagagctaagcgagttttgtctcaccgcgcgatctgcgcgtactcatgaccaaagcctgtccaatgttgggccgttctgaagatgcatgagtcccatcctggaaggttgcattcgagagctctcaaagcccgtgtgtaagcatggctgatataaagtggcaggataaggctagagcagccgagtgccatttggacaaatctacgtagaaaatccaacttcaaggctgcctaaggggtaggaaatctaattgatacctgatttcgtctctaaacggaagctagataccaatgtctttcagctgaactaagcagaggggagattgaactgtgagttgatcccaaaaataggtcccgtgacctaggagcatacaagagcagaatatctgatgcacctagccaagcattgcatctctgaccggcgataatgaagttggtccgtcccgtggatatgcggccaaggactgtctcggcccaagagggaaaagtgatagacgcgcgggagggcaagccacagtctgatcactgatgatggatactagctgaaacgtggctcgcgtggatgcaggctcggtgcaggacagtacctggtctgcgggagcgccatctaacaggcgagacgacgggcgagcgacagacaagtgcacagtgcagtgatcccaagggcatggtgaccccttgcaagttgagattcagcaacgcggacgcggccccactccaattagaaggaagaaccatgcgaggcaggcaagacagggggaggagaggagaggaggagaatggcgaccaagtcccggggacgcgacggaaacgcggcgataaggagaatctgtggcgtcgggagtgctgcgatagcccccaattaggccatacatggagaaaaaaagttggccgtcatcatacatcgttcatacactgattttcgaatcatccttcaatcacctaccgaatccgccagtgacgtatccaaacgcattgtcataacctttgacatccgatcaacttgttcagagcctttttctacaaattcccaagtgagcgattgccggaaaaattcgaaagcaatcgccatctccatcgttggctgtgccatttgggagccgaagccaaactcatccgccgcccaaaccaacgcagctttcagccctttacgtctacgtacatcgccactgccatcacatgcaagcaccgtagactgcagccaccatgaccagcacgggaggacgccgcgaaagcgtcctcatccccgcgccgacaccactgccgcagtcccgcgagctgggcgtcgtcacgcccgacatcaccccgaaagcttcccccttcgccaaatcatggccgcatctagtcgctggaggtgtcggtggcataaccgccgcagccctgacggctcccctcgatgtcctcaaaacccgcctccagtccgacttctaccaagcccagctccgcgccgcccaagccgccaaaggccaagtgcgcctgaacccccttcaatccgcctcataccatctctccgaaaccatccaaatcttgcgcgacgtctaccgcctggaaggctggcgcgccctcttcaagggtctcggtcccaatctcgtcggcgtcatccccgcgcggagtatcaacttctacgcctacggtaccggcaagcgggcctactcagaatggacgggcctaggtcccaacaatcccgccgtgcacctcgccagcgccatcacagccggcattgcgaccgggacggcgacaaatcccatctggctcatcaaaactcggctgcagctcgacaagaacaatgccgagcgcaagggcgacgtgagcgccaggcgctataggaatagctgggactgcatcaagcaggtcatgcggaacgagggcccaacgggcttcttcaagggacttagcgccagctatcttggcgtgacggagagtacgctgcagtgggtactgtatgaagaactcaagagcaggttacgggcgcgcgaggagcgtatcgttctgagtgggagggagaagacgtggtgggaccacactgttgactggacgggcaatgcgatgggagctggtgctgccaagggtgttgccgctatactgacgtatccgcacgaggtcgcgagaacacgactacgacaagcaccgatggcagacggcagaccaaagtacacgggtcttgtgcagtgtttcaagcttgtctggaaagaggaaggcatgatcggtctatatggtggtctcacaccccacatgattcgcaccattccctcggcggccatcatgttcggcatgtatgagggcatcctcacgctgctcgatgccaagagttgagatgacccatagattgggtttatgtccccagatcttagcatatgacctgcgcaactaatcgcctcctcctgtgacacttgatcgatcgccagctcatggcttatatcgaccaaacgtcgtaccgatgtgagaacaaatcttcacgagacgctgcgacgacacccctcacgcgctgttcgagtaatcctaacgaatatcacactgtatcaacacaaataaccttcaaccaccctatcatcataatcacaccaaccaaccaacccagctctaattccctgatctggctgcgcagtgtacaaccacaaacctcacgaactgtacaaaaggacaaggagcccccaaataccaggatcaggcgcttcacttcacatctcatttacacccctacaatctacacacaaatcgcggcaggcaaggcggcaggcatcggagatatagacaggataaagagcacagcgcgagtacgcgcttgtataagtcgaggcgcattgtatatcaaaacctagcgctaatggacagcgttgaaggccaaagagagatgttcatctcttgtacttgtattatattgtacatcactctgtggctcatggcgatctatgcgcatatctgcgcatatctgtatatactgcgcaacgcaacgcagaattccgtaacgcgctagagaaaaaaatctaaatcgcatcaaacagttgagagcccatcttatgaatggtgaaatgtgttttatgtgtattgcgctatggcaccgccagatcaatcaacatcggcattctctgttctgctcaaccctcatgcttaatgacacgctgattgctaaaagccaactttgccgcatttttcataccttacaccatgcccagacttgccacactgcccgccaatgcttgctggcaaaacaatgctcgtagtagagatcataatcccccatcgtctcgttcagtctccctagtactctcactgacccaactgccctggctaccctcattcaaactctgcgctcgtccttttgtcgccaaagcctctagatttaggtgctggtactcaatgagggagataggtcgtctctttctgagtttgcgcggaacgcgacctgtggtcccagtccctcgggatccgaagaggcgcagtcaccactcgttgcggtcccatttggg

SEQ ID NO: 23361 - DNA, 453 bp, Muscodor strobelii
  misc_feature: SGI cDNA ID NO. 567948
  misc_feature: Encodes the peptide sequence at SEQ ID NO 23362
atgcagagtatggcgaggcccatgatgcagtccatgcccgacaaccgccagcagagcttcgacgagatctacgggccgcctgagaacttcctcgagatcgaagtccgcaacccatgtacccacggcacaggccgacacatgtacacagactacgagatcgtctgccagaccaacatcccagccttcaagctgcggcactcgatcgtgcggcggcgctacagcgacttcgagtacttccgggacatcctcgagcgcgagtcggcccgcgtcacgatcccgcccttaccgggaaaagtcttcacgaatcgctttagtgacgacgtcatcgagggccgacgcgcagggttagagaaattcctgaagatcgttgttggacacccgttgctgcagactggcagtaaggtcttggcggactttgtgcagttacccaaatgggaccgcaacgagtggtga

SEQ ID NO: 23362 - protein, 150 aa, Muscodor strobelii
  misc_feature: SGI Peptide ID NO. 567948
  misc_feature (28)..(143): Pfam Id: PF00787 Pfam Desc: PX domain
  misc_feature (4)..(150): NCBI GI: 145609834 Blast Desc: conserved [Magnaporthe grisea 70-15] gi|149210493|ref|XP_001522621.1| MGCH7_ch7g721 [Magnaporthe grisea 70-15] gi|86196676|gb|EAQ71314.1| MGCH7_ch7g721 grisea
  misc_feature (9)..(150): NCBI GI: 85118936 Blast Desc: NCU01914 [Neurospora crassa OR74A] gi|116193825|ref|XP_001222725.1| conserved [Chaetomium globosum CBS 148.51] gi|74618870|sp|Q7SH92.1|SNX3_NEUCR RecName: nexin-3
  misc_feature (12)..(150): NCBI GI: 256734265 Blast Desc: [Nectria haematococca mpVI 77-13-4]
  misc_feature (9)..(150): NCBI GI: 154273933 Blast Desc: sorting nexin-3 [Ajellomyces capsulatus NAm1] gi|150415426|gb|EDN10779.1| sorting nexin-3 [Ajellomyces capsulatus NAm1] gi|225559269|gb|EEH07552.1| sorting nexin-3
  misc_feature (9)..(150): NCBI GI: 119192018 Blast Desc: conserved [Coccidioides immitis RS]
  misc_feature (9)..(141): NCBI GI: 171676201 Blast Desc: protein product [Podospora anserina] gi|170936166|emb|CAP60826.1| protein product [Podospora anserina]
  misc_feature (9)..(150): NCBI GI: 156056579 Blast Desc: conserved [Sclerotinia sclerotiorum 1980] gi|154701806|gb|EDO01545.1| conserved [Sclerotinia sclerotiorum 1980]
  misc_feature (9)..(150): NCBI GI: 238845569 Blast Desc: sorting nexin-3 [Microsporum canis CBS 113480]
  misc_feature (9)..(150): NCBI GI: 255944143 Blast Desc: Pc20g02850 [Penicillium chrysogenum Wisconsin 54-1255] gi|211587574|emb|CAP85614.1| Pc20g02850 [Penicillium chrysogenum Wisconsin 54-1255]
  misc_feature (12)..(150): NCBI GI: 46130656 Blast Desc: FG08932.1 [Gibberella zeae PH-1] gi|126343231|sp|Q4I1H6.1|SNX3_GIBZE RecName: Full=Sorting nexin-3
MQSMARPMMQSMPDNRQQSFDEIYGPPENFLEIEVRNPCTHGTGRHMYTDYEIVCQTNIPAFKLRHSIVRRRYSDFEYFRDILERESARVTIPPLPGKVFTNRFSDDVIEGRRAGLEKFLKIVVGHPLLQTGSKVLADFVQLPKWDRNEW

SEQ ID NO: 23363 - DNA, 6523 bp, Muscodor strobelii
  misc_feature: SGI EST ID NO. CUFF.55146.1
  misc_feature: Variant of the nucleotide sequence at SEQ ID NO 23361
cagctctttgttcaacatcccccaacccactttccctgtttattagctgcagcttggcgagagctggggtggattgggggcagtcgtgaccgccgagcaagtcacgtaagaataaagtggtgcagtgacttcgtatttgccatgcctttttccctctcagctccccattcaagcctcgtttaattcaattccataccacagcacacgacacatatcacgcgacaaaacccagcatcccgatttagtaccactacgcccaccatcgtcacgcggaggaaggccatcaccataggaaccaccgaagcagctcctttacccgcccaattcagcgcaagaatacctgcccgcgacaccgagcaggagtagaaggaggaatagcttcggcgcaaggggaagaacatttagagaggaacccacaaaacaccgtcaaaacggcgtcctcggagcaagacgccgcgggtggcggcgcccaaccacccaagtcccccgtctcaccccgcggcatgcagagtatggcgaggcccatgatgcagtccatgcccgacaaccgccagcagagcttcgacgagatctacgggccgcctgagaacttcctcgagatcgaagtccgcaacccatgtacccacggcacaggccgacacatgtacacagactacgagatcgtctgccagaccaacatcccagccttcaagctgcggcactcgatcgtgcggcggcgctacagcgacttcgagtacttccgggacatcctcgagcgcgagtcggcccgcgtcacgatcccgcccttaccgggaaaagtcttcacgaatcgctttagtgacgacgtcatcgagggccgacgcgcagggttagagaaattcctgaagatcgttgttggacacccgttgctgcagactggcagtaaggtcttggcggactttgtgcagttacccaaatgggaccgcaacgagtggtgactgcgcctcttcggatcccgagggactgggaccacaggtcgcgttccgcgcaaactcagaaagagacgacctatctccctcattgagtaccagcacctaaatctagaggctttggcgacaaaaggacgagcgcagagtttgaatgagggtagccagggcagttgggtcagtgagagtactagggagactgaacgagacgatgggggattatgatctctactacgagcattgttttgccagcaagcattggcgggcagtgtggcaagtctgggcatggtgtaaggtatgaaaaatgcggcaaagttggcttttagcaatcagcgtgtcattaagcatgagggttgagcagaacagagaatgccgatgttgattgatctggcggtgccatagcgcaatacacataaaacacatttcaccattcataagatgggctctcaactgtttgatgcgatttagatttttttctctagcgcgttacggaattctgcgttgcgttgcgcagtatatacagatatgcgcagatatgcgcatagatcgccatgagccacagagtgatgtacaatataatacaagtacaagagatgaacatctctctttggccttcaacgctgtccattagcgctaggttttgatatacaatgcgcctcgacttatacaagcgcgtactcgcgctgtgctctttatcctgtctatatctccgatgcctgccgccttgcctgccgcgatttgtgtgtagattgtaggggtgtaaatgagatgtgaagtgaagcgcctgatcctggtatttgggggctccttgtccttttgtacagttcgtgaggtttgtggttgtacactgcgcagccagatcagggaattagagctgggttggttggttggtgtgattatgatgatagggtggttgaaggttatttgtgttgatacagtgtgatattcgttaggattactcgaacagcgcgtgaggggtgtcgtcgcagcgtctcgtgaagatttgttctcacatcggtacgacgtttggtcgatataagccatgagctggcgatcgatcaagtgtcacaggaggaggcgattagttgcgcaggtcatatgctaagatctggggacataaacccaatctatgggtcatctcaactcttggcatcgagcagcgtgaggatgccctcatacatgccgaacatgatggccgccgagggaatggtgcgaatcatgtggggtgtgagaccaccatatagaccgatcatgccttcctctttccagacaagcttgaaacactgcacaagacccgtgtactttggtctgccgtctgccatcggtgcttgtcgtagtcgtgttctcgcgacctatgtccttcatcagccttacccagagacagacactaatgttcggattggacaatgttcactcacctcgtgcggatacgtcagtatagcggcaacacccttggcagcaccagctcccatcgcattgcccgtccagtcaacagtgtggtcccaccacgtcttctccctcccactcagaacgatacgctcctcgcgcgcccgtaacctgctcttgagttcttcatacagtacccactgcagcgtactctccgtcacgccaagatagctggcgctaagtcccttgaagaagcccgttgggccctcgttccgcatgacctgcttgatgcagtcccagctattcctatagcgcctggcgctcacgtcgcccttgcgctcggcattgttcttgtcgagctgcagccgagttttgatgagccagatgggatttgtcgccgtcccggtcgcaatgccggctgtgatggcgctggcgaggtgcacggcgggattgttgggacctaggcccgtccattctgagtaggcccgcttgccggtaccgtaggcgtagaagttgatactccgcgcggggatgacgccgacgagattgggaccgagacccttgaagagggcgcgccagccttccaggcggtagacgtcgcgcaagatttggatggtttcggagagatggtatgaggcggattgaagggggttcaggcgcacttggcctttggcggcttgggcggcgcggagctgggcttggtagaagtcggactggaggcgggttttgaggacatcgaggggagccgtcagggctgcggcggttatgccaccgacactggataggcacagagtcagcactgatagtcacaggcagttcgtgtgcgcaatggctatgtaggaagtcggcaatggatacataccctccagcgactagatgcggccatgatttggcgaagggggaagctttcggggtgatgtcgggcgtgacgacgcccagctcgcgggactgcggcagtggtgtcggcgcggggatgaggacgctttcgcggcgtcctcccgtgctggtcatggtggctgcagtctacggtgcttgcatgtgatggcagtggcgatgtacgtagacgtaaagggctgaaagctgcgttggtttgggcggcggatgagtttggcttcggctcccaaatggcacagccaacgatggagatggcgattgctttcgaatttttccggcaatcgctcacttgggaatttgtagaaaaaggctctgaacaagttgatcggatgtcaaaggttatgacaatgcgtttggatacgtcactggcggattcggtaggtgattgaaggatgattcgaaaatcagtgtatgaacgatgtatgatgacggccaactttttttctccatgtatggcctaattgggggctatcgcagcactcccgacgccacagattctccttatcgccgcgtttccgtcgcgtccccgggacttggtcgccattctcctcctctcctctcctccccctgtcttgcctgcctcgcatggttcttccttctaattggagtggggccgcgtccgcgttgctgaatctcaacttgcaaggggtcaccatgcccttgggatcactgcactgtgcacttgtctgtcgctcgcccgtcgtctcgcctgttagatggcgctcccgcagaccaggtactgtcctgcaccgagcctgcatccacgcgagccacgtttcagctagtatccatcatcagtgatcagactgtggcttgccctcccgcgcgtctatcacttttccctcttgggccgagacagtccttggccgcatatccacgggacggaccaacttcattatcgccggtcagagatgcaatgcttggctaggtgcatcagatattctgctcttgtatgctcctaggtcacgggacctatttttgggatcaactcacagttcaatctcccctctgcttagttcagctgaaagacattggtatctagcttccgtttagagacgaaatcaggtatcaattagatttcctaccccttaggcagccttgaagttggattttctacgtagatttgtccaaatggcactcggctgctctagccttatcctgccactttatatcagccatgcttacacacgggctttgagagctctcgaatgcaaccttccaggatgggactcatgcatcttcagaacggcccaacattggacaggctttggtcatgagtacgcgcagatcgcgcggtgagacaaaactcgcttagctctgagagagcaccttatgtacggcacatccattttcaaccccctttcaacccccacacagcatgaccacccatttggtcatggctgcgtaatcccttcaccacaacctcgagaacccagacatttccagtctaggatcattatgtaaacaaagaagcctcggctatcgtgaccacgatgcatgtcgccctggtcaagccgcaacgatggaaaagaagaatgtaaaaaagcgagcgcggtctggtcgcccgtcctctctatccgtcggcgccaccaaacacccaaactcccctcttcccaagcatacaagtagacacatagtttcgccacctttgccctgcgcctgcgatgctcatgtatgatcctaatagatgattgcctgagtatactgggcttcgattgatatgcgtatattgtctccctggccagttcgtgttcgttatttgtagttcatcggtgaggtgcagtttctcgtgaagccgccgcgtccgcacgggccgatgcggctgaggctacttgtctgatcctcgggtcaaccgacgatccatgcattgctgcgtagggcgcattctcgtcgcgtgaatatctcgctcggttgttagaatcgatatccatcgaatcgtctcggttaaccgtcggggttgtcgattctttccgccatacgtcgtcgttgtgtcgcccaatcaccacgcccggccgtggaggcccagctgccgtctcctctacacgttccactttgccgcgtaggtcgtacaagcccggaggctgaggaggctgcgcgaatgtgtttctccacgttgtttccctcggctcctcctcttcctcttcggtctccatgctcgtttctccgttgagccacgctagttcgtcttccgtcaacttcttccacgtgcatttagtatgcttcttggtacagccctgacaagccgtcaggtgtttgatgcattgtgtcttgaggcgtcgacatcgatcgcaaggcggccggatgatgtcgccgcgcgtaagctgctcaattttcgacgtcacaagtacgcggtattcttcttcggtgtctctcacgccttccgaagcgtaggtgggcgacggtctgttactgcttgcgagggtgtgtggaggcagggaggtcctcggcgtcgcagtagtcgcggacatgaggttcggcgttggcggtagagagcccacagaggagagcctatggctgccaggttgcgacggagcggtaaactgttggagcaggtcggcatggacatcatatccaggggttgagctgttgggctggccggtattgacactttggaacttcgatccggaattagcctggggtggatggcgggtgtggatggatgccttgcgcccactcagatgataattgagctggcgtgcccttctcgctacctcatccgccttcttaatcagaatctgcaatctttgttcaatgatttcgagcgtagcaagctcggctgcctcatcttcatctaaaggttgcggcgggacaagtctaaacctctccaaggcaccagacttgatcagcctccagtcatcctcgctaatttccacttgaacgcctttcaagaggaatccacagtagcgcatgccgctaggcgtcgaagatagctggaatccttgaggattcgacttggcaaagctcacaatgtcaagccatgttacggggtcaggggagaagaggttctgaggtggtgtcgtcgtgatcgtgccctcaaaagcgccttccatagccttaaggaggcggctcccagtgagctttgcgcccaagttgaaggcgaggctttcatgtctgttcaagacccctttccaagaggtcagcacctatgacatcttgccataatggcatctgtgcgagttgacttgccttcatattcggtgatgaggcctaaaacatcagaaaaagtatcgccatcgccttgaatgagcttaagtcttgcggcctgtgctttcgtcaagtaatttatgggtacattgttg

SEQ ID NO: 23364 - DNA, 3183 bp, Muscodor strobelii
  misc_feature: SGI cDNA ID NO. 567949
  misc_feature: Encodes the peptide sequence at SEQ ID NO 23365
atgccgccctacagacagatgggtgttggacgctcgatgtcgtcgtatgatagagcacgaggtggcggcgcctcgcttcgaggaggcggtgacgacaatgtcaacaatcccccccttattcgtcgtaatggtatcacatatacccagccagagaacaaacccttcgtgtctgtttctcagtcgtcggtagactcagatcagagtgtactgttgaggcctggtggcttcagacaagctcaagaggttcctcgatcaacgtccgccgagtcttgtgagtcagcagagagtgttttggtccgtgggcacacccgagctcgtggctcgacgctgactgcggctgtctcgtcgaatgctgggcttggcggcggtgcatctcttaaggtcgccaacgatatcgcttcgccgcctatggctctgggtggaccggtaggctccagctttgtaacgactcccgaagaagccgccttggaggatgaggaagtacaggagttgaaaccctctctcgacaaaaagcctaagaacaagctagcacaagctgctgtccatcgcgtgggacaactcatgggcatgcgcaatagtgaacaggccccgtccaccctctccgcttttactcctggcaactccttcccgcctcagctgcaaacacaaggtcgacagcaaggaaatcgggttgtttccaagcccggcctgttcaacgacatagctctcgctacacctgccttcgccatggacactgccaacatggccaagaagcgtcgtcagaatcgcaacagtggcaaccctggcaacaccaaccttcctcactctcaggttgttgacagtgccgctgcaactgatatctctacctcgacgggccatacccagaacgagcagaacactcttggtagccagactagctacacccaacaacctcaacgccgtcagacgtttgatacatccaccgcaactgcctcatcccatgacgagcagggagtcttgtctcccaactttcacttcccccagcgccgccagactattgttgatccaacggctgttgtgggctacaaccagtctcaggacattgtctccagtggttctactcatcagatccaccaacgtcgccagactgtggtgtatagtcctgagcaggtacagacgtcgtccgctaagaccactgaccgcagcgacaccaacgctggaacttctaacccagccattcttcagagcaatatgcgtcgcctgaccatcggatcccagcaggagcgaggtgctagtcaccatcgcggcgccagtctgcctcagaactctgatttgtacggcggccagatgaacattgccactggtcagacacagcagattgcctccatcgttgaggagcctactgccgctactgcatcgtcccatcgccacgtaccatctggcgccattggtacttctcgaggtggtatctccggcagtgtgtctgatcccaacatcggacgccatcttcctactcagctcgcaggtgtcagcactagtcgctcgatggtactctacgagcaacctgctcccatcgaggagactaccgccatgatcacacttcgacatgacgaagatggagtttatcgagttggccccttatctctcgagctgcctgatttgcaggagatggacaaccgctccaatgtcctcaaagcacttactgagcgtggacgccctactgtccaggacatttttgacgaacgcttccttccctttgttgagtctaccgacttcgagtttcagacttccaaggccggcgtcgttcatattaccaacctaccttacggtgtaggtcgatcggaaatcgtcgctctgattggtcgaggatacagtggccgtatccttgccgagggactcgagcccgtccatattatcatggacaagatcaccggcaagaccaaggatgcgtttgtcgagatcatttcggagcgtgacgcacttaacctcattgagcgcattgagaatcagcgcctaaatggccgcgtcactcgtctgggtaatcgtcccgtcaacattaagctgtcttctcaaactcagctcatgaaggctatctttccccacgcccaagttgattggcgtggtgccaagcctgctcctgttcgcgagggcacgtggtcgttcgagaagttcaagggctttttcactaacgaggagatattcatgttggtgaagcacgttaccagcccctctcacaattcattcgccaagctctgtcccgagcgtatgtacgagtgtatgatcagcaccatccgcaaggtgccctggtgcatgaccgatttcatcactatcgcccagcgccatacgcttttcgaggctgctctcaacatggtcgctacacttaaccagcgtcttgaagagatggagaagcgtctccagaactctccccctcccgcttcctcgagtgctgttgtacccttcggccgaggacgtggtaccatgcaccgtggacgtaacgactatcccaaccagtatggccgtggccagtaccagaacgctcagaacaacactcctctcaactttccgcacaacttgtatgccaatgctcgaggcaacggccgtggtaacggtcgcggcaatggtcgtggcggctttggtggaggtcgaggtcgcggtcacagtcgttccaacagccagagcagtgctcaggattaccaggaccaagacaagctagatccccgtgctcctgaggagttctttgagggacgtctcacagtctctctccgcaaccgtcttgttgagacttgcatgatgtgccccggatttacagtcgtccagaaggactgttttggcgccgtcgctggcatgcccttcaacaagcgttacgacttcaacctgccgtacttctcagagggatggcttcacctctactcactcatgcccaagagtggcatgcctgctgacgtccttggttggtacatcgccctcattcgtgaggagaccaaccgcgtcaaagctggcctttccatggcgcagcgtaaggccatagacaagaagtcgtcgttcaccactggatacttcggctatctctgggtcgagcttgacttcccgactggtgaggcgttcgacaagatgacactcaagcagatcaacaagcttgagtggaatgccctcgaccgcatcctgcgtcgtgccatcgctggtggtgtcgttgggccccagtggctcaagaaccacgacgtctag

SEQ ID NO: 23365 - protein, 1060 aa, Muscodor strobelii
  misc_feature: SGI Peptide ID NO. 567949
  misc_feature (545)..(784): NCBI GI: 46130628 Blast Desc: FG08918.1 [Gibberella zeae PH-1]
  misc_feature (546)..(781): NCBI GI: 39971011 Blast Desc: MGG_02972 [Magnaporthe grisea 70-15] gi|149210551|ref|XP_001522650.1| MGCH7_ch7g750 [Magnaporthe grisea 70-15] gi|86196705|gb|EAQ71343.1| MGCH7_ch7g750 grisea
  misc_feature (546)..(790): NCBI GI: 116193821 Blast Desc: CHGG_06628 [Chaetomium globosum CBS 148.51] gi|88182541|gb|EAQ90009.1| CHGG_06628 [Chaetomium globosum CBS 148.51]
  misc_feature (548)..(785): NCBI GI: 85118949 Blast Desc: NCU01917 [Neurospora crassa OR74A] gi|28927358|gb|EAA36312.1| [Neurospora crassa OR74A]
  misc_feature (534)..(780): NCBI GI: 256734256 Blast Desc: NECHADRAFT_35570 [Nectria haematococca mpVI 77-13-4]
  misc_feature (547)..(785): NCBI GI: 154305791 Blast Desc: BC1G_07710 [Botryotinia fuckeliana B05.10] gi|150853229|gb|EDN28421.1| BC1G_07710 [Botryotinia fuckeliana B05.10]
  misc_feature (471)..(780): NCBI GI: 261353428 Blast Desc: conserved [Verticillium albo-atrum VaMs.102]
  misc_feature (531)..(786): NCBI GI: 171676197 Blast Desc: protein product [Podospora anserina] gi|170936164|emb|CAP60824.1| protein product [Podospora anserina]
  misc_feature (560)..(785): NCBI GI: 255950972 Blast Desc: Pc22g23620 [Penicillium chrysogenum Wisconsin 54-1255] gi|211593270|emb|CAP99650.1| Pc22g23620 [Penicillium chrysogenum Wisconsin 54-1255]
  misc_feature (535)..(780): NCBI GI: 67903420 Blast Desc: AN8697.2 [Aspergillus nidulans FGSC A4] gi|40741056|gb|EAA60246.1| AN8697.2 [Aspergillus nidulans FGSC A4] gi|259483112|tpe|CBF78217.1| TPA: conserved [Aspergillus FGSC
MPPYRQMGVGRSMSSYDRARGGGASLRGGGDDNVNNPPLIRRNGITYTQPENKPFVSVSQSSVDSDQSVLLRPGGFRQAQEVPRSTSAESCESAESVLVRGHTRARGSTLTAAVSSNAGLGGGASLKVANDIASPPMALGGPVGSSFVTTPEEAALEDEEVQELKPSLDKKPKNKLAQAAVHRVGQLMGMRNSEQAPSTLSAFTPGNSFPPQLQTQGRQQGNRVVSKPGLFNDIALATPAFAMDTANMAKKRRQNRNSGNPGNTNLPHSQVVDSAAATDISTSTGHTQNEQNTLGSQTSYTQQPQRRQTFDTSTATASSHDEQGVLSPNFHFPQRRQTIVDPTAVVGYNQSQDIVSSGSTHQIHQRRQTVVYSPEQVQTSSAKTTDRSDTNAGTSNPAILQSNMRRLTIGSQQERGASHHRGASLPQNSDLYGGQMNIATGQTQQIASIVEEPTAATASSHRHVPSGAIGTSRGGISGSVSDPNIGRHLPTQLAGVSTSRSMVLYEQPAPIEETTAMITLRHDEDGVYRVGPLSLELPDLQEMDNRSNVLKALTERGRPTVQDIFDERFLPFVESTDFEFQTSKAGVVHITNLPYGVGRSEIVALIGRGYSGRILAEGLEPVHIIMDKITGKTKDAFVEIISERDALNLIERIENQRLNGRVTRLGNRPVNIKLSSQTQLMKAIFPHAQVDWRGAKPAPVREGTWSFEKFKGFFTNEEIFMLVKHVTSPSHNSFAKLCPERMYECMISTIRKVPWCMTDFITIAQRHTLFEAALNMVATLNQRLEEMEKRLQNSPPPASSSAVVPFGRGRGTMHRGRNDYPNQYGRGQYQNAQNNTPLNFPHNLYANARGNGRGNGRGNGRGGFGGGRGRGHSRSNSQSSAQDYQDQDKLDPRAPEEFFEGRLTVSLRNRLVETCMMCPGFTVVQKDCFGAVAGMPFNKRYDFNLPYFSEGWLHLYSLMPKSGMPADVLGWYIALIREETNRVKAGLSMAQRKAIDKKSSFTTGYFGYLWVELDFPTGEAFDKMTLKQINKLEWNALDRILRRAIAGGVVGPQWLKNHDV

SEQ ID NO: 23366 - DNA, 1140 bp, Muscodor strobelii
  misc_feature: SGI cDNA ID NO. 567950
  misc_feature: Encodes the peptide sequence at SEQ ID NO 23367
atgcgcagatttactacagcactttggctggcagccggtgcagccggtgccgcggcccagtcttcctatctttcgcggatggccgactctcagatccgacatggtgtcgctaaaaacggggattatacgactgcgacgctgtacaagggcttcgagtatgcgatcgcggcgacgaataatcagagcttgatcgatttttatgaggcgcagatgagtccccttgtgaaagatgacgggacgattgtggggtttgattatagctattattctctcgatgattaccgatttggtatgagtctgctgtattggtatgagaggatgaaggaacaaaagtggaaattggccgcggatgggattcgaaagatgttgaataagcagccgaggaataatgcgggagggttttggcataggagtcctacttatccgtaccagatgtggggagacggcatattcatggccgattcgttctacgcaaagtatacgaagctattcgataacgcgaacacaacggcatggaacgacatcgcgaatcagtataagttgtatcacacgcattgtctcgacacgagcaacaatctgatgcggcatgggtatgatgagtcgaagaaagcagtctgggcagaccccacgaccggtgcgagccccttggcgtgggaccgggcgatcggatggtattacacgagccttctagagtcgatccagactttccccacgagtcatgcgggttatcagatgcttatcgggtatttcaagacgttgagcgagggtttgttgaatgcgcaggatgagagtggggggtggtggttgatcatggatgaggagtatgtgggcaagaagggcaattatatcgagagctctgctacggctatgtttacctctgggttccttcaagggattagcttgggattgttggatgaggcgacttatcttgcgcctgcgaagaaggcgtatgagtatatggttagtaagtttgttaaggagaagggtgatgggacgctgaactgggaggggacggtgcttgttgggagtttggggagtaatgctacttttgagtattacatctcgattgcgacggatgagaatgattataaaggggttggtccgtttatgtgggcgtcgtacttctatgaagcattgtag

SEQ ID NO: 23367 - protein, 379 aa, Muscodor strobelii
  misc_feature: SGI Peptide ID NO. 567950
  misc_feature (23)..(379): Pfam Id: PF07470 Pfam Desc: Glycosyl Hydrolase Family 88
  misc_feature (10)..(374): NCBI GI: 39944588 Blast Desc: MGG_04305 [Magnaporthe grisea 70-15] gi|145015045|gb|EDJ99613.1| MGG_04305 [Magnaporthe grisea 70-15]
  misc_feature (27)..(377): NCBI GI: 256723621 Blast Desc: NECHADRAFT_52013 [Nectria haematococca mpVI 77-13-4]
  misc_feature (18)..(377): NCBI GI: 67901682 Blast Desc: AN7828.2 [Aspergillus nidulans FGSC A4] gi|40742426|gb|EAA61616.1| AN7828.2 [Aspergillus nidulans FGSC A4] gi|259484186|tpe|CBF80191.1| TPA: unsaturated hydrolase FGSC
  misc_feature (5)..(366): NCBI GI: 261357960 Blast Desc: cell wall glycosyl hydrolase YteR [Verticillium albo-atrum VaMs.102]
  misc_feature (19)..(379): NCBI GI: 154293333 Blast Desc: BC1G_13690 [Botryotinia fuckeliana B05.10] gi|150845347|gb|EDN20540.1| BC1G_13690 [Botryotinia fuckeliana B05.10]
  misc_feature (23)..(377): NCBI GI: 255946902 Blast Desc: Pc22g01740 [Penicillium chrysogenum Wisconsin 54-1255] gi|211591235|emb|CAP97462.1| Pc22g01740 [Penicillium chrysogenum Wisconsin 54-1255]
  misc_feature (29)..(378): NCBI GI: 46111969 Blast Desc: FG02866.1 [Gibberella zeae PH-1]
  misc_feature (27)..(377): NCBI GI: 256720351 Blast Desc: glycoside hydrolase family 105 [Nectria haematococca mpVI 77-13-4]
  misc_feature (10)..(377): NCBI GI: 39968495 Blast Desc: MGG_02340 [Magnaporthe grisea 70-15] gi|145014082|gb|EDJ98723.1| MGG_02340 [Magnaporthe grisea 70-15]
  misc_feature (1)..(378): NCBI GI: 119481789 Blast Desc: cell wall glycosyl hydrolase YteR, [Neosartorya fischeri NRRL 181] gi|119409077|gb|EAW19026.1| cell wall glycosyl hydrolase YteR, [Neosartorya fischeri NRRL 181]
MRRFTTALWLAAGAAGAAAQSSYLSRMADSQIRHGVAKNGDYTTATLYKGFEYAIAATNNQSLIDFYEAQMSPLVKDDGTIVGFDYSYYSLDDYRFGMSLLYWYERMKEQKWKLAADGIRKMLNKQPRNNAGGFWHRSPTYPYQMWGDGIFMADSFYAKYTKLFDNANTTAWNDIANQYKLYHTHCLDTSNNLMRHGYDESKKAVWADPTTGASPLAWDRAIGWYYTSLLESIQTFPTSHAGYQMLIGYFKTLSEGLLNAQDESGGWWLIMDEEYVGKKGNYIESSATAMFTSGFLQGISLGLLDEATYLAPAKKAYEYMVSKFVKEKGDGTLNWEGTVLVGSLGSNATFEYYISIATDENDYKGVGPFMWASYFYEAL

SEQ ID NO: 23368 - DNA, 886 bp, Muscodor strobelii
  misc_feature: SGI EST ID NO. CUFF.55001.0
  misc_feature: Variant of the nucleotide sequence at SEQ ID NO 23366
aagcagccgaggaataatgcgggagggttttggcataggagtcctacttatccgtaccagatgtggggagacggcatattcatggccgattcgttctacgcaaagtatacgaagctattcgataacgcgaacacaacggcatggaacgacatcgcgaatcagtataagttgtatcacacgcattgtctcgacacgagcaacaatctgatgcggcatgggtatgatgagtcgaagaaagcagtctgggcagaccccacgaccggtgcgagccccttggcgtgggaccgggcgatcggatggtattacacgagccttctagagtcgatccagactttccccacgagtcatgcgggttatcagatgcttatcgggtatttcaagacgttgagcgagggtttgttgaatgcgcaggatgagagtggggggtggtggttgatcatggatgaggagtatgtgggcaagaagggcaattatatcgagagctctgctacggctatgtttacctctgggttccttcaagggattagcttgggattgttggatgaggcgacttatcttgcgcctgcgaagaaggcgtatgagtatatggttagtaagtttgttaaggagaagggtgatgggacgctgaactgggaggggacggtgcttgttgggagtttggggagtaatgctacttttgagtattacatctcgattgcgacggatgagaatgattataaaggggttggtccgtttatgtgggcgtcgtacttctatgaagcattgtagatgggcaacctcagtttgtgggttatcataatgggtagtcctgggacatgaatcaatcattcagcttttattagtacccggtccacacatagcatattgatacttatgctctccacac

SEQ ID NO: 23369 - DNA, 2451 bp, Muscodor strobelii
  misc_feature: SGI cDNA ID NO. 567951
  misc_feature: Reduced expression when VOC is produced
  misc_feature: Encodes the peptide sequence at SEQ ID NO 23370
atgccgggcagtctcaaagcccgtctcaaagcgacgcttctccgcaggaacacacaaccgctgtcggtatcgtccagcaagaacagcttcggaaagcgggacagtgtgggcggacgagatggtgcatctagttctagctcgcgttcacatcacggctacgatgcgtcggacgagcgcagcgaaaaccagcaccggagcagcagaagcgctgggagtgcaagcctgagccacagccatcaccaggaccaggcgaacggcgtacgggatggcccggaggctgtctcggtctcgaactcgacgaagacgagcagagggcctgaatctacaagtgctaatagcaacaggaaacgcacgtggagtctgggtaacggccatggccacgcccagggcggcggacgggaggtggaaagtcaagcgagtcaagcacgggaacaaactcgcactggcgcggaggccaacgcccagggcgctccaccatcttcactagcaccggcgccagctaactctatcctcacctcgaccactgccacttctgccaccacctccaccacctccacaccgggcaatgatctacaaggcaacactcccactcccacactcgcatccgtcatagcttctcctcccgccgtcgcttcaactgctactagtgctactactgctactgctgttcctcttcctagcatccacgagcagcctgcgacacctcccaacgctgcctcaccaccgcctgcttccgatcttgcatcttcggcactgcagccaaacgccgcgagagagcgcccgcacgaggctagcaacaccaattcgcccagcagccatcatcttcgcggcgctccacgattcgcatcgcccgtcgcgacgccgcttgctggccagaaagacccgtcttcgtactcgacgctctcccggccggcagggccctcgaggacgcaaagtctgctgccaccaagtcagacgaaccttgtccatgcgctcctctacgatcagggagacgacctcgacgccgactccgccgacccggaccagctgtccagactgcccgccatggtgacgaggaagatctgggtcaagcggcccttggcttccgccacgctggtcaccatcaacgaagacgacgttgtcgacgatgtgcgtgacatgatcctgcgcaaatatgccaactcgctgggccgccagttcgactcgcccgacctgacgctacgcatcttcagcaaagaacagcagaacagcaggcccctccagcccgacgagcccatcagcaaagtcctccacacctactaccccaatggccagactgtcgacgatgcattgctcatcgacatccccggacgccgcaccccgaaggcgtcgccgaaccccaagttctacgccgacgaccgcccgcacgagtccggcaccgactactttcctccctatcctccagcgcctcatacgcaccaccccgtcacaagcgcagcactgctgaacagcccgcacgcactccatttccctccctccatgactatcgtgggtggcaaccagctgccgccgctgccctctccaggtagtacccggcggcttgctcagggccggcccaagatacagaggatgcacacgacgtcgcccgcgtcgaccatcaccaacaaccacgcgtcacagccgggagccgcacctaccgatcaatccaaccacccgcccgcagctcccgctatccctactcctcctcccatagaacggacggccacgccacctccccgcgtctcctccccgcggccttctgtcaagtcgaagaagagcaagaaagccattgagcccctgaaacttccatcggggctcctcgataccgccgtgccgcctatcaacatcctcatcgttgaagacaacatgatcaacctacgattgctagaggccttcgtcaagaggctcaaggtccgttggcagacggctgtcaacggaagagaggccgttgataagtggagagccggtggattccatttagtgctgatggatattcagctgcccatcatgagcggcctcgatgccacacgtgagattcggagaatagaaagagtcaactccataggcgtcttctcgtcatctgccagcagcccaccggatgagatccttcccgaaccagcagaagaggacaagcttgcgaatacggaaatgttcaagagcccagtcattattgtcgcgttgacggccagttcgttacagagtgacaggcatgaggctttggccgcagggtgtaatgacttcttgaccaagcctgtccatttcgactggttgcagcgtaaggtcaaagaatggggctgcatgcaagccttaatcgactttgatggctggcggaagtggaaagacttctccgcgaaaacacaggccaatgatgcggccaaaaaagctgccgccgctgccacgaaagccaaacctgttaagagcaaacgactttcgatgactgcggctgctgcttga

SEQ ID NO: 23370 - protein, 816 aa, Muscodor strobelii
  misc_feature: SGI Peptide ID NO. 567951
  misc_feature (613)..(761): Pfam Id: PF00072 Pfam Desc: Response regulator receiver domain
  misc_feature (613)..(680): Pfam Id: PF00072 Pfam Desc: Response regulator receiver domain
  misc_feature (718)..(761): Pfam Id: PF00072 Pfam Desc: Response regulator receiver domain
  misc_feature (303)..(800): NCBI GI: 85118862 Blast Desc: NCU01895 [Neurospora crassa OR74A] gi|28927336|gb|EAA36290.1| conserved [Neurospora crassa OR74A]
  misc_feature (337)..(815): NCBI GI: 39970861 Blast Desc: MGG_02897 [Magnaporthe grisea 70-15] gi|149210367|ref|XP_001522558.1| MGCH7_ch7g661 [Magnaporthe grisea 70-15] gi|86196616|gb|EAQ71254.1| MGCH7_ch7g661 grisea
  misc_feature (311)..(782): NCBI GI: 256733772 Blast Desc: NECHADRAFT_78229 [Nectria haematococca mpVI 77-13-4]
  misc_feature (295)..(802): NCBI GI: 156058834 Blast Desc: SS1G_03429 [Sclerotinia sclerotiorum 1980] gi|154701216|gb|EDO00955.1| SS1G_03429 [Sclerotinia sclerotiorum 1980]
  misc_feature (308)..(816): NCBI GI: 39726345 Blast Desc: two-component response regulator SSK1p [Botryotinia fuckeliana]
  misc_feature (349)..(805): NCBI GI: 189210846 Blast Desc: conserved [Pyrenophora tritici-repentis Pt-1C-BFP] gi|187977847|gb|EDU44473.1| conserved [Pyrenophora tritici-repentis Pt-1C-BFP]
  misc_feature (348)..(816): NCBI GI: 169612904 Blast Desc: SNOG_09580 [Phaeosphaeria nodorum SN15] gi|111061725|gb|EAT82845.1| SNOG_09580 [Phaeosphaeria nodorum SN15]
  misc_feature (349)..(816): NCBI GI: 154308253 Blast Desc: conserved [Botryotinia fuckeliana B05.10] gi|150852957|gb|EDN28149.1| conserved [Botryotinia fuckeliana B05.10]
  misc_feature (280)..(781): NCBI GI: 225558196 Blast Desc: conserved [Ajellomyces capsulatus G186AR]
  misc_feature (280)..(781): NCBI GI: 240277153 Blast Desc: response regulator [Ajellomyces capsulatus H143]
  misc_feature: Useful for introducing or modulating the production of volatile compounds
MPGSLKARLKATLLRRNTQPLSVSSSKNSFGKRDSVGGRDGASSSSSRSHHGYDASDERSENQHRSSRSAGSASLSHSHHQDQANGVRDGPEAVSVSNSTKTSRGPESTSANSNRKRTWSLGNGHGHAQGGGREVESQASQAREQTRTGAEANAQGAPPSSLAPAPANSILTSTTATSATTSTTSTPGNDLQGNTPTPTLASVIASPPAVASTATSATTATAVPLPSIHEQPATPPNAASPPPASDLASSALQPNAARERPHEASNTNSPSSHHLRGAPRFASPVATPLAGQKDPSSYSTLSRPAGPSRTQSLLPPSQTNLVHALLYDQGDDLDADSADPDQLSRLPAMVTRKIWVKRPLASATLVTINEDDVVDDVRDMILRKYANSLGRQFDSPDLTLRIFSKEQQNSRPLQPDEPISKVLHTYYPNGQTVDDALLIDIPGRRTPKASPNPKFYADDRPHESGTDYFPPYPPAPHTHHPVTSAALLNSPHALHFPPSMTIVGGNQLPPLPSPGSTRRLAQGRPKIQRMHTTSPASTITNNHASQPGAAPTDQSNHPPAAPAIPTPPPIERTATPPPRVSSPRPSVKSKKSKKAIEPLKLPSGLLDTAVPPINILIVEDNMINLRLLEAFVKRLKVRWQTAVNGREAVDKWRAGGFHLVLMDIQLPIMSGLDATREIRRIERVNSIGVFSSSASSPPDEILPEPAEEDKLANTEMFKSPVIIVALTASSLQSDRHEALAAGCNDFLTKPVHFDWLQRKVKEWGCMQALIDFDGWRKWKDFSAKTQANDAAKKAAAAATKAKPVKSKRLSMTAAAA

SEQ ID NO: 23371 - DNA, 3805 bp, Muscodor strobelii
  misc_feature: SGI EST ID NO. CUFF.55104.1
  misc_feature: Variant of the nucleotide sequence at SEQ ID NO 23369
cgactggtaaatatatatttgacgtcggaaatcactcgcgtggatgtacggctttcgctgttgctaaagaagatatcgggccagtcggactgaatgaaaaacctttctgcgacaagtcacatcggtgctggggtgggacagcttattcttgagagagacgcgtcggtcgcgatccctgccggtcgcatgcttccttggtgctcccttccccccatcagtgatcacgatctcccgccgaaaaggagattgcgcgcagctccaaccgaataagcgacaagggtgacacccaagctctccgacataaaccgccgcttccctggtcttccgtgtaagctagacaccatttcttattgacgagacacagaaacttatcttcagaaggaggtagcggcaacggtagtgcatgaatttgccaagttgtggcatatcaatcaagttttgcaattgcctgtgtctcgtcgctagtgctgccacatagccatcacctacacccagtatcccagctgccgtatgcatgtagctcctacggctatttgccgtgtgcatccaagatagtaccatcgataatagcacgcattcacacagtaccttagctctcatctcatatttgtacacaggtggctttagtgagataagactctagcaggttccaaaaacatttttcacttcacatctaacatcaagttggtgccaatgaagggcagacgagctgcctcgccccatggtttctgtggccgccagtagtcgagatgccgggcagtctcaaagcccgtctcaaagcgacgcttctccgcaggaacacacaaccgctgtcggtatcgtccagcaagaacagcttcggaaagcgggacagtgtgggcggacgagatggtgcatctagttctagctcgcgttcacatcacggctacgatgcgtcggacgagcgcagcgaaaaccagcaccggagcagcagaagcgctgggagtgcaagcctgagccacagccatcaccaggaccaggcgaacggcgtacgggatggcccggaggctgtctcggtctcgaactcgacgaagacgagcagagggcctgaatctacaagtgctaatagcaacaggaaacgcacgtggagtctgggtaacggccatggccacgcccagggcggcggacgggaggtggaaagtcaagcgagtcaagcacgggaacaaactcgcactggcgcggaggccaacgcccagggcgctccaccatcttcactagcaccggcgccagctaactctatcctcacctcgaccactgccacttctgccaccacctccaccacctccacaccgggcaatgatctacaaggcaacactcccactcccacactcgcatccgtcatagcttctcctcccgccgtcgcttcaactgctactagtgctactactgctactgctgttcctcttcctagcatccacgagcagcctgcgacacctcccaacgctgcctcaccaccgcctgcttccgatcttgcatcttcggcactgcagccaaacgccgcgagagagcgcccgcacgaggctagcaacaccaattcgcccagcagccatcatcttcgcggcgctccacgattcgcatcgcccgtcgcgacgccgcttgctggccagaaagacccgtcttcgtactcgacgctctcccggccggcagggccctcgaggacgcaaagtctgctgccaccaagtcagacgaaccttgtccatgcgctcctctacgatcagggagacgacctcgacgccgactccgccgacccggaccagctgtccagactgcccgccatggtgacgaggaagatctgggtcaagcggcccttggcttccgccacgctggtcaccatcaacgaagacgacgttgtcgacgatgtgcgtgacatgatcctgcgcaaatatgccaactcgctgggccgccagttcgactcgcccgacctgacgctacgcatcttcagcaaagaacagcagaacagcaggcccctccagcccgacgagcccatcagcaaagtcctccacacctactaccccaatggccagactgtcgacgatgcattgctcatcgacatccccggacgccgcaccccgaaggcgtcgccgaaccccaagttctacgccgacgaccgcccgcacgagtccggcaccgactactttcctccctatcctccagcgcctcatacgcaccaccccgtcacaagcgcagcactgctgaacagcccgcacgcactccatttccctccctccatgactatcgtgggtggcaaccagctgccgccgctgccctctccaggtagtacccggcggcttgctcagggccggcccaagatacagaggatgcacacgacgtcgcccgcgtcgaccatcaccaacaaccacgcgtcacagccgggagccgcacctaccgatcaatccaaccacccgcccgcagctcccgctatccctactcctcctcccatagaacggacggccacgccacctccccgcgtctcctccccgcggccttctgtcaagtcgaagaagagcaagaaagccattgagcccctgaaacttccatcggggctcctcgataccgccgtgccgcctatcaacatcctcatcgttgaagacaacatgatcaacctacgattgctagaggccttcgtcaagaggctcaaggtccgttggcagacggctgtcaacggaagagaggccgttgataagtggagagccggtggattccatttagtgctgatggatattcagctgcccatcatgagcggcctcgatgccacacgtgagattcggagaatagaaagagtcaactccataggcgtcttctcgtcatctgccagcagcccaccggatgagatccttcccgaaccagcagaagaggacaagcttgcgaatacggaaatgttcaagagcccagtcattattgtcgcgttgacggccagttcgttacagagtgacaggcatgaggctttggccgcagggtgtaatgacttcttgaccaagcctgtccatttcgactggttgcagcgtaaggtcaaagaatggggctgcatgcaagccttaatcgactttgatggctggcggaagtggaaagacttctccgcgaaaacacaggccaatgatgcggccaaaaaagctgccgccgctgccacgaaagccaaacctgttaagagcaaacgactttcgatgactgcggctgctgcttgattgaacgaggtggtggcctcgacctcgacctacatcctaagtggaaacaaaagctttgatcatttcctgtgtcaaaatttagggcgatgagaaacacgaaaacatcggataatagtatctattttaatacaagaggcagtatgaagcctctcaacacagtcccggaagtctggacttgcctgaaaccacgactaccgcaacgccctatgcgcaaaccaccctgtttgtaggctgctcgttccctctatctctgaaataagggcattgggaattttattatttgagcggtcataaattgatcaataggaggaccatggcgcaactgggaaaactgccatccttcggtttcattgtaagagggcaagattctttggcttcgggttcttgtcacagtcatatagcgtggcgagaagaatcagagaatgacaaacaaataagacctaccaattggtcggcgccctgatatgctttttacccccatgaattgtagaacaggattagtgttgtgagatgagactgtgaacctagaacgcgaaaggcgttctcatcaacatcatcgacggcgttggtatcccgtgtttaggaagaatatcaatggcctccag

SEQ ID NO: 23372 - DNA, 2073 bp, Muscodor strobelii
  misc_feature: SGI cDNA ID NO. 567952
  misc_feature: Encodes the peptide sequence at SEQ ID NO 23373
atggaatcgcacccacagtgtccatcttgttctagagtcaatcaaatcatcgacggtagatatgatgttccagataataactcaaggacccaaacagtattaggaacgttttccgacctgcagcaccatacagactgcgacgtctgcggcttcattaccctgaagctcagcgaaaacccgataagagatggctaccagccccagtgtcctataaccttctggaaatggagtgctccgatggaccacatgtatagctttgggccctcagaaggcgacgataactgcctgacctgcgaccttgaccatagtgaccttacacttctcgattttgcctcaacggatcctagttcgccctactatgtcgagatggaccccgaatggatcgatgtaagcaaagttcgcgcatgggctcgtgaatgcgacagcaaccatgctgggagatgccatggattgacagaatgggaagatatccccccgccgtccctagcgccactccttctcgtcgacgttatctcccacagtttggttgagctatccatagatagaactcctcaactccagtatattgctcttagttacgtatggggtcgcttatccaatgtgctggagactactcaagcaaacctagagaatctccgattgcgcaacgcgcttattttgcccccttgggcatcacgccttcctgacaccgtccgtgatgctatagccctcacaggtcgtctaggtctcagatatctatgggttgacaggctatgcatcattcaggatgacttgcctcggaaaacactacaactcgagcagatgggggcgatacacgcaaatgcatatatgacactggtggcggcagatggtcttgacgctaatcatggcctccgaggatcatgtcccggtctttcaatgccgcgcatcttcaagacgcgcatgcttactttcgcgccgggagacggaaagggtgtattcgatggcaaagtaccccggaaccagcgtacgaaaccgggagaatacgacctcactttgagccgatggcctgacttgactcgttacgagcagttggtggtacagtacaacaatcggctgttctcgtttccgagagacggcctacaagctttcgcaggtatcatcaacgcgcttgctcgatctttccgtaggggcttattctacggtttaccagagtacttcttcgactacgctatgctatggttcgcgtttacacccattcgcccccggcttgtcgacagcaaaagggatccagcattgccaagctggtcctgggctgggtgggaagggggtaatatcaacttaagcatcctgccacagctaacacgccatgttggtgctacgtttggaacttttccgcaagagtacattgagatctaccctatggtcaaatggtataaaacaaactcgaaaaccggttctatgcaagagacagataacggttattacgaagccgtaaagatgaggaatgacaaatctctacctctcccgaaaggttggtctagaactattcttaatatggggagcgataccggcgagggctttatctatgaagcaattccaggagaggtgtttacatggcccctacacataccagaccggccactggagtctactgcgaattcattcaacccttttctccgttttcgtacatgccgagcctttcttttcatcggcgcacgcctatatcacacatgggaaggcaagctctggagcgcttccgcacaagctgctgtaccgttagcctcggcatttcatatccacgatgacacgggaaactgggttgggattatattttccaataatttcgatgagagtggtgcgacgagtcaagatccttgcgagttcatcgtggtatctggaggggttacttggaaagatcagatcggagatcataatggtctggaagaatgggctcaggtggacatcattaaggacctcccgaggtatgacttttacaatgttctctggatttattgggtcggtagtgtcgcgtatcggaaagctgcgggaagagtatggaagcaggcatgggatcaactacagacgtcggatattcatgttcaacttggttaa

SEQ ID NO: 23373 - protein, 690 aa, Muscodor strobelii
  misc_feature: SGI Peptide ID NO. 567952
  misc_feature (188)..(349): Pfam Id: PF06985 Pfam Desc: Heterokaryon incompatibility protein (HET)
  misc_feature (188)..(292): Pfam Id: PF06985 Pfam Desc: Heterokaryon incompatibility protein (HET)
  misc_feature (101)..(465): NCBI GI: 171679984 Blast Desc: protein product [Podospora anserina] gi|170939618|emb|CAP64845.1| protein product [Podospora anserina]
  misc_feature (123)..(690): NCBI GI: 256722497 Blast Desc: NECHADRAFT_77207 [Nectria haematococca mpVI 77-13-4]
  misc_feature (130)..(690): NCBI GI: 256733208 Blast Desc: NECHADRAFT_79271 [Nectria haematococca mpVI 77-13-4]
  misc_feature (8)..(690): NCBI GI: 189188748 Blast Desc: conserved [Pyrenophora tritici-repentis Pt-1C-BFP] gi|187972319|gb|EDU39818.1| conserved [Pyrenophora tritici-repentis Pt-1C-BFP]
  misc_feature (167)..(690): NCBI GI: 256723993 Blast Desc: NECHADRAFT_86295 [Nectria haematococca mpVI 77-13-4]
  misc_feature (188)..(657): NCBI GI: 169622962 Blast Desc: SNOG_14707 [Phaeosphaeria nodorum SN15] gi|111056779|gb|EAT77899.1| SNOG_14707 [Phaeosphaeria nodorum SN15]
  misc_feature (123)..(690): NCBI GI: 46138127 Blast Desc: FG10578.1 [Gibberella zeae PH-1]
  misc_feature (128)..(690): NCBI GI: 189199136 Blast Desc: conserved [Pyrenophora tritici-repentis Pt-1C-BFP] gi|187983004|gb|EDU48492.1| conserved [Pyrenophora tritici-repentis Pt-1C-BFP]
  misc_feature (123)..(689): NCBI GI: 256728622 Blast Desc: NECHADRAFT_50543 [Nectria haematococca mpVI 77-13-4]
  misc_feature (126)..(690): NCBI GI: 256720262 Blast Desc: NECHADRAFT_89228 [Nectria haematococca mpVI 77-13-4]
MESHPQCPSCSRVNQIIDGRYDVPDNNSRTQTVLGTFSDLQHHTDCDVCGFITLKLSENPIRDGYQPQCPITFWKWSAPMDHMYSFGPSEGDDNCLTCDLDHSDLTLLDFASTDPSSPYYVEMDPEWIDVSKVRAWARECDSNHAGRCHGLTEWEDIPPPSLAPLLLVDVISHSLVELSIDRTPQLQYIALSYVWGRLSNVLETTQANLENLRLRNALILPPWASRLPDTVRDAIALTGRLGLRYLWVDRLCIIQDDLPRKTLQLEQMGAIHANAYMTLVAADGLDANHGLRGSCPGLSMPRIFKTRMLTFAPGDGKGVFDGKVPRNQRTKPGEYDLTLSRWPDLTRYEQLVVQYNNRLFSFPRDGLQAFAGIINALARSFRRGLFYGLPEYFFDYAMLWFAFTPIRPRLVDSKRDPALPSWSWAGWEGGNINLSILPQLTRHVGATFGTFPQEYIEIYPMVKWYKTNSKTGSMQETDNGYYEAVKMRNDKSLPLPKGWSRTILNMGSDTGEGFIYEAIPGEVFTWPLHIPDRPLESTANSFNPFLRFRTCRAFLFIGARLYHTWEGKLWSASAQAAVPLASAFHIHDDTGNWVGIIFSNNFDESGATSQDPCEFIVVSGGVTWKDQIGDHNGLEEWAQVDIIKDLPRYDFYNVLWIYWVGSVAYRKAAGRVWKQAWDQLQTSDIHVQLG

SEQ ID NO: 23374 - DNA, 1962 bp, Muscodor strobelii
  misc_feature: SGI cDNA ID NO. 567953
  misc_feature: Encodes the peptide sequence at SEQ ID NO 23375
atgaatcttacaccggctgccgcagagtcggtcatcgtgaaccagaggatggacaagatggcccagccgcggccaaggggacctccgaccccgagtatgagcactcctgctccagagtttgaccagcagcagcagttgactggttctcctccaccacctccgacgcccgccgcctcgcctggtccgacagatgcccagcctgactggagcgatgctgctgatgatgaggatttctttttggcccacgtccgacagcattttaagcattgctcggggcctcatcgaaaccggatacttgctgaccttctcaacatgtgcaccacacaacaactcagctttgtccatcagtttgtcagccctctgctgaagaaggaccctttcaccagcttgccggacgagctgtgcctgcgaatcttgtcgttcatagatgaccctcaagttctagcacgagcttcgcaggtatcacgacggtggagagatctcctcagtgatgatgtgacgtggaagaacctatgtgtcaaacacgactacggccgccgcctgtctgacgttacttatggtgtgccttcatatgcggccactcggcccagccctcttcctctgtctgatcctgagtttgcgcacaacagctttccaggcgcgctgcctgggacggcttcgttccatgctgcttctagaagcgtggatggctcgcagagccccactgctattgaccggcccaaattgcgatcatacaaatctcacttcaagcaacggtatcttgttgagtccgcctggagaactggtggacagcacaccactcggactattactcaagacggcagggttgtgactagtctacacttgacacctaagtacattgtggttgccctcgacaatgcaaggatccatatttttgatcgtgaaggcaacgcgctacgcacccttcaaggtcacatcatgggagtctgggctatggtcccttgggaggatatccttgtatctggtggttgcgatcgagacgtgcgtgtctgggatatgaccactggtgcatgccagcatacactgcgaggccatacctcgactgttcgctgtcttaagatgtcagatgagaacactgcgatctccggctctcgagatactaccttacgggtctgggatattagacagggcgtttgccgaaatgttctagtcggacaccaagctagtgtacggtgtctggagatcaaaggagacattgttgtgtctggcagctatgacgccaccgccaaaatctggagtatttctgagggtcgatgtcttcacaccttgaccggccactttagtcagatttatgccattgcattcgacggccagcgagtggtgacgggtagtcttgacacgagcgttcgtgtatgggacgcgcatactggggaacccatcgcagttctgcagggccacacatccttggtgggacaactacagctacgtgggaatactctcgtcactggaggatccgatggttcagtcagagtctggtcgcttgagaagatgtgccccatccaccgccttgctgctcatgacaatagcgtcaccagcctccaatttgatgatactcgagttgtgagcggaggtagcgacgggcgagtgaaggtctgggatgtgaagacagggcatttagtgcgagagctcattacggccgagtctgtatggcgtgtcgtttttgaggacgagaaatgtgttgctgtggcaaacagaggagctcgagtaatgatggaggtttggtcattctcgccccctgaggatgcatacagcgaaagaccaacatctttgccgcaacgatttgtggacgcatcagcggttcacccgttaacagctgatttccgtcattctggtcttcgtccctccgaagaagattctgagagccaagatatcgatatggccgattctggtccgtcaacagcaccattagtcggaaacactaccttcttccatgacgattag

SEQ ID NO: 23375 - protein, 653 aa, Muscodor strobelii
  misc_feature: SGI Peptide ID NO. 567953
  misc_feature (125)..(173): Pfam Id: PF00646 Pfam Desc: F-box domain
  misc_feature (343)..(380): Pfam Id: PF00400 Pfam Desc: WD domain, G-beta repeat
  misc_feature (424)..(460): Pfam Id: PF00400 Pfam Desc: WD domain, G-beta repeat
  misc_feature (384)..(420): Pfam Id: PF00400 Pfam Desc: WD domain, G-beta repeat
  misc_feature (504)..(540): Pfam Id: PF00400 Pfam Desc: WD domain, G-beta repeat
  misc_feature (464)..(500): Pfam Id: PF00400 Pfam Desc: WD domain, G-beta repeat
  misc_feature (303)..(339): Pfam Id: PF00400 Pfam Desc: WD domain, G-beta repeat
  misc_feature (2)..(653): NCBI GI: 46122155 Blast Desc: FG05455.1 [Gibberella zeae PH-1]
  misc_feature (32)..(653): NCBI GI: 145608792 Blast Desc: MGG_06372 [Magnaporthe grisea 70-15] gi|145016221|gb|EDK00711.1| MGG_06372 [Magnaporthe grisea 70-15]
  misc_feature (9)..(653): NCBI GI: 116192015 Blast Desc: CHGG_05725 [Chaetomium globosum CBS 148.51] gi|88181638|gb|EAQ89106.1| CHGG_05725 [Chaetomium globosum CBS 148.51]
  misc_feature (2)..(653): NCBI GI: 261360157 Blast Desc: F-box/WD repeat-containing protein [Verticillium albo-atrum VaMs.102]
  misc_feature (15)..(653): NCBI GI: 156044877 Blast Desc: SS1G_09627 [Sclerotinia sclerotiorum 1980] gi|154694022|gb|EDN93760.1| SS1G_09627 [Sclerotinia sclerotiorum 1980]
  misc_feature (8)..(653): NCBI GI: 154318924 Blast Desc: BC1G_02851 [Botryotinia fuckeliana B05.10] gi|150857981|gb|EDN33173.1| BC1G_02851 [Botryotinia fuckeliana B05.10]
  misc_feature (8)..(651): NCBI GI: 85083468 Blast Desc: NCU06483 [Neurospora crassa OR74A] gi|28918209|gb|EAA27887.1| NCU06483 [Neurospora crassa OR74A]
  misc_feature (67)..(592): NCBI GI: 240107279 Blast Desc: WD domain and F-box domain containing protein [Coccidioides posadasii C735 delta SOWgp]
  misc_feature (67)..(592): NCBI GI: 225563369 Blast Desc: F-box and WD repeat-containing protein [Ajellomyces capsulatus G186AR]
  misc_feature (67)..(592): NCBI GI: 240275967 Blast Desc: F-box protein [Ajellomyces capsulatus H143]
MNLTPAAAESVIVNQRMDKMAQPRPRGPPTPSMSTPAPEFDQQQQLTGSPPPPPTPAASPGPTDAQPDWSDAADDEDFFLAHVRQHFKHCSGPHRNRILADLLNMCTTQQLSFVHQFVSPLLKKDPFTSLPDELCLRILSFIDDPQVLARASQVSRRWRDLLSDDVTWKNLCVKHDYGRRLSDVTYGVPSYAATRPSPLPLSDPEFAHNSFPGALPGTASFHAASRSVDGSQSPTAIDRPKLRSYKSHFKQRYLVESAWRTGGQHTTRTITQDGRVVTSLHLTPKYIVVALDNARIHIFDREGNALRTLQGHIMGVWAMVPWEDILVSGGCDRDVRVWDMTTGACQHTLRGHTSTVRCLKMSDENTAISGSRDTTLRVWDIRQGVCRNVLVGHQASVRCLEIKGDIVVSGSYDATAKIWSISEGRCLHTLTGHFSQIYAIAFDGQRVVTGSLDTSVRVWDAHTGEPIAVLQGHTSLVGQLQLRGNTLVTGGSDGSVRVWSLEKMCPIHRLAAHDNSVTSLQFDDTRVVSGGSDGRVKVWDVKTGHLVRELITAESVWRVVFEDEKCVAVANRGARVMMEVWSFSPPEDAYSERPTSLPQRFVDASAVHPLTADFRHSGLRPSEEDSESQDIDMADSGPSTAPLVGNTTFFHDD

SEQ ID NO: 23376 - DNA, 4271 bp, Muscodor strobelii
  misc_feature: SGI EST ID NO. CUFF.55034.0
  misc_feature: Variant of the nucleotide sequence at SEQ ID NO 23374
tgcgggctgatgcgggatcatcgtgcccaagatgcttggaactactacgatgcgcttcgtaagtctgtcaatgatgaacgagagtgtgaggaatgtgttcagatgacagttctagtattggagatatgcatcattaggaagtgggattagaatgtgtgccgtaactaggaattccgagtcatcactcactgcgtgtaccgcccgcccttctgaaatggtgcatatcctaacgcccgtggcatattaacgggttacataccaacgtcttcacatgtcgtgctatgcaatatgcagatgctatggcaggctgggtgtcgagcatcaataacaaggctcgtattatgcatgcgagagcagagatttcatctcatctgtgaggtagccgtcagttatacctctgcttcttataatgaggagttggagatggatggtcagccgtccagattcggtggtaggtcaaggtacgggtgtactcgtatgtgaggagggtacgacccagagttgagtggtagcgtgagtggtagcatgagcggtagcagcagatgatgcatgtaataatccgcaactgccaccgcagactggaccccggccacagacaaacccagccggtcgctcgccctgtgatctgcgactcttgcccatcctttggtcgtcctaactcactcccccatccgtcccgttttcctactggcttgtttcgcatttccatttcgatattgcaaaggggaaagggagcaaaatagccttgttcgacaacaaccccgttgttcttgaccccatccgcgtccatctcaagcgtccccgagtctggacctggaccccatcccgaccttagtacagactccatcttcgctctttctccctctgccgcccactgcagaacagacggccgagcctgcccacgatcaacgtctgtctgctccttctcaacccccgaccgccgactccttcagcaccgtacctgcctccagcacagacataccttgaacagtgataccttcctccattgtactatttttgatccgtgcccacgtaccttgtttgcctaccgcatcgtgcatcgcctcgaatctcgaactgttgaatgttgaaacaccacagccgaagccacaccacgagtctgagtagacagtgtgaagcatgacaatgccttgacacctcctctgcgattcatcacattacagagcaagtcgcggcgtattgttgtgaatactcacttgaaaactcgatcgaagtcgctccattcaaccattaccggacgcattccgcgttctaccttgacaacccggcccgttgatgtgaccaccagccttccgctacacagacatcttatctatatacactcatatctataatcacgccctgcttcatgccagtctgacagccgaactatttcggacatctcacatattgttggcttgcccaaccatcctggacgactgcgggattcagaccgcagacaacgctccagagtcttgagtcatccgctgcggactgccactactaatatttaaccagtcgagcctcttccgctttggacccctatgattgatatcccgacacgatagcccttttattacgcactcgacacggcctatctgatccggcacacaattacgaatgagcgaagcgtgcgcggaagataataagagcatcacaatatggctggtttcaaccgaccactttcattatcggagcgtagaggcagcgccatgagttgcggggacgagatgaatcttacaccggctgccgcagagtcggtcatcgtgaaccagaggatggacaagatggcccagccgcggccaaggggacctccgaccccgagtatgagcactcctgctccagagtttgaccagcagcagcagttgactggttctcctccaccacctccgacgcccgccgcctcgcctggtccgacagatgcccagcctgactggagcgatgctgctgatgatgaggatttctttttggcccacgtccgacagcattttaagcattgctcggggcctcatcgaaaccggatacttgctgaccttctcaacatgtgcaccacacaacaactcagctttgtccatcagtttgtcagccctctgctgaagaaggaccctttcaccagcttgccggacgagctgtgcctgcgaatcttgtcgttcatagatgaccctcaagttctagcacgagcttcgcaggtatcacgacggtggagagatctcctcagtgatgatgtgacgtggaagaacctatgtgtcaaacacgactacggccgccgcctgtctgacgttacttatggtgtgccttcatatgcggccactcggcccagccctcttcctctgtctgatcctgagtttgcgcacaacagctttccaggcgcgctgcctgggacggcttcgttccatgctgcttctagaagcgtggatggctcgcagagccccactgctattgaccggcccaaattgcgatcatacaaatctcacttcaagcaacggtatcttgttgagtccgcctggagaactggtggacagcacaccactcggactattactcaagacggcagggttgtgactagtctacacttgacacctaagtacattgtggttgccctcgacaatgcaaggatccatatttttgatcgtgaaggcaacgcgctacgcacccttcaaggtcacatcatgggagtctgggctatggtcccttgggaggatatccttgtatctggtggttgcgatcgagacgtgcgtgtctgggatatgaccactggtgcatgccagcatacactgcgaggccatacctcgactgttcgctgtcttaagatgtcagatgagaacactgcgatctccggctctcgagatactaccttacgggtctgggatattagacagggcgtttgccgaaatgttctagtcggacaccaagctagtgtacggtgtctggagatcaaaggagacattgttgtgtctggcagctatgacgccaccgccaaaatctggagtatttctgagggtcgatgtcttcacaccttgaccggccactttagtcagatttatgccattgcattcgacggccagcgagtggtgacgggtagtcttgacacgagcgttcgtgtatgggacgcgcatactggggaacccatcgcagttctgcagggccacacatccttggtgggacaactacagctacgtgggaatactctcgtcactggaggatccgatggttcagtcagagtctggtcgcttgagaagatgtgccccatccaccgccttgctgctcatgacaatagcgtcaccagcctccaatttgatgatactcgagttgtgagcggaggtagcgacgggcgagtgaaggtctgggatgtgaagacagggcatttagtgcgagagctcattacggccgagtctgtatggcgtgtcgtttttgaggacgagaaatgtgttgctgtggcaaacagaggagctcgagtaatgatggaggtttggtcattctcgccccctgaggatgcatacagcgaaagaccaacatctttgccgcaacgatttgtggacgcatcagcggttcacccgttaacagctgatttccgtcattctggtcttcgtccctccgaagaagattctgagagccaagatatcgatatggccgattctggtccgtcaacagcaccattagtcggaaacactaccttcttccatgacgattagcctcagtcgtacgaaggcactcggcttggtttgcagtacttaaccttgggcaattcaacttttgttcaataacaaagctactgctgtgcgctatattagtagcatcacttgtctgggcccgtatggcactaggcaagcacacaacccaccattatatgcattgaaggcgttaaaacttggtggttagttttcggcatttcagttttaaggaatcatgatcgcaagagcaagggagttggagttggaaggatcaatggaatctgcaaaattccaggcattggttgcatggtcctagaatgcatggtctacatgaggtatatttggccaccagcacgcttgaaatgcgatcgcgagtcatgtatatggatgaggatccgaataccgggttcttttgaaggtgctgtgctcattattaagctttatacatagcgccttggttgttattgctgcatttcgacggcgcggttaacatagctaattacctaacttgcatcatgcacctagttcgacttatgatatgtgtgacgcggccttctctaaagatgcaattgctaatgacaaatggaacgtcaattccta

SEQ ID NO: 23377 - DNA, 795 bp, Muscodor strobelii
  misc_feature: SGI cDNA ID NO. 567954
  misc_feature: Encodes the peptide sequence at SEQ ID NO 23378
atggatgacggcttcgagatacgcctgcgcttcagctcgcagctggagcgcctcggtgccagtatcaacgactgtcagaaggctgctcagtacgccctgaagaacaaggcgctcgaggaagacctccattcctgtatcttagaacagctcaaaaagaccaacatgaacacgcgagcaaacatcatgtatttcatcgaacatctcatggagatggcatccaaagaccgcggcaacacctacgtgctcatgatgcagaaggacatgctcaatgtcgtcgacgctgtgtgccccaaagacggttccggcgctgcaaatgtcaaagtcgttaaaaaggtcattcaggggctcagaaccaagtatatcctcctcgacgaaacggtgacagaggttcaagacctgctcaaaacgcgcggcaatgctaccaacgaccttagcctctcatcgcccgtgaacaacaacgacacacccaccgcaccaaattcgaaccccaaaaccgatgcctccaaaccctcaaagcgtcaaatcgaaacgagaatcgaggaagaccgtgagcggcataagagggcacgggagaacatgtggattgtgccgtctgatcctttagagcaagctcgcaagtacttcagcgaaataagcgagtttggcgaagacgaccgcattctcggcgaggaagaaacggctcaatttcgcgcagagctacgaaataacgtgtgccgacacgggagggcaagtaaaccgagagatcgaccaaaatcaagggcttccaacggaacagctgcagtaggtgccttttag

SEQ ID NO: 23378 - protein, 264 aa, Muscodor strobelii
  misc_feature: SGI Peptide ID NO. 567954
  misc_feature (1)..(244): NCBI GI: 256733234 Blast Desc: NECHADRAFT_100194 [Nectria haematococca mpVI 77-13-4]
  misc_feature (1)..(245): NCBI GI: 46125757 Blast Desc: FG07256.1 [Gibberella zeae PH-1]
  misc_feature (1)..(225): NCBI GI: 159129608 Blast Desc: conserved [Aspergillus fumigatus A1163]
  misc_feature (3)..(228): NCBI GI: 154318918 Blast Desc: BC1G_02848 [Botryotinia fuckeliana B05.10] gi|150857978|gb|EDN33170.1| BC1G_02848 [Botryotinia fuckeliana B05.10]
  misc_feature (1)..(225): NCBI GI: 71001728 Blast Desc: conserved [Aspergillus fumigatus Af293] gi|66853183|gb|EAL93507.1| conserved [Aspergillus fumigatus Af293]
  misc_feature (1)..(230): NCBI GI: 212537217 Blast Desc: conserved [Penicillium marneffei ATCC 18224] gi|210068506|gb|EEA22597.1| conserved [Penicillium marneffei ATCC 18224]
  misc_feature (1)..(225): NCBI GI: 115383934 Blast Desc: conserved [Aspergillus terreus NIH2624] gi|114196206|gb|EAU37906.1| conserved [Aspergillus terreus NIH2624]
  misc_feature (1)..(225): NCBI GI: 225563367 Blast Desc: sporulation protein [Ajellomyces capsulatus G186AR]
  misc_feature (1)..(225): NCBI GI: 119481287 Blast Desc: NFIA_087310 [Neosartorya fischeri NRRL 181] gi|119408826|gb|EAW18775.1| conserved [Neosartorya fischeri NRRL 181]
  misc_feature (1)..(228): NCBI GI: 240275962 Blast Desc: conserved [Ajellomyces capsulatus H143]
MDDGFEIRLRFSSQLERLGASINDCQKAAQYALKNKALEEDLHSCILEQLKKTNMNTRANIMYFIEHLMEMASKDRGNTYVLMMQKDMLNVVDAVCPKDGSGAANVKVVKKVIQGLRTKYILLDETVTEVQDLLKTRGNATNDLSLSSPVNNNDTPTAPNSNPKTDASKPSKRQIETRIEEDRERHKRARENMWIVPSDPLEQARKYFSEISEFGEDDRILGEEETAQFRAELRNNVCRHGRASKPRDRPKSRASNGTAAVGAF

SEQ ID NO: 23379 - DNA, 6589 bp, Muscodor strobelii
  misc_feature: SGI EST ID NO. CUFF.55126.1
  misc_feature: Variant of the nucleotide sequence at SEQ ID NO 23377
taggtaggctaatctggcatctaacgaggtgtctaagccttttagggcaagcactagacgcgcatctcacgttttaccgcaaaaggcacctcccacttaactcaactccagcatccactgacgcgcctgacgtttcgatatcgcgtaaagtgaatacatactttccaccgtgaacttcgccaaaggccacccgacctgcaactctagaacagccatcttttgtcgcgcaatctcaagcgcactactagcattgtctaaggatctcaactacagtttgacaacagaaagcaatactcagactccacctttccgcctttgcgacagtgcgccagcatggccgacgaatggacgagtgacgccaacgaagcgatcaccatttcgctcgtacgccctaccaccaatggcattgtcaagctcgagtccttcaatcccaagttcacttatcccatcttcggcgaagaagagcaaatattcggctacaaaggcctgaagatcaacctccagtacgatgcccgcaacttacgacccaacctctccgtcaaatcttccaagaagttcagcgccattggcgaggtcaaggccgtagatgtcaaggaggtcatgaaggagttcttgcctgccgttgcattacaaacccgatcagaatacgagacagctctcgcaaatgtgcccgatacctggactcctccgggagaactcatcaagtctattgagaagaacggagagactcatgagatatggatgggcagtttggcagatactgctgtcaagcagatgttgcgccggatcgagattacagttctactctttattgaagggggttcgtacatcgggctaaacgctgacggaggcgacgagcccgagacatcgcttgctcgctggtcagtattctttgtctacaagaaggaacaagcgccagagggcgccaacaagtcgcattacacattcgagggtttctcgactgtctatgatttctggctctatcaacaacccacgccgccaacaagcccgcgtcaggacggtgctcccattgagagcaaatctaatgattcttgggagctcccagttggccatctcccgctctccagtctccctcgccgcgcaaggatatcacagtgcatcattttacctcctttccagggcaaaggcgttggagctttcctgtacagaacaatcttcgacttgtacacggcagatccttctacaaaggagattaccgtagaggaccctaacgaggatttcgacctacttcgagatctatgcgacttgaagtaccttcgaaagaacatactagagttcgccgcattaaaggtcaacagcaatatgtccatccccgagaaaggtggcatcctccataacaacactcaaatctcactcaacgactctgcatccgcctccacagatggcattgtagatcagacggcgctggagaagatgcgcgtcaaagcaaagatcgctcctagacagttctggcgccttgtggagatgcatctcatgtcgacactccctgcctcggtccgaccccaagcggaacaggacgacgatggctcaatgaaaccacctcccccaaaggctgatcagaaggcatactctctttggagactgctcctcaagcaacgtctttaccgtcgcaatgtgctggtcctcgccgagatggagacgaccgagcgcatcatcaaactcaacgagaccgtcagtaacgtcgagtgggagtacgccagaatcctcgaactagctgagcccaagaaatctgtgacgaatggaaagaggaaactggatgatgaggcagaaaacacaacgccagcaaagaaggcgcgtgtcgaagacgcctaaagacacatcgagaccatgattctcaggcggcgacggtttgtaaactaaggactggctggacggagtttaaggcgtactctttgtgatacctacatggcgctctgacttttctgccggatacgtaaggacttaaggtttagggcgacacgactggctcgaaattgcgccgatctgcgcttactgcgtcgccaagtcgagagggaatgaacttctgaaacgcgtcgtctttggtgcagaaaatgggacaaatagcaaagatcggtagtcaatgaaaattggtatcatccgcgaaagatatctgtttactttaattttcttcctctaattctttccaataggtttctttctctatgcttcccccgtccgtctagatctatcttcttgttccgttgacaccttggtgcccctgtccaagctggctcgcgacgcatgccgcttctctaatagccttagaaatggttccccgtacaccaccctcttcaaggacaagtgttcctccgatactgcaaccaccaggtgtgcagaccttctcgcgaaccagcgcagggtgttcaccactctggacaaggctcgccgtgcctctcatggtttgagcagccatcttctgagcctctgcccgaggcaaccccatggccacagctccgtcgatggcagactccagcataagcgcgaagaatgcgggaccagaagcgcagagcgccgtagaagcatccatcgaggacgcaggcagatagacgacatcaccaatccgcttgaagatccaggttacgagacttaaggtgtggtccggcagcggtggcgtggaatgcgcaatgaccgtcatactctctcggataacagcatttgtgttgggcatggctcgcacgatgcgacagcggccatcgatctctggatccttgacaggcacggctccgtgcaacacggtctcgaggtaagggactgtgacaccggcgcaaatggagatcaagagcttgccatggagtgctttcgccataccaggctcgttgaggagctcctcgacgtgatctgctttgcaggctagcagtatgacgtcggctttcatggtagcggcgacgttctccttttgtacgactttgaggttcgagctgtgctcccacagagcttgtttcacgcgcttggcggtctggggacatcgtacacaggcgatgaagcgggaagggaggcggctggggacttcgttgcgcggtgtggagggagcggaggtttggagaggtcgaggcccgttcatctcgattagagaggtgaggatgcctgaaaggatggcaatccccatcgagcctattatatgtgttggtcaggttgtatcaggtttccgtttgccatattagacttaccacagccaagaacagccatggtgagctcggcaccctcgtgcccatgctgtgtaatggccaacatgttggtcgatgtgaggtaagtgttgtaagtggaggggtggtttgtagatgcccaaggtatcacgattcacaacaagggagaagagaaagaattatagtttatgtaggtaatgttacaacagtaggaggtagaagaaaagggatgataatgactatcagaaactacaggttcattcaatgtttataccaggctgtgacacttgtcaataaagcaatcgatcccatcgcaacagattcctcacttcccataggctcatgctcgtcgcccttcccagtctccctcccggcagaaggcccgtgaggtcccgtaatcgccccgactctgaccggcattgccttggagaatcctttggtggggtttcctgatgcgataaaacactcacacaaacgtctcaaattgacaccaattaatatctagcgcgcatgttgttagtcgtattgagcatagctttggacgggaagacaatgtaacagggatcggttcgaccgaagcaactcccaaaaatcagacccctgtgccgtgattggggatagctatgaattttggggacaaaaacctatcgtccttactttggcataactggtaactgtgtgctataattttctttgcagtgagtagaataatattcgcttatggacgagggataaaaaacgaaagtgatgtgagattttggaacgtcatgtatatctaaaagctaagttcgtcccatatgggatggtaatctttttcttcccagctcgatacccctgtcgaccaaattggcgtcgcgtgtcgcgagctgcaacttctataatttttggagctccaaccatgcttgcacagagcttccccacgcccagcccaacatccaggcctgtagatgacatcaacccttacccaacgaacttcacccacggctgtgaatgttagcattgcttggctttggcttttatcacatgtttgaatagtctcaccaaagagttcacgcttccacaagctgcttgaggccccaccagcaccactaccgatttccgacctgcccacagccttctcccaccgacctttggttcagtaaggtatatattcgacaacagttgtgctacttattgtagacgaccttcgactgcagccctatccaaacttcagttgaaatattggattgtctctacgccttttggctcctggaggcaaatctgaacgatggatgacggcttcgagatacgcctgcgcttcagctcgcagctggagcgcctcggtgccagtatcaacgactgtcagaaggctgctcagtacgccctgaagaacaaggcgctcgaggaagacctccattcctgtatcttagaacagctcaaaaagaccaacatgaacacgcgagcaaacatcatgtatttcatcgaacatctcatggagatggcatccaaagaccgcggcaacacctacgtgctcatgatgcagaaggacatgctcaatgtcgtcgacgctgtgtgccccaaagacggttccggcgctgcaaatgtcaaagtcgttaaaaaggtcattcaggggctcagaaccaagtatatcctcctcgacgaaacggtgacagaggttcaagacctgctcaaaacgcgcggcaatgctaccaacgaccttagcctctcatcgcccgtgaacaacaacgacacacccaccgcaccaaattcgaaccccaaaaccgatgcctccaaaccctcaaagcgtcaaatcgaaacgagaatcgaggaagaccgtgagcggcataagagggcacgggagaacatgtggattgtgccgtctgatcctttagagcaagctcgcaagtacttcagcgaaataagcgagtttggcgaagacgaccgcattctcggcgaggaagaaacggctcaatttcgcgcagagctacgaaataacgtgtgccgacacgggagggcaagtaaaccgagagatcgaccaaaatcaagggcttccaacggaacagctgcagtaggtgccttttaggagaaccatacttcttccaaagttccgcaaccagacgaagagagtgtgtgtgccaatcacgatgttcctgatgaaggcaagaagaaacaccgttcacgattaccaatcatgactagatcgtggaaggaacaaccgcagcggctcgaaactaatcataccaatacgaaccatgtggcagcagcatcctctcatatatcgacacgtgcaccctctctgcagcgatccaactccggtctatcttctattcccgctcctaccacgggtacaggccaactgcgtttcgatccgccacgaggcccctctttcaatccaccacgaggtccctctgctcaaagacgaggtcggtggccgagaagcatattcgaccctcctcataaaagtggtgtggatgatgaagctatagggtgtcacatgaaagaccccgcgaagaaaaacaagaagaaagaatgaaattgctagcgagcgactctgcgtattgagttatgttgataaaatggatctcaaatggtatgctggcacactgtctcacacggtccaaagtcttgatgatcagaagtttaaacatcccgtttatacaatgcggaggaatcactgtttggataccgcaggtcatgagtgagtaggactaatcgagctcattcatgtttaaatcctctagaggacagttgttgaaagactcatttcaacttcttatgtattatctctacttattcacgtcgcatggcgttccggataggtcgtttacttcgggctggacagtggtatggcgactagtataataacagattggcaagaatgccatagacttcgacggcgtcgatgcattgttattaacaggcttatacaagacattattcgtctgaacgtttatatagatcaggcacagtgatattactgaagttacgtataccgactgaaataaaactttaaatccggtcgacacagtgacgaccttttcaaattatagacctagtggctgaccacacatagattctcttaacgagcctgactttataaatattgatttgaatttgaattcggattgtaccagtatgggttatgtcatgcagagtgtgtatcttctattttcacagccttcctgtgttcgtgatttcggagttaacagacctttgttcaagattgctggcttactgtatctcttaggtaactggcaggctggctgacgagatatcgagtactatgatatgatgagcttcatatgggccgaagtgcgaaacattgtatcgatgaaatgattaatggaggcggtttacagtactgtatatcaattgtttgattgtcgtaaccatcaatttgggctaattagtaggtgcaatcttcagtatctccagactctgctcga

SEQ ID NO: 23380 - DNA, 990 bp, Muscodor strobelii
  misc_feature: SGI cDNA ID NO. 567955
  misc_feature: Reduced expression when VOC is produced
  misc_feature: Encodes the peptide sequence at SEQ ID NO 23381
atgttggccattacacagcatgggcacgagggtgccgagctcaccatggctgttcttggctgtggctcgatggggattgccatcctttcaggcatcctcacctctctaatcgagatgaacgggcctcgacctctccaaacctccgctccctccacaccgcgcaacgaagtccccagccgcctcccttcccgcttcatcgcctgtgtacgatgtccccagaccgccaagcgcgtgaaacaagctctgtgggagcacagctcgaacctcaaagtcgtacaaaaggagaacgtcgccgctaccatgaaagccgacgtcatactgctagcctgcaaagcagatcacgtcgaggagctcctcaacgagcctggtatggcgaaagcactccatggcaagctcttgatctccatttgcgccggtgtcacagtcccttacctcgagaccgtgttgcacggagccgtgcctgtcaaggatccagagatcgatggccgctgtcgcatcgtgcgagccatgcccaacacaaatgctgttatccgagagagtatgacggtcattgcgcattccacgccaccgctgccggaccacaccttaagtctcgtaacctggatcttcaagcggattggtgatgtcgtctatctgcctgcgtcctcgatggatgcttctacggcgctctgcgcttctggtcccgcattcttcgcgcttatgctggagtctgccatcgacggagctgtggccatggggttgcctcgggcagaggctcagaagatggctgctcaaaccatgagaggcacggcgagccttgtccagagtggtgaacaccctgcgctggttcgcgagaaggtctgcacacctggtggttgcagtatcggaggaacacttgtccttgaagagggtggtgtacggggaaccatttctaaggctattagagaagcggcatgcgtcgcgagccagcttggacaggggcaccaaggtgtcaacggaacaagaagatag

SEQ ID NO: 23381 - protein, 329 aa, Muscodor strobelii
  misc_feature: SGI Peptide ID NO. 567955
  misc_feature (15)..(302): Pfam Id: PF03807 Pfam Desc: NADP oxidoreductase coenzyme F420-dependent
  misc_feature (2)..(328): NCBI GI: 46125755 Blast Desc: FG07255.1 [Gibberella zeae PH-1]
  misc_feature (2)..(328): NCBI GI: 256732790 Blast Desc: [Nectria haematococca mpVI 77-13-4]
  misc_feature (9)..(328): NCBI GI: 218511626 Blast Desc: pyrroline-5-carboxylate reductase [Epichloe festucae] gi|218511627|gb|ACK77801.1| pyrroline-5-carboxylate reductase [Epichloe festucae] gi|218511628|gb|ACK77802.1| reductase
  misc_feature (13)..(328): NCBI GI: 39976947 Blast Desc: MGG_06376 [Magnaporthe grisea 70-15] gi|145016216|gb|EDK00706.1| MGG_06376 [Magnaporthe grisea 70-15]
  misc_feature (9)..(328): NCBI GI: 3024443 Blast Desc: P5CR_ZALAR RecName: Full=Pyrroline-5-carboxylate reductase; Short=P5C reductase; Short=P5CR gi|1377901|gb|AAC49320.1| pyrroline carboxylate reductase
  misc_feature (2)..(328): NCBI GI: 116192021 Blast Desc: CHGG_05728 [Chaetomium globosum CBS 148.51] gi|88181641|gb|EAQ89109.1| CHGG_05728 [Chaetomium globosum CBS 148.51]
  misc_feature (9)..(328): NCBI GI: 261195514 Blast Desc: pyrroline-5-carboxylate reductase [Ajellomyces dermatitidis SLH14081] gi|239588033|gb|EEQ70676.1| pyrroline-5-carboxylate reductase [Ajellomyces dermatitidis ER-3]
  misc_feature (15)..(328): NCBI GI: 258565221 Blast Desc: pyrroline-5-carboxylate reductase [Uncinocarpus reesii 1704] gi|237907056|gb|EEP81457.1| pyrroline-5-carboxylate reductase [Uncinocarpus reesii 1704]
  misc_feature (14)..(328): NCBI GI: 226280227 Blast Desc: pyrroline-5-carboxylate reductase [Paracoccidioides brasiliensis Pb01]
  misc_feature (72)..(317): NCBI GI: 219814264 Blast Desc: pyrroline-5-carboxylate reductase [Neotyphodium uncinatum]
  misc_feature (9)..(328): SWISSPROT Homolog: EC 1.5.1.2 Pyrroline-5-carboxylate reductase
  misc_feature: Useful for introducing or modulating the production of volatile compounds
MLAITQHGHEGAELTMAVLGCGSMGIAILSGILTSLIEMNGPRPLQTSAPSTPRNEVPSRLPSRFIACVRCPQTAKRVKQALWEHSSNLKVVQKENVAATMKADVILLACKADHVEELLNEPGMAKALHGKLLISICAGVTVPYLETVLHGAVPVKDPEIDGRCRIVRAMPNTNAVIRESMTVIAHSTPPLPDHTLSLVTWIFKRIGDVVYLPASSMDASTALCASGPAFFALMLESAIDGAVAMGLPRAEAQKMAAQTMRGTASLVQSGEHPALVREKVCTPGGCSIGGTLVLEEGGVRGTISKAIREAACVASQLGQGHQGVNGTRR

SEQ ID NO: 23382 - DNA, 6773 bp, Muscodor strobelii
  misc_feature: SGI EST ID NO. CUFF.55125.0
  misc_feature: Variant of the nucleotide sequence at SEQ ID NO 23380
tcgagcagagtctggagatactgaagattgcacctactaattagcccaaattgatggttacgacaatcaaacaattgatatacagtactgtaaaccgcctccattaatcatttcatcgatacaatgtttcgcacttcggcccatatgaagctcatcatatcatagtactcgatatctcgtcagccagcctgccagttacctaagagatacagtaagccagcaatcttgaacaaaggtctgttaactccgaaatcacgaacacaggaaggctgtgaaaatagaagatacacactctgcatgacataacccatactggtacaatccgaattcaaattcaaatcaatatttataaagtcaggctcgttaagagaatctatgtgtggtcagccactaggtctataatttgaaaaggtcgtcactgtgtcgaccggatttaaagttttatttcagtcggtatacgtaacttcagtaatatcactgtgcctgatctatataaacgttcagacgaataatgtcttgtataagcctgttaataacaatgcatcgacgccgtcgaagtctatggcattcttgccaatctgttattatactagtcgccataccactgtccagcccgaagtaaacgacctatccggaacgccatgcgacgtgaataagtagagataatacataagaagttgaaatgagtctttcaacaactgtcctctagaggatttaaacatgaatgagctcgattagtcctactcactcatgacctgcggtatccaaacagtgattcctccgcattgtataaacgggatgtttaaacttctgatcatcaagactttggaccgtgtgagacagtgtgccagcataccatttgagatccattttatcaacataactcaatacgcagagtcgctcgctagcaatttcattctttcttcttgtttttcttcgcggggtctttcatgtgacaccctatagcttcatcatccacaccacttttatgaggagggtcgaatatgcttctcggccaccgacctcgtctttgagcagagggacctcgtggtggattgaaagaggggcctcgtggcggatcgaaacgcagttggcctgtacccgtggtaggagcgggaatagaagatagaccggagttggatcgctgcagagagggtgcacgtgtcgatatatgagaggatgctgctgccacatggttcgtattggtatgattagtttcgagccgctgcggttgttccttccacgatctagtcatgattggtaatcgtgaacggtgtttcttcttgccttcatcaggaacatcgtgattggcacacacactctcttcgtctggttgcggaactttggaagaagtatggttctcctaaaaggcacctactgcagctgttccgttggaagcccttgattttggtcgatctctcggtttacttgccctcccgtgtcggcacacgttatttcgtagctctgcgcgaaattgagccgtttcttcctcgccgagaatgcggtcgtcttcgccaaactcgcttatttcgctgaagtacttgcgagcttgctctaaaggatcagacggcacaatccacatgttctcccgtgccctcttatgccgctcacggtcttcctcgattctcgtttcgatttgacgctttgagggtttggaggcatcggttttggggttcgaatttggtgcggtgggtgtgtcgttgttgttcacgggcgatgagaggctaaggtcgttggtagcattgccgcgcgttttgagcaggtcttgaacctctgtcaccgtttcgtcgaggaggatatacttggttctgagcccctgaatgacctgagttgaagatggagttgttagcaacagacagagtgacacactgggcgaataaggatagggcacactacctttttaacgactttgacatttgcagcgccggaaccgtctttggggcacacagcgtcgacgacattgagcatgtccttctgcatcatgagcacgtaggtgttgccgcggtctttggatgccatctccatgagatgttcgatgaaatacatgatgtttgctcgcgtgttcatgttggtctgtccgaggatggggagacgtcagccatcagcccatagtcaatggcgaggttgtgtagcatcacctttttgagctgttctaagatacaggaatggaggtcttcctcgagcgccttgttcttcagggcgtactgagcagccttctgacagtcgttgatactggcaccgaggcgctccagctgcgagctgaagcgcaggcgtatctcgaagccgtcatccatcgttcagatttgcctccaggagccaaaaggcgtagagacaatccaatatttcaactgaagtttggatagggctgcagtcgaaggtcgtctacaataagtagcacaactgttgtcgaatatataccttactgaaccaaaggtcggtgggagaaggctgtgggcaggtcggaaatcggtagtggtgctggtggggcctcaagcagcttgtggaagcgtgaactctttggtgagactattcaaacatgtgataaaagccaaagccaagcaatgctaacattcacagccgtgggtgaagttcgttgggtaagggttgatgtcatctacaggcctggatgttgggctgggcgtggggaagctctgtgcaagcatggttggagctccaaaaattatagaagttgcagctcgcgacacgcgacgccaatttggtcgacaggggtatcgagctgggaagaaaaagattaccatcccatatgggacgaacttagcttttagatatacatgacgttccaaaatctcacatcactttcgttttttatccctcgtccataagcgaatattattctactcactgcaaagaaaattatagcacacagttaccagttatgccaaagtaaggacgataggtttttgtccccaaaattcatagctatccccaatcacggcacaggggtctgatttttgggagttgcttcggtcgaaccgatccctgttacattgtcttcccgtccaaagctatgctcaatacgactaacaacatgcgcgctagatattaattggtgtcaatttgagacgtttgtgtgagtgttttatcgcatcaggaaaccccaccaaaggattctccaaggcaatgccggtcagagtcggggcgattacgggacctcacgggccttctgccgggagggagactgggaagggcgacgagcatgagcctatgggaagtgaggaatctgttgcgatgggatcgattgctttattgacaagtgtcacagcctggtataaacattgaatgaacctgtagtttctgatagtcattatcatcccttttcttctacctcctactgttgtaacattacctacataaactataattctttctcttctcccttgttgtgaatcgtgataccttgggcatctacaaaccacccctccacttacaacacttacctcacatcgaccaacatgttggccattacacagcatgggcacgagggtgccgagctcaccatggctgttcttggctgtggctcgatggggattgccatcctttcaggcatcctcacctctctaatcgagatgaacgggcctcgacctctccaaacctccgctccctccacaccgcgcaacgaagtccccagccgcctcccttcccgcttcatcgcctgtgtacgatgtccccagaccgccaagcgcgtgaaacaagctctgtgggagcacagctcgaacctcaaagtcgtacaaaaggagaacgtcgccgctaccatgaaagccgacgtcatactgctagcctgcaaagcagatcacgtcgaggagctcctcaacgagcctggtatggcgaaagcactccatggcaagctcttgatctccatttgcgccggtgtcacagtcccttacctcgagaccgtgttgcacggagccgtgcctgtcaaggatccagagatcgatggccgctgtcgcatcgtgcgagccatgcccaacacaaatgctgttatccgagagagtatgacggtcattgcgcattccacgccaccgctgccggaccacaccttaagtctcgtaacctggatcttcaagcggattggtgatgtcgtctatctgcctgcgtcctcgatggatgcttctacggcgctctgcgcttctggtcccgcattcttcgcgcttatgctggagtctgccatcgacggagctgtggccatggggttgcctcgggcagaggctcagaagatggctgctcaaaccatgagaggcacggcgagccttgtccagagtggtgaacaccctgcgctggttcgcgagaaggtctgcacacctggtggttgcagtatcggaggaacacttgtccttgaagagggtggtgtacggggaaccatttctaaggctattagagaagcggcatgcgtcgcgagccagcttggacaggggcaccaaggtgtcaacggaacaagaagatagatctagacggacgggggaagcatagagaaagaaacctattggaaagaattagaggaagaaaattaaagtaaacagatatctttcgcggatgataccaattttcattgactaccgatctttgctatttgtcccattttctgcaccaaagacgacgcgtttcagaagttcattccctctcgacttggcgacgcagtaagcgcagatcggcgcaatttcgagccagtcgtgtcgccctaaaccttaagtccttacgtatccggcagaaaagtcagagcgccatgtaggtatcacaaagagtacgccttaaactccgtccagccagtccttagtttacaaaccgtcgccgcctgagaatcatggtctcgatgtgtctttaggcgtcttcgacacgcgccttctttgctggcgttgtgttttctgcctcatcatccagtttcctctttccattcgtcacagatttcttgggctcagctagttcgaggattctggcgtactcccactcgacgttactgacggtctcgttgagtttgatgatgcgctcggtcgtctccatctcggcgaggaccagcacattgcgacggtaaagacgttgcttgaggagcagtctccaaagagagtatgccttctgatcagcctttgggggaggtggtttcattgagccatcgtcgtcctgttccgcttggggtcggaccgaggcagggagtgtcgacatgagatgcatctccacaaggcgccagaactgtctaggagcgatctttgctttgacgcgcatcttctccagcgccgtctgatctacaatgccatctgtggaggcggatgcagagtcgttgagtgagatttgagtgttgttatggaggatgccacctttctcggggatggacatattgctgttgacctttaatgcggcgaactctagtatgttctttcgaaggtacttcaagtcgcatagatctcgaagtaggtcgaaatcctcgttagggtcctctacggtaatctcctttgtagaaggatctgccgtgtacaagtcgaagattgttctgtacaggaaagctccaacgcctttgccctggaaaggaggtaaaatgatgcactgtgatatccttgcgcggcgagggagactggagagcgggagatggccaactgggagctcccaagaatcattagatttgctctcaatgggagcaccgtcctgacgcgggcttgttggcggcgtgggttgttgatagagccagaaatcatagacagtcgagaaaccctcgaatgtgtaatgcgacttgttggcgccctctggcgcttgttccttcttgtagacaaagaatactgaccagcgagcaagcgatgtctcgggctcgtcgcctccgtcagcgtttagcccgatgtacgaacccccttcaataaagagtagaactgtaatctcgatccggcgcaacatctgcttgacagcagtatctgccaaactgcccatccatatctcatgagtctctccgttcttctcaatagacttgatgagttctcccggaggagtccaggtatcgggcacatttgcgagagctgtctcgtattctgatcgggtttgtaatgcaactacagtttgttagcggggttgcaacgattacgcgacacggcattactgaccggcaggcaagaactccttcatgacctccttgacatctacggccttgacctcgccaatggcgctgaacttcttggaagatttgacggagaggttgggtcgtaagttgcgggcatcgtactggaggttgatcttcaggcctttgtagccgaatatttgctcttcttcgccgaagatgggataagtgaacttgggattgaaggactcgagcttgacaatgccattggtggtagggcgtacgagcgaaatggtgatcgcttcgttggcgtcactcgtccctgattcattcatgtcagttctgacctcccacgtgagagacgcttgaacttacattcgtcggccatgctggcgcactgtcgcaaaggcggaaaggtggagtctgagtattgctttctgttgtcaaactgtagttgagatccttagacaatgctagtagtgcgcttgagattgcgcgacaaaagatggctgttctagagttgcaggtcgggtggcctttggcgaagttcacggtggaaagtatgtattcactttacgcgatatcgaaacgtcaggcgcgtcagtggatgctggagttgagttaagtgggaggtgccttttgcggtaaaacgtgagatgcgcgtctagtgcttgccctaaaaggcttagacacctcgttagatgccagattagcctaccta

SEQ ID NO: 23383 - DNA, 1500 bp, Muscodor strobelii
  misc_feature: SGI cDNA ID NO. 567956
  misc_feature: Encodes the peptide sequence at SEQ ID NO 23384
atggccgacgaatggacgagtgacgccaacgaagcgatcaccatttcgctcgtacgccctaccaccaatggcattgtcaagctcgagtccttcaatcccaagttcacttatcccatcttcggcgaagaagagcaaatattcggctacaaaggcctgaagatcaacctccagtacgatgcccgcaacttacgacccaacctctccgtcaaatcttccaagaagttcagcgccattggcgaggtcaaggccgtagatgtcaaggaggtcatgaaggagttcttgcctgccgttgcattacaaacccgatcagaatacgagacagctctcgcaaatgtgcccgatacctggactcctccgggagaactcatcaagtctattgagaagaacggagagactcatgagatatggatgggcagtttggcagatactgctgtcaagcagatgttgcgccggatcgagattacagttctactctttattgaagggggttcgtacatcgggctaaacgctgacggaggcgacgagcccgagacatcgcttgctcgctggtcagtattctttgtctacaagaaggaacaagcgccagagggcgccaacaagtcgcattacacattcgagggtttctcgactgtctatgatttctggctctatcaacaacccacgccgccaacaagcccgcgtcaggacggtgctcccattgagagcaaatctaatgattcttgggagctcccagttggccatctcccgctctccagtctccctcgccgcgcaaggatatcacagtgcatcattttacctcctttccagggcaaaggcgttggagctttcctgtacagaacaatcttcgacttgtacacggcagatccttctacaaaggagattaccgtagaggaccctaacgaggatttcgacctacttcgagatctatgcgacttgaagtaccttcgaaagaacatactagagttcgccgcattaaaggtcaacagcaatatgtccatccccgagaaaggtggcatcctccataacaacactcaaatctcactcaacgactctgcatccgcctccacagatggcattgtagatcagacggcgctggagaagatgcgcgtcaaagcaaagatcgctcctagacagttctggcgccttgtggagatgcatctcatgtcgacactccctgcctcggtccgaccccaagcggaacaggacgacgatggctcaatgaaaccacctcccccaaaggctgatcagaaggcatactctctttggagactgctcctcaagcaacgtctttaccgtcgcaatgtgctggtcctcgccgagatggagacgaccgagcgcatcatcaaactcaacgagaccgtcagtaacgtcgagtgggagtacgccagaatcctcgaactagctgagcccaagaaatctgtgacgaatggaaagaggaaactggatgatgaggcagaaaacacaacgccagcaaagaaggcgcgtgtcgaagacgcctaa

SEQ ID NO: 23384 - protein, 499 aa, Muscodor strobelii
  misc_feature: SGI Peptide ID NO. 567956
  misc_feature (6)..(499): NCBI GI: 261360155 Blast Desc: histone acetyltransferase type B catalytic subunit [Verticillium albo-atrum VaMs.102]
  misc_feature (4)..(498): NCBI GI: 116192019 Blast Desc: CHGG_05727 [Chaetomium globosum CBS 148.51] gi|88181640|gb|EAQ89108.1| CHGG_05727 [Chaetomium globosum CBS 148.51]
  misc_feature (7)..(499): NCBI GI: 256733235 Blast Desc: NECHADRAFT_122506 [Nectria haematococca mpVI 77-13-4]
  misc_feature (2)..(499): NCBI GI: 39976945 Blast Desc: MGG_06375 [Magnaporthe grisea 70-15] gi|145016217|gb|EDK00707.1| MGG_06375 [Magnaporthe grisea 70-15]
  misc_feature (7)..(499): NCBI GI: 46125753 Blast Desc: FG07254.1 [Gibberella zeae PH-1] gi|90101339|sp|Q4I6A4.1|HAT1_GIBZE RecName: Full=Histone acetyltransferase type B catalytic subunit
  misc_feature (1)..(480): NCBI GI: 156044881 Blast Desc: SS1G_09629 [Sclerotinia sclerotiorum 1980] gi|154694024|gb|EDN93762.1| SS1G_09629 [Sclerotinia sclerotiorum 1980]
  misc_feature (4)..(464): NCBI GI: 154318920 Blast Desc: BC1G_02849 [Botryotinia fuckeliana B05.10] gi|150857979|gb|EDN33171.1| BC1G_02849 [Botryotinia fuckeliana B05.10]
  misc_feature (3)..(497): NCBI GI: 85084687 Blast Desc: NCU06472 [Neurospora crassa OR74A] gi|74614181|sp|Q7RYU8.1|HAT1_NEUCR RecName: Full=Histone acetyltransferase type B catalytic subunit NCU06472 [Neurospora
  misc_feature (1)..(472): NCBI GI: 212537197 Blast Desc: histone acetyltransferase type b catalytic subunit, [Penicillium marneffei ATCC 18224] gi|210068496|gb|EEA22587.1| histone acetyltransferase type b catalytic subunit, [Penicillium
  misc_feature (1)..(472): NCBI GI: 242809932 Blast Desc: histone acetyltransferase type b catalytic subunit, [Talaromyces stipitatus ATCC 10500] gi|218716102|gb|EED15524.1| histone acetyltransferase type b catalytic subunit, [Talaromyces
  misc_feature (7)..(499): SWISSPROT Homolog: EC 2.3.1.48 Histone acetyltransferase
MADEWTSDANEAITISLVRPTTNGIVKLESFNPKFTYPIFGEEEQIFGYKGLKINLQYDARNLRPNLSVKSSKKFSAIGEVKAVDVKEVMKEFLPAVALQTRSEYETALANVPDTWTPPGELIKSIEKNGETHEIWMGSLADTAVKQMLRRIEITVLLFIEGGSYIGLNADGGDEPETSLARWSVFFVYKKEQAPEGANKSHYTFEGFSTVYDFWLYQQPTPPTSPRQDGAPIESKSNDSWELPVGHLPLSSLPRRARISQCIILPPFQGKGVGAFLYRTIFDLYTADPSTKEITVEDPNEDFDLLRDLCDLKYLRKNILEFAALKVNSNMSIPEKGGILHNNTQISLNDSASASTDGIVDQTALEKMRVKAKIAPRQFWRLVEMHLMSTLPASVRPQAEQDDDGSMKPPPPKADQKAYSLWRLLLKQRLYRRNVLVLAEMETTERIIKLNETVSNVEWEYARILELAEPKKSVTNGKRKLDDEAENTTPAKKARVEDA

SEQ ID NO: 23385 - DNA, 6589 bp, Muscodor strobelii; identical to SEQ ID NO: 23379
  misc_feature: SGI EST ID NO. CUFF.55126.1
  misc_feature: Variant of the nucleotide sequence at SEQ ID NO 23383

SEQ ID NO: 23386 - DNA, 1500 bp, Muscodor strobelii
  misc_feature: SGI cDNA ID NO. 567957
  misc_feature: Encodes the peptide sequence at SEQ ID NO 23387
atgaatgaatcagggacgagtgacgccaacgaagcgatcaccatttcgctcgtacgccctaccaccaatggcattgtcaagctcgagtccttcaatcccaagttcacttatcccatcttcggcgaagaagagcaaatattcggctacaaaggcctgaagatcaacctccagtacgatgcccgcaacttacgacccaacctctccgtcaaatcttccaagaagttcagcgccattggcgaggtcaaggccgtagatgtcaaggaggtcatgaaggagttcttgcctgccgttgcattacaaacccgatcagaatacgagacagctctcgcaaatgtgcccgatacctggactcctccgggagaactcatcaagtctattgagaagaacggagagactcatgagatatggatgggcagtttggcagatactgctgtcaagcagatgttgcgccggatcgagattacagttctactctttattgaagggggttcgtacatcgggctaaacgctgacggaggcgacgagcccgagacatcgcttgctcgctggtcagtattctttgtctacaagaaggaacaagcgccagagggcgccaacaagtcgcattacacattcgagggtttctcgactgtctatgatttctggctctatcaacaacccacgccgccaacaagcccgcgtcaggacggtgctcccattgagagcaaatctaatgattcttgggagctcccagttggccatctcccgctctccagtctccctcgccgcgcaaggatatcacagtgcatcattttacctcctttccagggcaaaggcgttggagctttcctgtacagaacaatcttcgacttgtacacggcagatccttctacaaaggagattaccgtagaggaccctaacgaggatttcgacctacttcgagatctatgcgacttgaagtaccttcgaaagaacatactagagttcgccgcattaaaggtcaacagcaatatgtccatccccgagaaaggtggcatcctccataacaacactcaaatctcactcaacgactctgcatccgcctccacagatggcattgtagatcagacggcgctggagaagatgcgcgtcaaagcaaagatcgctcctagacagttctggcgccttgtggagatgcatctcatgtcgacactccctgcctcggtccgaccccaagcggaacaggacgacgatggctcaatgaaaccacctcccccaaaggctgatcagaaggcatactctctttggagactgctcctcaagcaacgtctttaccgtcgcaatgtgctggtcctcgccgagatggagacgaccgagcgcatcatcaaactcaacgagaccgtcagtaacgtcgagtgggagtacgccagaatcctcgaactagctgagcccaagaaatctgtgacgaatggaaagaggaaactggatgatgaggcagaaaacacaacgccagcaaagaaggcgcgtgtcgaagacgcctaa

SEQ ID NO: 23387 - protein, 499 aa, Muscodor strobelii
  misc_feature: SGI Peptide ID NO. 567957
  misc_feature (2)..(499): NCBI GI: 261360155 Blast Desc: histone acetyltransferase type B catalytic subunit [Verticillium albo-atrum VaMs.102]
  misc_feature (5)..(499): NCBI GI: 256733235 Blast Desc: NECHADRAFT_122506 [Nectria haematococca mpVI 77-13-4]
  misc_feature (6)..(498): NCBI GI: 116192019 Blast Desc: CHGG_05727 [Chaetomium globosum CBS 148.51] gi|88181640|gb|EAQ89108.1| CHGG_05727 [Chaetomium globosum CBS 148.51]
  misc_feature (8)..(499): NCBI GI: 39976945 Blast Desc: MGG_06375 [Magnaporthe grisea 70-15] gi|145016217|gb|EDK00707.1| MGG_06375 [Magnaporthe grisea 70-15]
  misc_feature (5)..(499): NCBI GI: 46125753 Blast Desc: FG07254.1 [Gibberella zeae PH-1] gi|90101339|sp|Q4I6A4.1|HAT1_GIBZE RecName: Full=Histone acetyltransferase type B catalytic subunit
  misc_feature (1)..(480): NCBI GI: 156044881 Blast Desc: SS1G_09629 [Sclerotinia sclerotiorum 1980] gi|154694024|gb|EDN93762.1| SS1G_09629 [Sclerotinia sclerotiorum 1980]
  misc_feature (6)..(464): NCBI GI: 154318920 Blast Desc: BC1G_02849 [Botryotinia fuckeliana B05.10] gi|150857979|gb|EDN33171.1| BC1G_02849 [Botryotinia fuckeliana B05.10]
  misc_feature (7)..(497): NCBI GI: 85084687 Blast Desc: NCU06472 [Neurospora crassa OR74A] gi|74614181|sp|Q7RYU8.1|HAT1_NEUCR RecName: Full=Histone acetyltransferase type B catalytic subunit NCU06472 [Neurospora
  misc_feature (1)..(472): NCBI GI: 212537197 Blast Desc: histone acetyltransferase type b catalytic subunit, [Penicillium marneffei ATCC 18224] gi|210068496|gb|EEA22587.1| histone acetyltransferase type b catalytic subunit, [Penicillium
  misc_feature (63)..(496): NCBI GI: 171686854 Blast Desc: protein product [Podospora anserina] gi|170943388|emb|CAP69041.1| protein product [Podospora anserina]
  misc_feature (5)..(499): SWISSPROT Homolog: EC 2.3.1.48 Histone acetyltransferase
MNESGTSDANEAITISLVRPTTNGIVKLESFNPKFTYPIFGEEEQIFGYKGLKINLQYDARNLRPNLSVKSSKKFSAIGEVKAVDVKEVMKEFLPAVALQTRSEYETALANVPDTWTPPGELIKSIEKNGETHEIWMGSLADTAVKQMLRRIEITVLLFIEGGSYIGLNADGGDEPETSLARWSVFFVYKKEQAPEGANKSHYTFEGFSTVYDFWLYQQPTPPTSPRQDGAPIESKSNDSWELPVGHLPLSSLPRRARISQCIILPPFQGKGVGAFLYRTIFDLYTADPSTKEITVEDPNEDFDLLRDLCDLKYLRKNILEFAALKVNSNMSIPEKGGILHNNTQISLNDSASASTDGIVDQTALEKMRVKAKIAPRQFWRLVEMHLMSTLPASVRPQAEQDDDGSMKPPPPKADQKAYSLWRLLLKQRLYRRNVLVLAEMETTERIIKLNETVSNVEWEYARILELAEPKKSVTNGKRKLDDEAENTTPAKKARVEDA

SEQ ID NO: 23388 - DNA, 6589 bp, Muscodor strobelii; identical to SEQ ID NO: 23379
  misc_feature: SGI EST ID NO. CUFF.55126.1
  misc_feature: Variant of the nucleotide sequence at SEQ ID NO 23386

SEQ ID NO: 23389 - DNA, 1833 bp, Muscodor strobelii
  misc_feature: SGI cDNA ID NO. 567958
  misc_feature: Encodes the peptide sequence at SEQ ID NO 23390
atggctggcgccggcctcttcttgttgctggccttgacggcagtcatggcattggcttcatttttggctggcgcattacccctgtcaatgtcactgacagctgcccaacttcgattgatatccagcataggtgttggaattctagtcgggacgtctttaattgtcatcatacccgagggaatagaagctgtagtggaggcttcaaccacgatacatcatgccgataccaccagtaacaaggccgcagttcggtgggccgagggtgctgaactcccacgcgatcagctcgcgtggaacaaaaacactcagaaatatgaacctatctcctttgacgaagctttgggacatgtgcctcgtggtggacttgaatggaacaaggacacccagaaatacgagcccatcaccttgaaggaagctcttgaactgggatctcgtcctgaagagcgcgcattggacgatgtagtcatggctcgaactccaaagaacacgtttcaccctcacctcggctggaacgaagattctcagagatacgagcccatctctttggaagacgctctgaatttggcatcgcgcatggaaaaacgtgaattggacgagacgcttattgcgcgaatgccaaagaacacgtttcgtccagttagttggaatgaggatacacagaaatatgagccgatttcgttgaagaaagcactggatctggtatcgcggacgcctaaggatacaatccaccctcttaattggaacaaggagacacaaaaatacgaacccatctccttggaagaagctctgaaactggtttcacgccacgagcaacttacatgggacgaaaatgcgcaaaaatactcaccagtcgcactggaagaagctccggaacttatatcaggggtggagaggcgcaaggacgggcgtcaggatcaagtcggctggaacaaacataaccagaaatatgaaccaatctctttggaggaggcgatgaaactgggatcgcgtacggagcaagatgaagtatatatcttgcgcgcacgaaagccagaggatggcccaaaggcgcctgaagacacaaagccacctacgaaaggaagcgagacggaattccatacattctacattgggttatctttagttctcgggttcattctcatgttcctcgtggatcggttgccccggcatatgtcggagaatctacagacccctccgccgccgagacacatcagtctcagtaatctaggtgcttcttcactggtcaatgacgaggaagaatcggaaggattcttaggctcgctcacgcccacccccaagcaatctcgcagtctggcgacgacaacaggattagtcatacacgctgctgcggatggcattgctatgggtgcatctgtctcttcgcctgataagaagctgggcttcatcgttttcattgcgatcatggtccacaaagcgcctgcggctttcggtctcacatcgatcttgttgaagcaggggttatctaagcgcgccgcgagaggccatctcatcgtgttcagccttgcctcgccattcggtgcatggctgacgtttattctcgtcagttttctcggtggcggggctcaggggcaatttagccaatggtggactggaatgctacttctcttctcggcaggaaccttcctgtatgttgcaatgcatgcgatgcaagatacagagtctgcgtcaggccacgatgttggttccggtttgaatggatacgccgagcaaaatggcataaggaaacacggtcaccctcaaatcaaggaaacagtcgccacgatgatcggcatgctgttgccgctgctaacacagtttggccaccatcactga

SEQ ID NO: 23390 - protein, 610 aa, Muscodor strobelii
  misc_feature: SGI Peptide ID NO. 567958
  misc_feature (6)..(605): Pfam Id: PF02535 Pfam Desc: ZIP Zinc transporter
  misc_feature (361)..(605): Pfam Id: PF02535 Pfam Desc: ZIP Zinc transporter
  misc_feature (327)..(610): NCBI GI: 154318922 Blast Desc: BC1G_02850 [Botryotinia fuckeliana B05.10] gi|150857980|gb|EDN33172.1| BC1G_02850 [Botryotinia fuckeliana B05.10]
  misc_feature (326)..(610): NCBI GI: 156044879 Blast Desc: SS1G_09628 [Sclerotinia sclerotiorum 1980] gi|154694023|gb|EDN93761.1| SS1G_09628 [Sclerotinia sclerotiorum 1980]
  misc_feature (336)..(610): NCBI GI: 39976943 Blast Desc: MGG_06374 [Magnaporthe grisea 70-15] gi|145016218|gb|EDK00708.1| MGG_06374 [Magnaporthe grisea 70-15]
  misc_feature (219)..(610): NCBI GI: 46122157 Blast Desc: FG05456.1 [Gibberella zeae PH-1]
  misc_feature (367)..(610): NCBI GI: 256729729 Blast Desc: [Nectria haematococca mpVI 77-13-4]
  misc_feature (368)..(610): NCBI GI: 261360156 Blast Desc: zinc transporter SLC39A9 [Verticillium albo-atrum VaMs.102]
  misc_feature (300)..(558): NCBI GI: 164425082 Blast Desc: NCU06473 [Neurospora crassa OR74A] gi|157070782|gb|EAA28128.2| conserved [Neurospora crassa OR74A]
  misc_feature (345)..(610): NCBI GI: 171686856 Blast Desc: protein product [Podospora anserina] gi|170943389|emb|CAP69042.1| protein product [Podospora anserina]
  misc_feature (342)..(610): NCBI GI: 169774853 Blast Desc: [Aspergillus oryzae RIB40] gi|238496535|ref|XP_002379503.1| ZIP metal ion transporter, [Aspergillus flavus NRRL3357] gi|83769757|dbj|BAE59892.1| protein
  misc_feature (332)..(610): NCBI GI: 71001712 Blast Desc: ZIP metal ion transporter [Aspergillus fumigatus Af293] gi|66853175|gb|EAL93499.1| ZIP metal ion transporter, [Aspergillus fumigatus Af293] gi|159129601|gb|EDP54715.1| ZIP ion
MAGAGLFLLLALTAVMALASFLAGALPLSMSLTAAQLRLISSIGVGILVGTSLIVIIPEGIEAVVEASTTIHHADTTSNKAAVRWAEGAELPRDQLAWNKNTQKYEPISFDEALGHVPRGGLEWNKDTQKYEPITLKEALELGSRPEERALDDVVMARTPKNTFHPHLGWNEDSQRYEPISLEDALNLASRMEKRELDETLIARMPKNTFRPVSWNEDTQKYEPISLKKALDLVSRTPKDTIHPLNWNKETQKYEPISLEEALKLVSRHEQLTWDENAQKYSPVALEEAPELISGVERRKDGRQDQVGWNKHNQKYEPISLEEAMKLGSRTEQDEVYILRARKPEDGPKAPEDTKPPTKGSETEFHTFYIGLSLVLGFILMFLVDRLPRHMSENLQTPPPPRHISLSNLGASSLVNDEEESEGFLGSLTPTPKQSRSLATTTGLVIHAAADGIAMGASVSSPDKKLGFIVFIAIMVHKAPAAFGLTSILLKQGLSKRAARGHLIVFSLASPFGAWLTFILVSFLGGGAQGQFSQWWTGMLLLFSAGTFLYVAMHAMQDTESASGHDVGSGLNGYAEQNGIRKHGHPQIKETVATMIGMLLPLLTQFGHHH

SEQ ID NO: 23391 - DNA, 2361 bp, Muscodor strobelii
  misc_feature: SGI EST ID NO. CUFF.55197.0
  misc_feature: Variant of the nucleotide sequence at SEQ ID NO 23389
cttctcgccaaccacgtccgatttagccaacttatcgcaccacctccaacgtcgagctacatcgccaatcccaatcgcccgcccttgcggtgctttagtttcctgtattttctttctagtctgtacaaatgtctcggtaaagagaagctatctgtgtgaccgatcgacagcaatcagtcatggctggcgccggcctcttcttgttgctggccttgacggcagtcatggcattggcttcatttttggctggcgcattacccctgtcaatgtcactgacagctgcccaacttcgattgatatccagcataggtgttggaattctagtcgggacgtctttaattgtcatcatacccgagggaatagaagctgtagtggaggcttcaaccacgatacatcatgccgataccaccagtaacaaggccgcagttcggtgggccgagggtgctgaactcccacgcgatcagctcgcgtggaacaaaaacactcagaaatatgaacctatctcctttgacgaagctttgggacatgtgcctcgtggtggacttgaatggaacaaggacacccagaaatacgagcccatcaccttgaaggaagctcttgaactgggatctcgtcctgaagagcgcgcattggacgatgtagtcatggctcgaactccaaagaacacgtttcaccctcacctcggctggaacgaagattctcagagatacgagcccatctctttggaagacgctctgaatttggcatcgcgcatggaaaaacgtgaattggacgagacgcttattgcgcgaatgccaaagaacacgtttcgtccagttagttggaatgaggatacacagaaatatgagccgatttcgttgaagaaagcactggatctggtatcgcggacgcctaaggatacaatccaccctcttaattggaacaaggagacacaaaaatacgaacccatctccttggaagaagctctgaaactggtttcacgccacgagcaacttacatgggacgaaaatgcgcaaaaatactcaccagtcgcactggaagaagctccggaacttatatcaggggtggagaggcgcaaggacgggcgtcaggatcaagtcggctggaacaaacataaccagaaatatgaaccaatctctttggaggaggcgatgaaactgggatcgcgtacggagcaagatgaagtatatatcttgcgcgcacgaaagccagaggatggcccaaaggcgcctgaagacacaaagccacctacgaaaggaagcgagacggaattccatacattctacattgggttatctttagttctcgggttcattctcatgttcctcgtggatcggttgccccggcatatgtcggagaatctacagacccctccgccgccgagacacatcagtctcagtaatctaggtgcttcttcactggtcaatgacgaggaagaatcggaaggattcttaggctcgctcacgcccacccccaagcaatctcgcagtctggcgacgacaacaggattagtcatacacgctgctgcggatggcattgctatgggtgcatctgtctcttcgcctgataagaagctgggcttcatcgttttcattgcgatcatggtccacaaagcgcctgcggctttcggtctcacatcgatcttgttgaagcaggggttatctaagcgcgccgcgagaggccatctcatcgtgttcagccttgcctcgccattcggtgcatggctgacgtttattctcgtcagttttctcggtggcggggctcaggggcaatttagccaatggtggactggaatgctacttctcttctcggcaggaaccttcctgtatgttgcaatgcatgcgatgcaagatacagagtctgcgtcaggccacgatgttggttccggtttgaatggatacgccgagcaaaatggcataaggaaacacggtcaccctcaaatcaaggaaacagtcgccacgatgatcggcatgctgttgccgctgctaacacagtttggccaccatcactgatcaccatatcaaacacaagccggtaccggccatgatataattgtatagatcgaagggaaagggttcttgaaacccatgttaaaacctgtaaaaaatcacgttcatcatgctacaaatttcacgaatgcatgctggcacatatcgcggtcatgaggtcaaaaggagcgaatcttgtcagtattataaaagctctctgttttcgccggctatggaaacggataattatccgtaccaatagggtcacgctgagttgaagccggacctaaaatggagctacatgtaccttatagaaagaaatgatctgaccatttaaactgaatagctataccaaattccaaagtaatcaaac

SEQ ID NO: 23392 - DNA, 1035 bp, Muscodor strobelii
  misc_feature: SGI cDNA ID NO. 567959
  misc_feature: Encodes the peptide sequence at SEQ ID NO 23393
atgaccaaaatcttaatattcgggacggggagcttgggcacagtctatgttagtactatacctataaatatcagggaaacgaaccttggtattgagatcgcctgggtattctcgaaagcaatccccgagtcagacatcacggcgatctgtagatcgaactacgatgccgcgtcgaaagatggcttcacagtgaactcgtcgatttggggcaagggactacgcgccagacctcgggttgtgcgttctgtggacgaggctgtgaagaatggagatgtgtttgattatatcgttgtcacggcgaaggccttgcctgcaaagccttcggtcgtggagttaattaaacatgcagttacgccgggagaaacgagcgtggtgcttatgcagaacggcattggaatcgaagaggagtatgttaagatttttgagggcgatgtgccgatgtacgtgacgaatcatttttctcttcttctagaacacggcgagatcgagcatctgcacgtcggaacctacccatccaacgcgccggagacacacaaagactctgcaaaagcgtttgtaaacctcctcgatatcgcaggtgcctcagccactctccacgacgacgtccaggccgagcgatggaagaagttagtcgtcaacgcgtcatggaatcctatatgtgcgctcacgcggctgcacgatgtgcagttcatagaatctggatcggaagagaaggagaataaggaaagacaaactacaaagtttatccgtgatgtcatgacagaggttgcgagtatcgcacaagcttgcggatattctgatattggggaggaattggtggatttccagctcaacagggcgttgaagagatctttacctggggtccggccctccatgcttggcgatgctcttgatagtcgggaactggaggttgatgctattgtgggtaatgctgtgaagattgcaaaggagaagggggtggatgtaccgctgctgagagctatattcttccttgctcaggggttaagcgcgagtttctctcttaagcgtgcttag

SEQ ID NO: 23393 - protein, 344 aa, Muscodor strobelii
  misc_feature: SGI Peptide ID NO. 567959
  misc_feature (4)..(176): Pfam Id: PF02558 Pfam Desc: Ketopantoate reductase PanE/ApbA
  misc_feature (201)..(336): Pfam Id: PF08546 Pfam Desc: Ketopantoate reductase PanE/ApbA C terminal
  misc_feature (45)..(176): Pfam Id: PF02558 Pfam Desc: Ketopantoate reductase PanE/ApbA
  misc_feature (243)..(336): Pfam Id: PF08546 Pfam Desc: Ketopantoate reductase PanE/ApbA C terminal
  misc_feature (201)..(225): Pfam Id: PF08546 Pfam Desc: Ketopantoate reductase PanE/ApbA C terminal
  misc_feature (4)..(320): NCBI GI: 256720855 Blast Desc: NECHADRAFT_85578 [Nectria haematococca mpVI 77-13-4]
  misc_feature (3)..(335): NCBI GI: 189192294 Blast Desc: 2-dehydropantoate 2-reductase [Pyrenophora tritici-repentis Pt-1C-BFP] gi|187974092|gb|EDU41591.1| 2-dehydropantoate 2-reductase [Pyrenophora tritici-repentis
  misc_feature (3)..(335): NCBI GI: 169599903 Blast Desc: SNOG_02778 [Phaeosphaeria nodorum SN15] gi|160705345|gb|EAT89509.2| SNOG_02778 [Phaeosphaeria nodorum SN15]
  misc_feature (4)..(342): NCBI GI: 159125630 Blast Desc: 2-dehydropantoate 2-reductase [Aspergillus fumigatus A1163]
  misc_feature (4)..(334): NCBI GI: 119499790 Blast Desc: 2-dehydropantoate 2-reductase [Neosartorya fischeri NRRL 181] gi|119414817|gb|EAW24755.1| 2-dehydropantoate 2-reductase [Neosartorya fischeri NRRL 181]
  misc_feature (4)..(342): NCBI GI: 70993178 Blast Desc: 2-dehydropantoate 2-reductase [Aspergillus fumigatus Af293] gi|66849070|gb|EAL89398.1| 2-dehydropantoate 2-reductase [Aspergillus fumigatus Af293]
  misc_feature (1)..(342): NCBI GI: 256721483 Blast Desc: NECHADRAFT_55090 [Nectria haematococca mpVI 77-13-4]
  misc_feature (4)..(334): NCBI GI: 121708774 Blast Desc: 2-dehydropantoate 2-reductase [Aspergillus clavatus NRRL 1] gi|119400392|gb|EAW10818.1| 2-dehydropantoate 2-reductase [Aspergillus clavatus NRRL 1]
  misc_feature (4)..(334): NCBI GI: 145241570 Blast Desc: An09g01130 [Aspergillus niger] gi|134077970|emb|CAK49035.1| protein product [Aspergillus niger]
  misc_feature (4)..(334): NCBI GI: 115398658 Blast Desc: conserved [Aspergillus terreus NIH2624] gi|114191801|gb|EAU33501.1| conserved [Aspergillus terreus NIH2624]
  misc_feature (3)..(329): SWISSPROT Homolog: EC 1.1.1.169 2-dehydropantoate 2-reductase
MTKILIFGTGSLGTVYVSTIPINIRETNLGIEIAWVFSKAIPESDITAICRSNYDAASKDGFTVNSSIWGKGLRARPRVVRSVDEAVKNGDVFDYIVVTAKALPAKPSVVELIKHAVTPGETSVVLMQNGIGIEEEYVKIFEGDVPMYVTNHFSLLLEHGEIEHLHVGTYPSNAPETHKDSAKAFVNLLDIAGASATLHDDVQAERWKKLVVNASWNPICALTRLHDVQFIESGSEEKENKERQTTKFIRDVMTEVASIAQACGYSDIGEELVDFQLNRALKRSLPGVRPSMLGDALDSRELEVDAIVGNAVKIAKEKGVDVPLLRAIFFLAQGLSASFSLKRA

SEQ ID NO: 23394 - DNA, 552 bp, Muscodor strobelii
  misc_feature: SGI cDNA ID NO. 567960
  misc_feature: Reduced expression when VOC is produced
  misc_feature: Encodes the peptide sequence at SEQ ID NO 23395
atgtcaatcccctgcagatacgcagcccggagctgcgcgcgaacgctccggtcgcccagcgccttccgagtcgccacacctttcatccagagtgctgctcccgtccagagacggcatgcctccaccgacgccgacgccgtcgcaaaccccaaaatcgccgccatcgtcgaccagatcagccaattgaccctgttggagactgccgacctcgtctctagcctaaagtccaaactcaacatcccggatctgccagtgggtggttttgctgcagctgcgccagctgcagcccctgccgccgccgaagaggccgatgaacccgcacccgccgcccaggagaagacgctgttcaaccttaagctgaccgctttcgacgccggcgccaaggccaagattatcaaggaggtcaagaacttgttgggcctgagtttagtcgacagcaagaagttcgtcgagagtgctcccaagatgatgaaggaatccgtacccaaggacgaggccgagaagatcgttgctaccatgaaggatttgggcgctaccgtcactatggattaa

SEQ ID NO: 23395 - protein, 183 aa, Muscodor strobelii
  misc_feature: SGI Peptide ID NO. 567960
  misc_feature (116)..(183): Pfam Id: PF00542 Pfam Desc: Ribosomal protein L7/L12 C-terminal domain
  misc_feature (1)..(183): NCBI GI: 171686864 Blast Desc: protein product [Podospora anserina] gi|170943393|emb|CAP69046.1| protein product [Podospora anserina]
  misc_feature (1)..(183): NCBI GI: 39976951 Blast Desc: MGG_06378 [Magnaporthe grisea 70-15] gi|145016214|gb|EDK00704.1| MGG_06378 [Magnaporthe grisea 70-15]
  misc_feature (3)..(183): NCBI GI: 261360153 Blast Desc: 54S ribosomal protein L12 [Verticillium albo-atrum VaMs.102]
  misc_feature (1)..(183): NCBI GI: 46125759 Blast Desc: FG07257.1 [Gibberella zeae PH-1]
  misc_feature (1)..(183): NCBI GI: 154303406 Blast Desc: BC1G_09274 [Botryotinia fuckeliana B05.10] gi|150854585|gb|EDN29777.1| BC1G_09274 [Botryotinia fuckeliana B05.10]
  misc_feature (1)..(183): NCBI GI: 256732789 Blast Desc: NECHADRAFT_73620 [Nectria haematococca mpVI 77-13-4]
  misc_feature (1)..(183): NCBI GI: 119196141 Blast Desc: CIMG_02445 [Coccidioides immitis RS] gi|240110648|gb|EER28806.1| 54S ribosomal protein L12, mitochondrial precursor, [Coccidioides posadasii C735 delta
  misc_feature (1)..(183): NCBI GI: 85084674 Blast Desc: NCU06469 [Neurospora crassa OR74A] gi|28918450|gb|EAA28124.1| [Neurospora crassa OR74A]
  misc_feature (1)..(183): NCBI GI: 70994008 Blast Desc: 50S ribosomal protein L12 [Aspergillus fumigatus Af293] gi|66849485|gb|EAL89813.1| 50S ribosomal protein L12 [Aspergillus fumigatus Af293] gi|159125231|gb|EDP50348.1| 50S L12
  misc_feature (1)..(183): NCBI GI: 258569893 Blast Desc: UREG_03267 [Uncinocarpus reesii 1704] gi|237904020|gb|EEP78421.1| UREG_03267 [Uncinocarpus reesii 1704]
  misc_feature: Useful for introducing or modulating the production of volatile compounds
MSIPCRYAARSCARTLRSPSAFRVATPFIQSAAPVQRRHASTDADAVANPKIAAIVDQISQLTLLETADLVSSLKSKLNIPDLPVGGFAAAAPAAAPAAAEEADEPAPAAQEKTLFNLKLTAFDAGAKAKIIKEVKNLLGLSLVDSKKFVESAPKMMKESVPKDEAEKIVATMKDLGATVTMD

SEQ ID NO: 23396 - DNA, 1583 bp, Muscodor strobelii
  misc_feature: SGI EST ID NO. CUFF.55050.0
  misc_feature: Variant of the nucleotide sequence at SEQ ID NO 23394
gctgttggtacgacacgacaaaattctggaagattgtcacgagctcgcgatctccaagccatccaccctcaacgccagccctccgccatctcaactcctcctccgtttctgcatttccacagccatgtcaatcccctgcagatacgcagcccggagctgcgcgcgaacgctccggtcgcccagcgccttccgagtcgccacacctttcatccagagtgctgctcccgtccagagacggcatgcctccaccgacgccgacgccgtcgcaaaccccaaaatcgccgccatcgtcgaccagatcagccaattgaccctgttggagactgccgacctcgtctctagcctaaagtccaaactcaacatcccggatctgccagtgggtggttttgctgcagctgcgccagctgcagcccctgccgccgccgaagaggccgatgaacccgcacccgccgcccaggagaagacgctgttcaaccttaagctgaccgctttcgacgccggcgccaaggccaagattatcaaggaggtcaagaacttgttgggcctgagtttagtcgacagcaagaagttcgtcgagagtgctcccaagatgatgaaggaatccgtacccaaggacgaggccgagaagatcgttgctaccatgaaggatttgggcgctaccgtcactatggattaaacttctacaccattctcgcctgtttcctacgagatacacgatatgtatcatatactattgctgtacaagcacgacgatagaacatcccgggactagagatgagagaaaagatccccatgtatacatgtaacttatctgtataacaaatctggacaaaagataaatcatgccgtttgttgcggccatacataccacttctgttcgctcttgtaacttaggtgccctctgccaacggaaacaatagttgagatgtatataatctctaatttccgagtcccttcaagaaactctaagcacgcttaagagagaaactcgcgcttaacccctgagcaaggaagaatatagctctcagcagcggtacatccacccccttctcctttgcaatcttcacagcattacccacaatagcatcaacctccagttcccgactatcaagagcatcgccaagcatggagggccggaccccaggtaaagatctcttcaacgccctgttgagctggaaatccaccaattcctccccaatatcagaatatccgcaagcttgtgcgatactcgcaacctctgtcatgacatcacggataaactttgtagtttgtctttccttattctccttctcttccgatccagattctatgaactgcacatcgtgcagccgcgtgagcgcacatataggattccatgacgcgttgacgactaacttcttccatcgctcggcctggacgtcgtcgtggagagtggctgaggcacctgcgatatcgaggaggtttacaaacgcttttgcagagtctttgtgtgtctccggcgcgttggatgggtaggttccgacgtgcagatgctcgatctcgccgtgttctactacagctggggaggtctgcgtggctggtaggtagacgactgtactgatgct

SEQ ID NO: 23397 - DNA, 14814 bp, Muscodor strobelii
  misc_feature: SGI cDNA ID NO. 567961
  misc_feature: Encodes the peptide sequence at SEQ ID NO 23398
atggcctccttcgtcgatctgagcttgcagagggcacagatactcgacgatgcgtcggtattggcccagttgccccctgatttgctgctgcttattcgcgaccacactaccgcgagtttcctcgatgccctcgcagctgcagcactaataccacaggtcacgaactcgattttcatatatttcgagcatgtctttgccgatatctgtgcccgttggctgcgtcgatctcggcagtatggccaagaggatcccattatcgctgcattcgcgagaatcctaccatttgctccccatctctcggtgtacttaaatcagtatataagtcaaacatcagcggcgcatactcacctgccacgccctttttcgctcacttcatttaatgcgcctaacacatctcactcttctgaaacaggtctcttaacagcacttcttgccttttggagacttttaaatttcgacaagactacctatgcccgcctggtccgcccctcccaggttcaagccctgttcgcacatgattcgcttcgtgtgagatacctcgctatcaaagtgttctgccgccacatgagttcttcggatctcaaagaggaagaactcatccagaaacacgtgaaccatgcatctgctccctcaacagtgctgcaaggcgacttcgatggagcgatagtcgactatgccttcctttcattgttcgagcataaacgagctacgggtatggacgaactacgcaggaaatcacaggcactgagtgcaaaaagacctcttacaagtgaacttccccttcaacagttgacgcctctagtgattcaatatggcaatgtcgtttttcctcggccgaatggtgcgcctgcgtctcaaacggtcttgatacacacccccacaacgctcgctaacctggagcggctcgcacggaaccttcagtatcctggacctatacttcttcaaggcttaccgggttctgggaaaacttcagctgtgtatgaacttgcccgtgaacttggcatggagtctagcatggtgacgctccatctcaatgaacaaactgacgccaagatgctcgtcggattatactccacggactccaaacctggttcgttctcctggcggccgggtgtcttgacgaccgctatacgtgaaggccgatgggttttgattgaagatttggatcgagctccaaacgaagtcatgagcatgttactgccacttgttgagcatggaaaattattaatacctagtagaggagagacgattgaggcttcaggcactttccgactatttgccacgatgcggacgacaaggggaatgcatggtcaagaacatgtacccagcttcctaggtcaaagattttggcatttgtcgagtatagcaatgccgtcatacgccgaattagaacagattgtcgttgggagttatcccttattacgtcaatacactgctatcataatgtctgtttacaagcgtctatgtgctgcccccaacggttcatccatgaccggctcgcggcggaatactacagaccgtcccatcacaccccgggatctcttgaaatggtgccgccgacttagagatatactcgttgcggcaggctgcaagacgggcgaagagccgatcagcgatacgatacataattggatgttcatggaagcgaccgactgcttttgcggtagcatcgccaaccaggacatcagggtcttattagcaggctgtgtcgcggaagagatgcacttgccgaagcaactactggagcactatctcagtgctcatgttccgcacttggaagacagcgctggcaacctcagagtcggaagagtcatgttatcaaagaatcgccacgctaatagaatagcaaagtcaagaagaccgtttgcaagcaccagtcatgcgaaaaggctgctcgagcagattgcggtggctgtcaagttgcgagagcctgttttactcgttggcgaaacaggtattggcaagactacagtagttcaacagctagccgaaacccttggtcacaagctcgttgctgtcaatttatctcagcaaagtgaagtgggtgatcttttaggtggcttcaagcctgtcaatgcccgcagtcttgccgttcccctcaaagaggaattcgaagacttgtttgccgctacgggcatatcggcagccaaaaaccagaagtatctcgagctgataggcaaatgtactgctaaagggcaatggtcaagagtattgaagctgtggcgggaagccatcaagatgttccatgctatagttgaagagcgtcgagccaggattgagcgcgaaaatggagggtctgacgaacgaccggctatcaagaggcggaagaccgaatccaaactccaatcgctgcttgacttgcggccccgatgggactcgtttgcaaaaagtttggaccaattcgacattcaaatatctggtggctctgggaatttcgcctttgctttcgtcgaggggaacattgtcaaagctgcaagaaatggagattgggttcttcttgatgaaatcaatcttgcgtcgccagatactcttgagagcatagccgatttgctcgcgtccggaccgaacgatgaaccgtctatactcttgtctgaaaccggcgagatagaacgtgtcaaagcccatccggacttccgcatattcggcgccatgaacccagctacagacgttggcaaacgagatctcccactcggactcaggtctcgcttcacagaactttatgttgggagccctgacagggatctcaaagaccttctcacaataatcaaggcttatttgcgcggcaagagcgctaaagatgaccaggcagccgatgacatcgcccggctctacttgaatactaagatgcgggctgaagagaagcgtttggtcgatggggccaacgaggtacctcactttagtcttcggacgttgacgcgggtgttatcatatgtcaatgatgtctcgcccctttatggtcttagaagagcgctatttgaagggttctcaatgggtttcttgacacttctcgacagagcatcggaggatactctgatacctttgatacaccaccatttgcttgaacgacatggaaatcctaggacattactatctcaaacaccgagacacccaagtgacgggaaacaatacgtcaaattcatgaacaataatagagatcgccattactggcttttgcaaggtggtgagacaccgatcgagcgcgtcgactatatcatcacaccgtatgtggaaaggaaccttttgaaccttgtccgagccacatcaacaagacgctttccaattctcatccaaggccccacgtcagcaggcaaaacgagtatgatcgaatacctcgcgaattttagtggcaataaattcgtccgtatcaataaccatgagcacaccgatttacaggagtatctaggtacctatgtttcggatgccactggcaaattgacattccaagaaggtctcttagtacaggccttaagagaaggacactggattgtgcttgatgagttgaatcttgccccgacagatgttctcgaggctctcaaccggcttctggatgacaaccgtgagcttcttatccctgagacgcaagaaattgtccgcccacatgagaatttcatgctcttcgccacacagaacccacccggtctatatggaggcagaaaagtgctttcgcgagcctttcgtaataggtttctcgaacttcatttcgacgacattcctgaagatgaacttgagactattttgcagaagcgcagtctgtatactgcgccgtcagactgtaaaagaattgtgaatgtttacaaggagttgtcaagactacgacagacaagccgtctttttgagaacaaggacagtttcgcaactttacgagatctcttccgatgggcactaagaaatgccgaatcgcgcgaagaaattgcggcaaatggttttatgctcttggccgagagagtgagaaatcaggaagaacgccttgctgtaagaaatgtcattgagaatgtcttcaaagtcaaaatcgatgaggatctgctttacgatgccaaaaattcactatatcttcgaacacaagcccctcaaaatggccatggtgtggtttggacacgtgccatgtgccgactgtatgttcttgtcgcaagcgccctccgcaataatgaacctgtcctactcgtaggagaaactggttgcggcaaaacaaccgtttgccagcttcttgccgaggccatgggtaaggaacttcatattgtcaatgcacatcagaatacagagaccggcgacctcattgggtctcaaaggcccatcagaaacagagccgccatcgtggatagcttgacaaaggacgttgtcaaggtccttgaagaccttcaacaaccttttgatggcgatctcgataacatgttggtggcctattatgcccttgaccaagcatcgcttgataaggtatcagaagagctacgacatcgaatatcggagaatgaaatcaagagcaaggcattgtttgaatgggctgatgggagcctggtgcatgctatgcgtaatggccaatacttccttcttgacgagatatctctagcagacgactcagttcttgaaaggctcaactctgtccttgaaccgcagcgctccctcctccttgcagagaaaggcatcgacaactcttttatcaaggctgcttcagacttccaattcctagcgaccatgaatccaggaggcgattttggcaagaaagagttatcacctgcactgagaaatcgtttcacagagatctgggtgccgcccctctctggaaacgaggatgttctgcaaattgtgtcttcaaaattaaaatctcaatatcgaaagtttgcgaaacctattgttgagttttcttactggtttgctcatgactttcgctcaacgacttcgactgccttttccatcagagatatccttgtatgggtgaaatttatcaacgagagtcgaaaaagtgacggggccttctccgtaattcatggtgccgccactgtgttcatcgacacgcttggagcaaacccctctgcactgattgccactgatagcaagagtatggagacacaaagacagcgatgtcttgacaagcttagtgaactactcggtcgggacgcaacttcaatatatcgtgcgccattagaactcgccgttcaacctaatgagttccgaattggagagtttgccattggccgaaatggtgatgaaaattttgatgctgggtttgctctgaacgcccctactaccaaaatgaacgccatgcgagtcatacgagcacttcaagtacagaaacccatactcctggaaggtagtcctggtgtgggtaagacaactctagtcagcgctctcgctcgagcatgtggaaacccattgaccagaatcaacctttctgatcaaactgatctcatggatctcttcggtacagacgtccctgttgaaggcgctgaagctggaaactttgcatggagagatgcgcccttcttacgagcgatgcagaatggtgaatgggtgctcctggacgagatgaatctcgcctcccaatctgttttggaaggtctcaacgcatgtcttgaccatcgtggagaagtttacatctctgagctggatcaggttttcaaaagacatccgaatttccgcctcttcgctgcgcagaatccgcatcaccaagggggtggcaggaagggtctaccaagttctttcgtgaatcgttttatcgttgtttacgcagatgtctttagcgacgaagatctgattctcatcgccaagcacaacttcccagatgtcccttcagagacagttggtcaaatgatcaatttcattgccaatctcgaaaaacgcatattagttgataagtcatttggctctcaaggtagcccatgggagttcaatcttcgtgatacactccggtggcttcatctacttacatcatctgacccccttctctctaccgggatggtcgatgacttcctaggcatcgccattcgccaacgcttcaggtccaaaagagatcggtctgaggtggatcgtcttttcagcgaagtatttgggttttccccaaagtctcaccagttgtatcatgacaccagcgctcttgcttttcaaataggattcgcgtcaatgccacgaaatcacctgattagacctacagagtccccggggatcaaagttgttgacaggctgtcagaacttgaatctcttctgatttgcatcaaacacaatatcccttctattctggttgggccatcgggttgcgggaagtcggctctccttcagcagatagctgctcagggcgggagagccctcgtgacatttccaatgaatgctgatatcgatgcgatggaccttgttggtggctttgagcaatcggatccgcttcgagaagccaatatcgccgtgagaaggttgttattggcattacaaacaacgagtcttagtgctttgcctcaggctattcccgaaatcacgcttgatcttctaagtgcgctcgaatctaacaaacacgacacaaccgaccgcaagcacttgttgcctttggtcagcgaactcaagacacagactgcgccggattccgaccttggaataatcctcgcggaaaccgaagaagttctacagcgccctacctgtattgaaattccgcggtttgagtggttagacggagttatagtccaagccctacagaaaggtgaatggttagtcctcgacaatgcaaatctgtgcagtgcctctgttcttgatcggttgaactcattgcttgagccggatggtttcttaattattaacgaacactgcggacctgacggcgaacctcggattatcaagcctcatcctgatttcagaatatttctgactgtcgatcctcggtatggtgagctatctcgggccatgaggaaccgcgccgttgaaatctatgtcgaaccacatacattcgaaacgcctctgtggtctggaaaaattgccgacattgaggcgcgccagcaacgatacaaaacagtatttgaggcaatggcttacgacagcaccaatgatacgcgcatttcccaatacgctctggatggcctgaccgttgatgatcttggattgctatcgagacatcaagattcatatagtctcattactggaggcaacgcatccgtgggcactttattctcgtcggatcacttcttgaagtcggttcacgttgcctctggatcttcgctacttcttgagggtcagcaaatcttgcgagattcatatgttgcatcatccgattctgacttacactacgttgaaaatttcctgccgctccatcctttacataactcgcccataatacccctgctccgtgaatgtcctttgttgaatccaatctggctttcaatatgctatgaaatgtctttcatcattgcagatgcgtgggagctacttgagcgccaaaaggctgcggcgtctaacatgcagatttccaacttgaaccgcttgcagcgttccctagccgccgagtcggccgtagctgtgcaaaaagattcaactgtcaaatcagcaaagttcctaatcggccttcttcaggcagttgaggcttacctgaagacgcaggtgaagaatccgatatatcatgatcaagataagctcgtccttcgagatatgacccatcattggaagcgcacgtttcaatatcttatcgaaaagcaatttgaagaggctagatttcaagctcacctcggtcacatgtctacgtgtctccatgatcacgttaaatcagcacacgacgaaaatacccatcagctactcgtacacgttatgtctggtttcgatgaatgtttcgttgccaattttaagctgacaacggggttcggcatggagcaactgtggaatgttctgagaccaacgtcagtgcacagcaagcttcttttcgaccaactatcccagatggagaacctagcattacagcttgacgaggtcaagtggaaatctggagctggtctgtctgatcttgccaagataacgaattcctttgctcaagcgtatcgcctcattcgagtaggcgaggccaatgctgaggatctcttgcagcctttacagatcgaaattgaacagatgaaccagcgactcactgaccaaagcattgcttataccccttttctagctggcgaattcgacacgatcaggcaacttgttgttctaaacgatatgtcccagcagactaagcaggagttagtagtagatgacttggctgtcttgtctgatactcctatgattacgctgctgcgaattcacagcgctactgacacatccaagtcaatgcaactaatggaactattcatgcgagaaagtcgggtatcattgaaatgggatcatagcctatccagcgatattctatgcaaactcgacaccatcgatacggtacatttgagccgtctcgtcgccattgagacggaattacccatgcttgccacacaactcagcaaatattctcaagctctcacttccaatcaggctgagaaacttaataaagtactgtcgcgtatcatgagtgatattctagcgacatacaacccggcattagctgcgatatttgactcaggtcgaagagcctggagcgacacgccaataagtaccagtgttagcctggagtctgaaggattgtcgttcaagttggaagatatcctacctccatcaatatccactcatctccatgagcctcaaggaattgttgtaaaacattttgcatcttccttcctatctctgatcatgcacgagcagggccaattcgatgagttcatatatctggcaaatgcttggatccaattttctttggctctcgtcaagctgtttgtccctgacaagcccttcgatcctcaacttcggccgcttgtagctctcaacagctatgatcaactcttggaaactctgaagagtcgactggaatccttgaggcaatatgagcaattccgccacggccagcaaatttctgtccgcactgacatagccgaaagagacgtgacagcccttggagagcgtccaactgaagtacaagttacataccgtcctaccagctctgaactgtccaaggttcaaactgagttcaatagtatcctcagagttgttcataattccgatctcaactcaatcctatttcagcactatttcggatctgactcagccagccaagagcttgaggtaattcgcgaaaacatatctagaataagtctacgattggcacgcaatcatcgcgcatacgaggatattgtaataccgacggtaaatatcttacagtgtctggaaatcggtctatcacttggccaagaggcgagattgcaatcacaagcacaagacggtgtccatgcaagcttgcttgaacacatgcccttttttggtggtaaattaagaacctcaacccctcaagtagatccgtccttgggaattgagttcttgacatatgctggagtcgttcgcaacatcgaaggaccggaaggggttgcccgtattcagcaaagcatcttcgaaatcttccataccttttatgaccagtggcatcgaaaattggaagaagaccgaaaaacagaggaagcaaagagtagctggttccattaccgtggaggtgacgaggagacagaagaagctgaacaggccgcgttcaacgacttattcccaagcttcaatgacgaaagcgagagtcaaccaccaaaggaagcattcaaaattaacaatgctcgagccttgtcgatccaaattgcggaactccacaacgccatatttttaggatctcgcaacgcatccagtggtcttaagagccttttgaaacacgttgcgcgacaacttgcctctgctagagacaatcgcatcattgacaacaatttacgatcagcaacgctactagtccttgaagaaagggcagatgttctcactgcgacttcggtgtctaacaactacaacttttacgcggattcgaaccgtcctgaagctcgtaaccttgttagtcttgtctctgatattcgtgctcgtttccgccagcttcagcaaatcgacgaaataggtcatatgcagccacttgtcaacgttcttttggcttctgataaaattttcgatcttgggttggcagacccgcttgcccagatcatcatcagagttgagcaattacatgccttcgtatatgaatggcaatttggtggctgggcaggcaagacttatggcgtgctacctctttatactcgtctcaccgacatgttggtttcctggcgccgtcttgaactttcaacatggaacagactgtttgatgctgaggtcaagaagtgtgatgatgacgccgcttcgtggtggttcatcgcttaccaagccgtcattgttggaccaatggccttaattcaatccggagagagccttcagagccacaccattagtctagtcaaagaactcgatatgtactttgcgtcggcaccagttggccaattccgaggccgacttggtcttctggggcagcttcacactcacctgaaatttctcgtctctgaatttccacaattggtggtcatacgcgacagtctacgcaactttatcgacttttactcccgctacgaccaacctgtcaaggacctggtccaaggaggtcggaccccaattgaaaagaagatgaaagatgttgtgctcctggccagctggaaagatacaaacattgttgccttgagacaaagtgcccagaaatcccatcagaagctcttccaaattgttcgaaaattccgcgatgttctcaatcagcccatgaagtcaatcatcgacaagggtttgtctgaaattgatgatgtcgctgcaaccccgaacattgtgttgctcagctttccaacaagtcaagctgctattgaggcatgcaacaagacgataccgggttggacgaatgattataagcgactcgcaaatgttcagcgaacagtacagattatgaccaggctgggccaaacgtctctatcaacggttgacgctggatcagtcattgatgacttccttctagatttgaccaaccagatatctgaactacgaaaagaaacgccttctgttctcaacgaagagaatacggacctcgtcaagcatctgaagactcgtaagcggaagctctttgcagaggttcttagggcagtaagacacatgggaattccctacaatcttggtcttgacgcccttgctaaacaagattctctgtccactgttctcgcgtccacggtatcattggctgattacccattgtcgaatcccgagcgtgccgaatattactttcaccaaatgctagacttggccaccagtgttcgcaacggcgcacacgagcactctgaggatttgacgcccgctgaggtcactagaagtgttggtttgttcgaaggaatcctaagtaacacgctgggtcaaaggcgtgagcttttaactgcgctcgatgatttcagagctttacagaatagttgcggcttgatacgattacttggacaaacccaaggcaaagatgatatcgcgcttcgaagcaaaactagcaattgtcggactgcttcgatttgggtactcgaaatactcaaactcggcatccacatggtcgaactacacggcaaattcggaggtctggataatcggaaagctgtggaccttctgattcactgggatgagaaaatcagggctacgacgaccatccttgagtctctacctgagctcccttctgggctggttcttgcaaggcgcctggaaaccgaacaagacattgggctactctttagccaattcaaacaaaatgtccatgcagcatgccaagagcgaccagatctagcattcatcttcaaacaagtcctactctggatcgacgtcgaagaacaggacaccgaacaactacactctctcaagcaagacattcatgtatttacacaaagcgtaagaattctctgcgacactattctcgtaacggtggagcaattcagccaagcagtggccaaaatccctgcttcagatgaagatgccggttggctcacaaaacacaatcatgagaccacaaaagctttgcgggctcttcacttacctcaagttgagaaagcaatcagcaaaactctcgacatctcagggcaactcgactggacccattcagtcaccaggatgattgttccatctgtcatgtccgttgtcactcctatcgctgaccagtatcagaacatatgtagtcagtttatcggcaaggctgcgaattgtcacaaatcaacctgcaagctaggtttcaagttgggcaaaagcttcatacagatcgcctcacaaggtttctgcacaccacaggaaaagtcacaagaaaaggcaggaaacagcgagaaactcaaagatggaactggacttggcgagggcgagggtgcagaggacattagcaaagatattcagcctgacgaagatttgtcagaattagcacaagaaaagaacaatgacccgggtcgagagatggaagatgagaaagacgctgtggatatggccgacgaggacctcgaaggcgacctcaatagtgtcaatggagaagaacaggacgacaagggatccgagtctggcgatgaggaggacaaagaagagattgaagaagagagtggagacgtcgacgatttggatcccacggcagtggacgagaagatgtgggatggcgagaatgaagatgaggctgataaggaccaaaagggcgacaaaccgaaaggacaaaagaagaaggacgaagagatcgcgggcgaggataatcaagctgatgatggtatgcaaccagacgatgatggcgatcaggctgatgagaaggaggacgaagaagctgtagaagaccaggaggaggaagttcagcgtcaagatgatcaaatccaacaggatcagaatgtccaagaacaagaagctcttgctttgccagacgatatggatatcgatgccttggacaacgactccatgtcttctatcagcgatgacgaattggatgagctgtcagacgtggaccacgatggcaaagaggaaaaggagatgaatgacgacgaggacaagaatggtcaagagaccgatatggaaaccgctttggcagacgaaggcgaagaagagcaggacgggcagcagtcagataaagagaacgacatggaattagaggacgcgccagcagacgaaccggtcgaagaggatcatgaagacatgtcagaggagcagaataaacaagagcagcaaagtaaggatgagaatgattcgaatcctcatgatgtcgccccgagcgacgcaagaggcgggggcgggcaggaccaggatgccgaccagaccgaagagcaaaaagatgctcaaaaaaacgctaagcaggagcaaggccaggagatgggccaagaggcacccgacacggaacaatctcaaggccagaatggcgcgatgtcccaacgtcaagatggcgcaaaagacaccaatccagacgatgcgatggatacatcttcttcgcagcctttcaaggcacttggtgatgctcttgagaaatggcacaaacgccagcgagatattcgagaggctcaaaaggaccagtcgcagcagccaaatattgaacaagacgccaagattcaagaatttcaacatctggagcacgacgatgatgctgcggatgcgcaagcgatgggcactgctactgaagagcagactcagcaaatcgacgacgctatggcaatcgatgaagaagaggcgcctgcaagcaatatcctacctcaagaaacacctgaagacctggccaaagacgatgatgtggatgtcgcagaagcgcctgatcaacaaactacacacgatgataaacaagaagaacggcggagtggtgtaaccactcaccaaggtgcttataatcgagcttctactccaccgtcaaacggagctcagcaatccgaggacatcgaggatcccgttgaagaagcttctgaacgactagtgtctacccatctggagcctcaatctgatttacgagacttcgacgaatcgatgcaacaatggacagtacttcaaagcaagacacatccactatctttgtccctaacttcccagctacggctcatcctcacgccctcacaatcaaccaaactatctggttcttatagaactggaaagcgtctcaatattaagcgaatcatcccctacatcgcatcaagttataaaagggataagatctggatgcgaagagcaattccgacgaaacgcgcgtatcaaatattgctttgtgtcgacgacagcagcagtatgggcgaaggcaagtccggtgacctggccttagagtccctagtcatggtgtcacgagctcttactatgctggaggttggccaggtcggagttcttggcttcggtgaagacgtgtttatagcacatgagttctccgagccttttgcttctcacgacagcggtgccaaagtattgcaaaagttctcattccggcagaatcagacggacctcctcctccttgttcgacaaaccatcgaacgctttcgtattgctcggcaacaaggcacaagccgcggatcagaagacctgtggcaattagcactgattctctccgatggtgtgactccgtcagcagagcacgagagcattcgtgtcttactgcgcgaagcaattgaggaacgtatcatgattgtgttcatcataatggacgacacggcgaaaaaggacaaaaaggaaagtgtgctcaatctcaaaaaggtcaaattcttaggcaatgatgagatcaaaaccgagtactatctcgatactttccccttccagtactatctcatcgtccacaacttggaggatctaccaggcgcattgtcgggcttgttgaggacctggtttgcggagatcaacacctaa

SEQ ID NO: 23398 - protein, 4937 aa, Muscodor strobelii
  misc_feature: SGI Peptide ID NO. 567961
  misc_feature (1764)..(1905): Pfam Id: PF07726 Pfam Desc: ATPase family associated with various cellular activities (AAA)
  misc_feature (1093)..(1231): Pfam Id: PF07726 Pfam Desc: ATPase family associated with various cellular activities (AAA)
  misc_feature (311)..(451): Pfam Id: PF07726 Pfam Desc: ATPase family associated with various cellular activities (AAA)
  misc_feature (1093)..(1237): Pfam Id: PF07728 Pfam Desc: ATPase family associated with various cellular activities (AAA)
  misc_feature (1764)..(1911): Pfam Id: PF07728 Pfam Desc: ATPase family associated with various cellular activities (AAA)
  misc_feature (311)..(460): Pfam Id: PF07728 Pfam Desc: ATPase family associated with various cellular activities (AAA)
  misc_feature (1384)..(1591): Pfam Id: PF07728 Pfam Desc: ATPase family associated with various cellular activities (AAA)
  misc_feature (1764)..(1796): Pfam Id: PF00004 Pfam Desc: ATPase family associated with various cellular activities (AAA)
  misc_feature (1765)..(1905): Pfam Id: PF07726 Pfam Desc: ATPase family associated with various cellular activities (AAA)
  misc_feature (312)..(336): Pfam Id: PF07726 Pfam Desc: ATPase family associated with various cellular activities (AAA)
  misc_feature (311)..(449): Pfam Id: PF07728 Pfam Desc: ATPase family associated with various cellular activities (AAA)
  misc_feature (1498)..(1591): Pfam Id: PF07728 Pfam Desc: ATPase family associated with various cellular activities (AAA)
  misc_feature (1384)..(1427): Pfam Id: PF07728 Pfam Desc: ATPase family associated with various cellular activities (AAA)
  misc_feature (644)..(687): Pfam Id: PF07728 Pfam Desc: ATPase family associated with various cellular activities (AAA)
  misc_feature (810)..(911): Pfam Id: PF07728 Pfam Desc: ATPase family associated with various cellular activities (AAA)
  misc_feature (2074)..(2119): Pfam Id: PF07728 Pfam Desc: ATPase family associated with various cellular activities (AAA)
  misc_feature (2212)..(2306): Pfam Id: PF07728 Pfam Desc: ATPase family associated with various cellular activities (AAA)
  misc_feature (11)..(4935): NCBI GI: 156044979 Blast Desc: SS1G_09678 [Sclerotinia sclerotiorum 1980] gi|154694073|gb|EDN93811.1| SS1G_09678 [Sclerotinia sclerotiorum 1980]
  misc_feature (5)..(4936): NCBI GI: 145608786 Blast Desc: MGG_06379 [Magnaporthe grisea 70-15] gi|145016213|gb|EDK00703.1| MGG_06379 [Magnaporthe grisea 70-15]
  misc_feature (5)..(4936): NCBI GI: 171686866 Blast Desc: protein product [Podospora anserina] gi|170943394|emb|CAP69047.1| protein product [Podospora anserina]
  misc_feature (197)..(4937): NCBI GI: 116192027 Blast Desc: CHGG_05731 [Chaetomium globosum CBS 148.51] gi|88181644|gb|EAQ89112.1| CHGG_05731 [Chaetomium globosum CBS 148.51]
  misc_feature (1)..(4936): NCBI GI: 164425077 Blast Desc: NCU06468 [Neurospora crassa OR74A] gi|157070780|gb|EAA28123.2| conserved [Neurospora crassa OR74A]
  misc_feature (3)..(4299): NCBI GI: 46125761 Blast Desc: FG07258.1 [Gibberella zeae PH-1]
  misc_feature (5)..(3754): NCBI GI: 261360152 Blast Desc: midasin [Verticillium albo-atrum VaMs.102]
  misc_feature (13)..(4935): NCBI GI: 121715774 Blast Desc: midasin, [Aspergillus clavatus NRRL 1] gi|119403653|gb|EAW14070.1| midasin, [Aspergillus clavatus NRRL 1]
  misc_feature (15)..(4935): NCBI GI: 238496553 Blast Desc: midasin, [Aspergillus flavus NRRL3357] gi|220694392|gb|EED50736.1| midasin, [Aspergillus flavus NRRL3357]
  misc_feature (14)..(4935): NCBI GI: 239610477 Blast Desc: midasin [Ajellomyces dermatitidis ER-3]
MASFVDLSLQRAQILDDASVLAQLPPDLLLLIRDHTTASFLDALAAAALIPQVTNSIFIYFEHVFADICARWLRRSRQYGQEDPIIAAFARILPFAPHLSVYLNQYISQTSAAHTHLPRPFSLTSFNAPNTSHSSETGLLTALLAFWRLLNFDKTTYARLVRPSQVQALFAHDSLRVRYLAIKVFCRHMSSSDLKEEELIQKHVNHASAPSTVLQGDFDGAIVDYAFLSLFEHKRATGMDELRRKSQALSAKRPLTSELPLQQLTPLVIQYGNVVFPRPNGAPASQTVLIHTPTTLANLERLARNLQYPGPILLQGLPGSGKTSAVYELARELGMESSMVTLHLNEQTDAKMLVGLYSTDSKPGSFSWRPGVLTTAIREGRWVLIEDLDRAPNEVMSMLLPLVEHGKLLIPSRGETIEASGTFRLFATMRTTRGMHGQEHVPSFLGQRFWHLSSIAMPSYAELEQIVVGSYPLLRQYTAIIMSVYKRLCAAPNGSSMTGSRRNTTDRPITPRDLLKWCRRLRDILVAAGCKTGEEPISDTIHNWMFMEATDCFCGSIANQDIRVLLAGCVAEEMHLPKQLLEHYLSAHVPHLEDSAGNLRVGRVMLSKNRHANRIAKSRRPFASTSHAKRLLEQIAVAVKLREPVLLVGETGIGKTTVVQQLAETLGHKLVAVNLSQQSEVGDLLGGFKPVNARSLAVPLKEEFEDLFAATGISAAKNQKYLELIGKCTAKGQWSRVLKLWREAIKMFHAIVEERRARIERENGGSDERPAIKRRKTESKLQSLLDLRPRWDSFAKSLDQFDIQISGGSGNFAFAFVEGNIVKAARNGDWVLLDEINLASPDTLESIADLLASGPNDEPSILLSETGEIERVKAHPDFRIFGAMNPATDVGKRDLPLGLRSRFTELYVGSPDRDLKDLLTIIKAYLRGKSAKDDQAADDIARLYLNTKMRAEEKRLVDGANEVPHFSLRTLTRVLSYVNDVSPLYGLRRALFEGFSMGFLTLLDRASEDTLIPLIHHHLLERHGNPRTLLSQTPRHPSDGKQYVKFMNNNRDRHYWLLQGGETPIERVDYIITPYVERNLLNLVRATSTRRFPILIQGPTSAGKTSMIEYLANFSGNKFVRINNHEHTDLQEYLGTYVSDATGKLTFQEGLLVQALREGHWIVLDELNLAPTDVLEALNRLLDDNRELLIPETQEIVRPHENFMLFATQNPPGLYGGRKVLSRAFRNRFLELHFDDIPEDELETILQKRSLYTAPSDCKRIVNVYKELSRLRQTSRLFENKDSFATLRDLFRWALRNAESREEIAANGFMLLAERVRNQEERLAVRNVIENVFKVKIDEDLLYDAKNSLYLRTQAPQNGHGVVWTRAMCRLYVLVASALRNNEPVLLVGETGCGKTTVCQLLAEAMGKELHIVNAHQNTETGDLIGSQRPIRNRAAIVDSLTKDVVKVLEDLQQPFDGDLDNMLVAYYALDQASLDKVSEELRHRISENEIKSKALFEWADGSLVHAMRNGQYFLLDEISLADDSVLERLNSVLEPQRSLLLAEKGIDNSFIKAASDFQFLATMNPGGDFGKKELSPALRNRFTEIWVPPLSGNEDVLQIVSSKLKSQYRKFAKPIVEFSYWFAHDFRSTTSTAFSIRDILVWVKFINESRKSDGAFSVIHGAATVFIDTLGANPSALIATDSKSMETQRQRCLDKLSELLGRDATSIYRAPLELAVQPNEFRIGEFAIGRNGDENFDAGFALNAPTTKMNAMRVIRALQVQKPILLEGSPGVGKTTLVSALARACGNPLTRINLSDQTDLMDLFGTDVPVEGAEAGNFAWRDAPFLRAMQNGEWVLLDEMNLASQSVLEGLNACLDHRGEVYISELDQVFKRHPNFRLFAAQNPHHQGGGRKGLPSSFVNRFIVVYADVFSDEDLILIAKHNFPDVPSETVGQMINFIANLEKRILVDKSFGSQGSPWEFNLRDTLRWLHLLTSSDPLLSTGMVDDFLGIAIRQRFRSKRDRSEVDRLFSEVFGFSPKSHQLYHDTSALAFQIGFASMPRNHLIRPTESPGIKVVDRLSELESLLICIKHNIPSILVGPSGCGKSALLQQIAAQGGRALVTFPMNADIDAMDLVGGFEQSDPLREANIAVRRLLLALQTTSLSALPQAIPEITLDLLSALESNKHDTTDRKHLLPLVSELKTQTAPDSDLGIILAETEEVLQRPTCIEIPRFEWLDGVIVQALQKGEWLVLDNANLCSASVLDRLNSLLEPDGFLIINEHCGPDGEPRIIKPHPDFRIFLTVDPRYGELSRAMRNRAVEIYVEPHTFETPLWSGKIADIEARQQRYKTVFEAMAYDSTNDTRISQYALDGLTVDDLGLLSRHQDSYSLITGGNASVGTLFSSDHFLKSVHVASGSSLLLEGQQILRDSYVASSDSDLHYVENFLPLHPLHNSPIIPLLRECPLLNPIWLSICYEMSFIIADAWELLERQKAAASNMQISNLNRLQRSLAAESAVAVQKDSTVKSAKFLIGLLQAVEAYLKTQVKNPIYHDQDKLVLRDMTHHWKRTFQYLIEKQFEEARFQAHLGHMSTCLHDHVKSAHDENTHQLLVHVMSGFDECFVANFKLTTGFGMEQLWNVLRPTSVHSKLLFDQLSQMENLALQLDEVKWKSGAGLSDLAKITNSFAQAYRLIRVGEANAEDLLQPLQIEIEQMNQRLTDQSIAYTPFLAGEFDTIRQLVVLNDMSQQTKQELVVDDLAVLSDTPMITLLRIHSATDTSKSMQLMELFMRESRVSLKWDHSLSSDILCKLDTIDTVHLSRLVAIETELPMLATQLSKYSQALTSNQAEKLNKVLSRIMSDILATYNPALAAIFDSGRRAWSDTPISTSVSLESEGLSFKLEDILPPSISTHLHEPQGIVVKHFASSFLSLIMHEQGQFDEFIYLANAWIQFSLALVKLFVPDKPFDPQLRPLVALNSYDQLLETLKSRLESLRQYEQFRHGQQISVRTDIAERDVTALGERPTEVQVTYRPTSSELSKVQTEFNSILRVVHNSDLNSILFQHYFGSDSASQELEVIRENISRISLRLARNHRAYEDIVIPTVNILQCLEIGLSLGQEARLQSQAQDGVHASLLEHMPFFGGKLRTSTPQVDPSLGIEFLTYAGVVRNIEGPEGVARIQQSIFEIFHTFYDQWHRKLEEDRKTEEAKSSWFHYRGGDEETEEAEQAAFNDLFPSFNDESESQPPKEAFKINNARALSIQIAELHNAIFLGSRNASSGLKSLLKHVARQLASARDNRIIDNNLRSATLLVLEERADVLTATSVSNNYNFYADSNRPEARNLVSLVSDIRARFRQLQQIDEIGHMQPLVNVLLASDKIFDLGLADPLAQIIIRVEQLHAFVYEWQFGGWAGKTYGVLPLYTRLTDMLVSWRRLELSTWNRLFDAEVKKCDDDAASWWFIAYQAVIVGPMALIQSGESLQSHTISLVKELDMYFASAPVGQFRGRLGLLGQLHTHLKFLVSEFPQLVVIRDSLRNFIDFYSRYDQPVKDLVQGGRTPIEKKMKDVVLLASWKDTNIVALRQSAQKSHQKLFQIVRKFRDVLNQPMKSIIDKGLSEIDDVAATPNIVLLSFPTSQAAIEACNKTIPGWTNDYKRLANVQRTVQIMTRLGQTSLSTVDAGSVIDDFLLDLTNQISELRKETPSVLNEENTDLVKHLKTRKRKLFAEVLRAVRHMGIPYNLGLDALAKQDSLSTVLASTVSLADYPLSNPERAEYYFHQMLDLATSVRNGAHEHSEDLTPAEVTRSVGLFEGILSNTLGQRRELLTALDDFRALQNSCGLIRLLGQTQGKDDIALRSKTSNCRTASIWVLEILKLGIHMVELHGKFGGLDNRKAVDLLIHWDEKIRATTTILESLPELPSGLVLARRLETEQDIGLLFSQFKQNVHAACQERPDLAFIFKQVLLWIDVEEQDTEQLHSLKQDIHVFTQSVRILCDTILVTVEQFSQAVAKIPASDEDAGWLTKHNHETTKALRALHLPQVEKAISKTLDISGQLDWTHSVTRMIVPSVMSVVTPIADQYQNICSQFIGKAANCHKSTCKLGFKLGKSFIQIASQGFCTPQEKSQEKAGNSEKLKDGTGLGEGEGAEDISKDIQPDEDLSELAQEKNNDPGREMEDEKDAVDMADEDLEGDLNSVNGEEQDDKGSESGDEEDKEEIEEESGDVDDLDPTAVDEKMWDGENEDEADKDQKGDKPKGQKKKDEEIAGEDNQADDGMQPDDDGDQADEKEDEEAVEDQEEEVQRQDDQIQQDQNVQEQEALALPDDMDIDALDNDSMSSISDDELDELSDVDHDGKEEKEMNDDEDKNGQETDMETALADEGEEEQDGQQSDKENDMELEDAPADEPVEEDHEDMSEEQNKQEQQSKDENDSNPHDVAPSDARGGGGQDQDADQTEEQKDAQKNAKQEQGQEMGQEAPDTEQSQGQNGAMSQRQDGAKDTNPDDAMDTSSSQPFKALGDALEKWHKRQRDIREAQKDQSQQPNIEQDAKIQEFQHLEHDDDAADAQAMGTATEEQTQQIDDAMAIDEEEAPASNILPQETPEDLAKDDDVDVAEAPDQQTTHDDKQEERRSGVTTHQGAYNRASTPPSNGAQQSEDIEDPVEEASERLVSTHLEPQSDLRDFDESMQQWTVLQSKTHPLSLSLTSQLRLILTPSQSTKLSGSYRTGKRLNIKRIIPYIASSYKRDKIWMRRAIPTKRAYQILLCVDDSSSMGEGKSGDLALESLVMVSRALTMLEVGQVGVLGFGEDVFIAHEFSEPFASHDSGAKVLQKFSFRQNQTDLLLLVRQTIERFRIARQQGTSRGSEDLWQLALILSDGVTPSAEHESIRVLLREAIEERIMIVFIIMDDTAKKDKKESVLNLKKVKFLGNDEIKTEYYLDTFPFQYYLIVHNLEDLPGALSGLLRTWFAEINT

SEQ ID NO: 23399 - DNA, 1981 bp, Muscodor strobelii
  misc_feature: SGI EST ID NO. CUFF.55070.0
  misc_feature: Variant of the nucleotide sequence at SEQ ID NO 23397
tccgtgggcactttattctcgtcggatcacttcttgaagtcggttcacgttgcctctggatcttcgctacttcttgagggtcagcaaatcttgcgagattcatatgttgcatcatccgattctgacttacactacgttgaaaatttcctgccgctccatcctttacataactcgcccataatacccctgctccgtgaatgtcctttgttgaatccaatctggctttcaatatgctatgaaatgtctttcatcattgcagatgcgtgggagctacttgagcgccaaaaggctgcggcgtctaacatgcagatttccaacttgaaccgcttgcagcgttccctagccgccgagtcggccgtagctgtgcaaaaagattcaactgtcaaatcagcaaagttcctaatcggccttcttcaggcagttgaggcttacctgaagacgcaggtgaagaatccgatatatcatgatcaagataagctcgtccttcgagatatgacccatcattggaagcgcacgtttcaatatcttatcgaaaagcaatttgaagaggctagatttcaagctcacctcggtcacatgtctacgtgtctccatgatcacgttaaatcagcacacgacgaaaatacccatcagctactcgtacacgttatgtctggtttcgatgaatgtttcgttgccaattttaagctgacaacggggttcggcatggagcaactgtggaatgttctgagaccaacgtcagtgcacagcaagcttcttttcgaccaactatcccagatggagaacctagcattacagcttgacgaggtcaagtggaaatctggagctggtctgtctgatcttgccaagataacgaattcctttgctcaagcgtatcgcctcattcgagtaggcgaggccaatgctgaggatctcttgcagcctttacagatcgaaattgaacagatgaaccagcgactcactgaccaaagcattgcttataccccttttctagctggcgaattcgacacgatcaggcaacttgttgttctaaacgatatgtcccagcagactaagcaggagttagtagtagatgacttggctgtcttgtctgatactcctatgattacgctgctgcgaattcacagcgctactgacacatccaagtcaatgcaactaatggaactattcatgcgagaaagtcgggtatcattgaaatgggatcatagcctatccagcgatattctatgcaaactcgacaccatcgatacggtacatttgagccgtctcgtcgccattgagacggaattacccatgcttgccacacaactcagcaaatattctcaagctctcacttccaatcaggctgagaaacttaataaagtactgtcgcgtatcatgagtgatattctagcgacatacaacccggcattagctgcgatatttgactcaggtcgaagagcctggagcgacacgccaataagtaccagtgttagcctggagtctgaaggattgtcgttcaagttggaagatatcctacctccatcaatatccactcatctccatgagcctcaaggaattgttgtaaaacattttgcatcttccttcctatctctgatcatgcacgagcagggccaattcgatgagttcatatatctggcaaatgcttggatccaattttctttggctctcgtcaagctgtttgtccctgacaagcccttcgatcctcaacttcggccgcttgtagctctcaacagctatgatcaactcttggaaactctgaagagtcgactggaatccttgaggcaatatgagcaattccgccacggccagcaaatttctgtccgcactgacatagccgaaagagacgtgacagcccttggagagcgtccaactgaagtacaagttacataccgtcctaccagctctgaactgtccaaggttcaaactgagttcaatagtatcctcagagttgttcataattccgatctcaactcaatcc

SEQ ID NO: 23400 - DNA, 1779 bp, Muscodor strobelii
  misc_feature: SGI cDNA ID NO. 567962
  misc_feature: Encodes the peptide sequence at SEQ ID NO 23401
atgatctcgaacggtttgttcgtcgctcgaggcgttctacgtcgccaacggacctcgctcctcttcgtgcgaaacaatttctcagggcgtccagctcgccaaaagccaaatttggctctgccatcgacgccagcgagaacacgctttgctccttcaccaactggctacgttcacatcgggtcattgcggacggcactcttcaactatttgcttgctaaagctactggtggtcaattcctcctcagactcgaagacactgatcagaaacggctggttcctgatgccgaagagaaattgtatcaagatctaaaatgggctgggcttaactgggatgaaggacctgacgttgggggtcctcatggcccatataagcagtccgagagattatcaacatataaagagcattccgaccgcctcctggagcgcggcgaggcatatcggtgtttctgcagtccaacggagctacacacaatgaagaagctcgcgttggaggaaaatcgcgatcccatatacaacggcaaatgttctcacatttctgccgaagaatctgcccaacgagccgcagacggcgaagaacattgcgttcgcttgaaatctcctgcaaaagcaccgccggtgagcgatcttgtctacggcaattacatgagtcccgtgccgctggatgacttcatcgtcatgaagagagacgggttcccgacttatcattttgctaatgttattgatgaccaccttatgggtattacacatgtcattcgaggagcggaatggttggtgtcgacaccacgccacgtagctctgtataacacattcggctggcagcctcccaaatttgcccatgtcgggttgttggtcgataagaacaagcaaaaactaagcaagcgattcggtggattcagtctttctaactggaaagaaagcgggattctgcctatcgctctactgaactatgtccttcttatgggatggtctcccgcgagggaagtgggagaagacaagtctgaagtcatgaatatgaaagagatgattgaaaagttccacctcaagttcaccaaaggcgacgtgacagtaaacaacaaagacgtacatttccaaaaggcacacgcccgccaggcattggccagcgggttagacggcgacacagtagcagcccctatcctaaacaaaataacaaactccatccaagagtacgagaagcaacgagtttctccagatgaccacaaaactctagaagaagagttcgaagtcccatcaatcggacccttgaggagtcaatctctggatccagaatacctaaaacccctcttaatcctcagcgcgtccaacctagccaagccgtcaggattcataaagaacaccgtctacatgctctgggccctccccgaagacgcgcacaaagccagtctcttgaaatacgaggccatcctccccaatatccgtttctcggggaaaaacctagcaggtactgacgtccgcagtccgcggaaaatggcagggctgactgaggaactgctctatgaacttgagcggatcccggagaaatactggacggaggagcatatcggcgacatcatcgcgccgttcatcaaatcaatcgcgcatctgcaagtgatcgagaacggcgtcaaggcgaagggatggggctgggagttcctacgctgggtccttaatgcctctgttcccggcccggacttaaaaggaaccatggtagtcctcggaagagaagaaacagtggctcgcgtaaaacaggcacatgccgtagccttgagcatgggatattga

SEQ ID NO: 23401 - protein, 592 aa, Muscodor strobelii
  misc_feature: SGI Peptide ID NO. 567962
  misc_feature (44)..(363): Pfam Id: PF00749 Pfam Desc: tRNA synthetases class I (E and Q), catalytic domain
  misc_feature (44)..(345): Pfam Id: PF00749 Pfam Desc: tRNA synthetases class I (E and Q), catalytic domain
  misc_feature (16)..(587): NCBI GI: 171685932 Blast Desc: protein product [Podospora anserina] gi|170942927|emb|CAP68580.1| protein product [Podospora anserina]
  misc_feature (40)..(583): NCBI GI: 145251365 Blast Desc: An15g06680 [Aspergillus niger] gi|134082728|emb|CAK42620.1| protein product [Aspergillus niger]
  misc_feature (32)..(586): NCBI GI: 39939930 Blast Desc: MGG_05275 [Magnaporthe grisea 70-15] gi|145010443|gb|EDJ95099.1| MGG_05275 [Magnaporthe grisea 70-15]
  misc_feature (17)..(590): NCBI GI: 255952977 Blast Desc: Pc21g01750 [Penicillium chrysogenum Wisconsin 54-1255] gi|211588952|emb|CAP95072.1| Pc21g01750 [Penicillium chrysogenum Wisconsin 54-1255]
  misc_feature (32)..(590): NCBI GI: 238841350 Blast Desc: glutamyl-tRNA synthetase, mitochondrial [Microsporum canis CBS 113480]
  misc_feature (23)..(591): NCBI GI: 240107070 Blast Desc: glutamyl-tRNA synthetase family protein [Coccidioides posadasii C735 delta SOWgp]
  misc_feature (23)..(583): NCBI GI: 146323058 Blast Desc: glutamyl-tRNA synthetase [Aspergillus fumigatus Af293] gi|129558595|gb|EAL93925.2| glutamyl-tRNA synthetase [Aspergillus fumigatus Af293]
  misc_feature (40)..(583): NCBI GI: 242817569 Blast Desc: glutamyl-tRNA synthetase [Talaromyces stipitatus ATCC 10500] gi|218713447|gb|EED12871.1| glutamyl-tRNA synthetase [Talaromyces stipitatus ATCC 10500]
  misc_feature (32)..(583): NCBI GI: 121716793 Blast Desc: glutamyl-tRNA synthetase [Aspergillus clavatus NRRL 1] gi|119404068|gb|EAW14485.1| glutamyl-tRNA synthetase [Aspergillus clavatus NRRL 1]
  misc_feature (30)..(590): NCBI GI: 238502645 Blast Desc: glutamyl-tRNA synthetase [Aspergillus flavus NRRL3357] gi|220691366|gb|EED47714.1| glutamyl-tRNA synthetase [Aspergillus flavus NRRL3357]
  misc_feature (41)..(370): SWISSPROT Homolog: EC 6.1.1.17 Glutamate--tRNA ligase
MISNGLFVARGVLRRQRTSLLFVRNNFSGRPARQKPNLALPSTPARTRFAPSPTGYVHIGSLRTALFNYLLAKATGGQFLLRLEDTDQKRLVPDAEEKLYQDLKWAGLNWDEGPDVGGPHGPYKQSERLSTYKEHSDRLLERGEAYRCFCSPTELHTMKKLALEENRDPIYNGKCSHISAEESAQRAADGEEHCVRLKSPAKAPPVSDLVYGNYMSPVPLDDFIVMKRDGFPTYHFANVIDDHLMGITHVIRGAEWLVSTPRHVALYNTFGWQPPKFAHVGLLVDKNKQKLSKRFGGFSLSNWKESGILPIALLNYVLLMGWSPAREVGEDKSEVMNMKEMIEKFHLKFTKGDVTVNNKDVHFQKAHARQALASGLDGDTVAAPILNKITNSIQEYEKQRVSPDDHKTLEEEFEVPSIGPLRSQSLDPEYLKPLLILSASNLAKPSGFIKNTVYMLWALPEDAHKASLLKYEAILPNIRFSGKNLAGTDVRSPRKMAGLTEELLYELERIPEKYWTEEHIGDIIAPFIKSIAHLQVIENGVKAKGWGWEFLRWVLNASVPGPDLKGTMVVLGREETVARVKQAHAVALSMGY

SEQ ID NO: 23402 - DNA, 3285 bp, Muscodor strobelii
  misc_feature: SGI EST ID NO. CUFF.55129.0
  misc_feature: Variant of the nucleotide sequence at SEQ ID NO 23400
aatctcaaggtctagttgatcaaaagagactacaattgggcgacgagtccccatagccaatatagcatgtcataaaataccaattatgatctcgaacggtttgttcgtcgctcgaggcgttctacgtcgccaacggacctcgctcctcttcgtgcgaaacaatttctcagggcgtccagctcgccaaaagccaaatttggctctgccatcgacgccagcgagaacacgctttgctccttcaccaactggctacgttcacatcgggtcattgcggacggcactcttcaactatttgcttgctaaagctactggtggtcaattcctcctcagactcgaagacactgatcagaaacggctggttcctgatgccgaagagaaattgtatcaagatctaaaatgggctgggcttaactgggatgaaggacctgacgttgggggtcctcatggcccatataagcagtccgagagattatcaacatataaagagcattccgaccgcctcctggagcgcggcgaggcatatcggtgtttctgcagtccaacggagctacacacaatgaagaagctcgcgttggaggaaaatcgcgatcccatatacaacggcaaatgttctcacatttctgccgaagaatctgcccaacgagccgcagacggcgaagaacattgcgttcgcttgaaatctcctgcaaaagcaccgccggtgagcgatcttgtctacggcaattacatgagtcccgtgccgctggatgacttcatcgtcatgaagagagacgggttcccgacttatcattttgctaatgttattgatgaccaccttatgggtattacacatgtcattcgaggagcggaatggttggtgtcgacaccacgccacgtagctctgtataacacattcggctggcagcctcccaaatttgcccatgtcgggttgttggtcgataagaacaagcaaaaactaagcaagcgattcggtggattcagtctttctaactggaaagaaagcgggattctgcctatcgctctactgaactatgtccttcttatgggatggtctcccgcgagggaagtgggagaagacaagtctgaagtcatgaatatgaaagagatgattgaaaagttccacctcaagttcaccaaaggcgacgtgacagtaaacaacaaagacgtacatttccaaaaggcacacgcccgccaggcattggccagcgggttagacggcgacacagtagcagcccctatcctaaacaaaataacaaactccatccaagagtacgagaagcaacgagtttctccagatgaccacaaaactctagaagaagagttcgaagtcccatcaatcggacccttgaggagtcaatctctggatccagaatacctaaaacccctcttaatcctcagcgcgtccaacctagccaagccgtcaggattcataaagaacaccgtctacatgctctgggccctccccgaagacgcgcacaaagccagtctcttgaaatacgaggccatcctccccaatatccgtttctcggggaaaaacctagcaggtactgacgtccgcagtccgcggaaaatggcagggctgactgaggaactgctctatgaacttgagcggatcccggagaaatactggacggaggagcatatcggcgacatcatcgcgccgttcatcaaatcaatcgcgcatctgcaagtgatcgagaacggcgtcaaggcgaagggatggggctgggagttcctacgctgggtccttaatgcctctgttcccggcccggacttaaaaggaaccatggtagtcctcggaagagaagaaacagtggctcgcgtaaaacaggcacatgccgtagccttgagcatgggatattgagccaggttgttgtaatcaaagaaagcaaagatgtaccattgatgtagctagaccgtgtacaaacgcctgtagtatagatctccgaccccgtaaaacgccgcccgatgcatgaatcttcgtgtcacgtaagaatctcgcctcctctatcaccagtcatgactcctttggacttcctctcctcgccttagtatctaagcaactccactgtctacgttcatagcgtcgctcgaggagtcaagaccattgaagatcttggacttgacgtctcccgacatcagaccctgtcgctccttcatggcgatagaatggctggctttggtgaccttctccatctcgagatctgtcgtcttgttgcccgagaacatggaagcacccctactgcttcgctgcacggcctgggtagcctctcggattttggacgtcagatctatcatctgcttgttgccgaactcgcggttggtgagcagggggttctgggacagggtctggacccagtacttgttccagagcagctcgagcaggtgggagtcgagggtggacttgaagtgggagacctcgagggagtagtacttgtcggcgtgggcgccgaagtcctcggccttgtagagcggcacggcgacgttcgaggtagtgtcgtcagtagtgttggcgcgcttgggcgggggctggtagctgtcggggaaggtgcggaaggcgccgatgtcgacgcggccggctgagatggtgcggtcggggtcgatgacgacggcgacgtaggggtcgaagttctggcacaggctctgggtggagacgtcgatgccggacagccagcagccgtagcccgggtgggagtggtaccagccgacggcgttctcctggcgcgacccttgctcgcgggcgaggcgcaggtactcgacctggtactcgtcggcgtcggcgtgggcgttgacgcgggtctcggtgccctcgacgggcaggccgaaggcgtcggtgacgacgatggtgtcgccctgggtgtagccctgcatcatgcccatgatctcgagctcgccgcccgaccgcgcgtgcatcaccatcttgatcagcgccaccgccgagatgcgcacgtgcttgaagtggtgcgggtccgccttccacggcttgcccgcgttgatcttgtcctggtggtccgcgtcgaacttgtacagcgcatcgcgggccgggtcgaccagcttgacgtcgttgtcgagctctgtttgcttgttgtcagttcatgctcgggagcacataatagcgtaataagtgtagtagcttagttgcttaccccacgacttcatagccacctccattttggctgtgtggtggaccaaaacgtaaaggtggtgttgtatctaggtttacgtgtaggtcgtggaggggaagtggaatatgaagcttgacgatgtccagttcgggatgatggc

SEQ ID NO: 23403 - DNA, 1044 bp, Muscodor strobelii
  misc_feature: SGI cDNA ID NO. 567963
  misc_feature: Encodes the peptide sequence at SEQ ID NO 23404
atggaggtggctatgaagtcgtgggagctcgacaacgacgtcaagctggtcgacccggcccgcgatgcgctgtacaagttcgacgcggaccaccaggacaagatcaacgcgggcaagccgtggaaggcggacccgcaccacttcaagcacgtgcgcatctcggcggtggcgctgatcaagatggtgatgcacgcgcggtcgggcggcgagctcgagatcatgggcatgatgcagggctacacccagggcgacaccatcgtcgtcaccgacgccttcggcctgcccgtcgagggcaccgagacccgcgtcaacgcccacgccgacgccgacgagtaccaggtcgagtacctgcgcctcgcccgcgagcaagggtcgcgccaggagaacgccgtcggctggtaccactcccacccgggctacggctgctggctgtccggcatcgacgtctccacccagagcctgtgccagaacttcgacccctacgtcgccgtcgtcatcgaccccgaccgcaccatctcagccggccgcgtcgacatcggcgccttccgcaccttccccgacagctaccagcccccgcccaagcgcgccaacactactgacgacactacctcgaacgtcgccgtgccgctctacaaggccgaggacttcggcgcccacgccgacaagtactactccctcgaggtctcccacttcaagtccaccctcgactcccacctgctcgagctgctctggaacaagtactgggtccagaccctgtcccagaaccccctgctcaccaaccgcgagttcggcaacaagcagatgatagatctgacgtccaaaatccgagaggctacccaggccgtgcagcgaagcagtaggggtgcttccatgttctcgggcaacaagacgacagatctcgagatggagaaggtcaccaaagccagccattctatcgccatgaaggagcgacagggtctgatgtcgggagacgtcaagtccaagatcttcaatggtcttgactcctcgagcgacgctatgaacgtagacagtggagttgcttag

SEQ ID NO: 23404 - protein, 347 aa, Muscodor strobelii
  misc_feature: SGI Peptide ID NO. 567963
  misc_feature (46)..(161): Pfam Id: PF01398 Pfam Desc: Mov34/MPN/PAD-1 family
  misc_feature (4)..(338): NCBI GI: 46111405 Blast Desc: FG02584.1 [Gibberella zeae PH-1] gi|83288034|sp|Q4IJM4.1|CSN5_GIBZE RecName: Full=COP9 signalosome complex subunit 5
  misc_feature (1)..(332): NCBI GI: 39939932 Blast Desc: MGG_05274 [Magnaporthe grisea 70-15] gi|145010444|gb|EDJ95100.1| MGG_05274 [Magnaporthe grisea 70-15]
  misc_feature (4)..(338): NCBI GI: 256726167 Blast Desc: [Nectria haematococca mpVI 77-13-4]
  misc_feature (1)..(336): NCBI GI: 154303114 Blast Desc: BC1G_09577 [Botryotinia fuckeliana B05.10] gi|150855040|gb|EDN30232.1| BC1G_09577 [Botryotinia fuckeliana B05.10]
  misc_feature (1)..(339): NCBI GI: 156058672 Blast Desc: SS1G_03348 [Sclerotinia sclerotiorum 1980] gi|154701135|gb|EDO00874.1| SS1G_03348 [Sclerotinia sclerotiorum 1980]
  misc_feature (5)..(346): NCBI GI: 261358394 Blast Desc: COP9 signalosome complex subunit 5 [Verticillium albo-atrum VaMs.102]
  misc_feature (2)..(333): NCBI GI: 115387987 Blast Desc: COP9 signalosome complex subunit 5 [Aspergillus terreus NIH2624] gi|114195583|gb|EAU37283.1| COP9 signalosome complex subunit 5 [Aspergillus terreus NIH2624]
  misc_feature (1)..(333): NCBI GI: 240107077 Blast Desc: COP9 signalosome complex subunit 5, [Coccidioides posadasii C735 delta SOWgp]
  misc_feature (1)..(337): NCBI GI: 225682108 Blast Desc: COP9 signalosome complex subunit 5 [Paracoccidioides brasiliensis Pb03] gi|226289288|gb|EEH44800.1| COP9 signalosome complex subunit 5 [Paracoccidioides brasiliensis Pb18]
  misc_feature (1)..(333): NCBI GI: 258566744 Blast Desc: COP9 signalosome complex subunit 5 [Uncinocarpus reesii 1704] gi|237905562|gb|EEP79963.1| COP9 signalosome complex subunit 5 [Uncinocarpus reesii 1704]
  misc_feature (33)..(283): SWISSPROT Homolog: EC 3.1.2.15 Ubiquitin thiolesterase
MEVAMKSWELDNDVKLVDPARDALYKFDADHQDKINAGKPWKADPHHFKHVRISAVALIKMVMHARSGGELEIMGMMQGYTQGDTIVVTDAFGLPVEGTETRVNAHADADEYQVEYLRLAREQGSRQENAVGWYHSHPGYGCWLSGIDVSTQSLCQNFDPYVAVVIDPDRTISAGRVDIGAFRTFPDSYQPPPKRANTTDDTTSNVAVPLYKAEDFGAHADKYYSLEVSHFKSTLDSHLLELLWNKYWVQTLSQNPLLTNREFGNKQMIDLTSKIREATQAVQRSSRGASMFSGNKTTDLEMEKVTKASHSIAMKERQGLMSGDVKSKIFNGLDSSSDAMNVDSGVA

SEQ ID NO: 23405 - DNA, 2577 bp, Muscodor strobelii
  misc_feature: SGI EST ID NO. CUFF.55130.1
  misc_feature: Variant of the nucleotide sequence at SEQ ID NO 23403
cttgcaccccactagccgttcgttgtcggcgctgtccttgccgcctgccgttgcctgtgttagcagctccaacatctactaccccacattgccatcatcccgaactggacatcgtcaagcttcatattccacttcccctccacgacctacacgtaaacctagatacaacaccacctttacgttttggtccaccacacagccaaaatggaggtggctatgaagtcgtgggagctcgacaacgacgtcaagctggtcgacccggcccgcgatgcgctgtacaagttcgacgcggaccaccaggacaagatcaacgcgggcaagccgtggaaggcggacccgcaccacttcaagcacgtgcgcatctcggcggtggcgctgatcaagatggtgatgcacgcgcggtcgggcggcgagctcgagatcatgggcatgatgcagggctacacccagggcgacaccatcgtcgtcaccgacgccttcggcctgcccgtcgagggcaccgagacccgcgtcaacgcccacgccgacgccgacgagtaccaggtcgagtacctgcgcctcgcccgcgagcaagggtcgcgccaggagaacgccgtcggctggtaccactcccacccgggctacggctgctggctgtccggcatcgacgtctccacccagagcctgtgccagaacttcgacccctacgtcgccgtcgtcatcgaccccgaccgcaccatctcagccggccgcgtcgacatcggcgccttccgcaccttccccgacagctaccagcccccgcccaagcgcgccaacactactgacgacactacctcgaacgtcgccgtgccgctctacaaggccgaggacttcggcgcccacgccgacaagtactactccctcgaggtctcccacttcaagtccaccctcgactcccacctgctcgagctgctctggaacaagtactgggtccagaccctgtcccagaaccccctgctcaccaaccgcgagttcggcaacaagcagatgatagatctgacgtccaaaatccgagaggctacccaggccgtgcagcgaagcagtaggggtgcttccatgttctcgggcaacaagacgacagatctcgagatggagaaggtcaccaaagccagccattctatcgccatgaaggagcgacagggtctgatgtcgggagacgtcaagtccaagatcttcaatggtcttgactcctcgagcgacgctatgaacgtagacagtggagttgcttagatactaaggcgaggagaggaagtccaaaggagtcatgactggtgatagaggaggcgagattcttacgtgacacgaagattcatgcatcgggcggcgttttacggggtcggagatctatactacaggcgtttgtacacggtctagctacatcaatggtacatctttgctttctttgattacaacaacctggctcaatatcccatgctcaaggctacggcatgtgcctgttttacgcgagccactgtttcttctcttccgaggactaccatggttccttttaagtccgggccgggaacagaggcattaaggacccagcgtaggaactcccagccccatcccttcgccttgacgccgttctcgatcacttgcagatgcgcgattgatttgatgaacggcgcgatgatgtcgccgatatgctcctccgtccagtatttctccgggatccgctcaagttcatagagcagttcctcagtcagccctgccattttccgcggactgcggacgtcagtacctgctaggtttttccccgagaaacggatattggggaggatggcctcgtatttcaagagactggctttgtgcgcgtcttcggggagggcccagagcatgtagacggtgttctttatgaatcctgacggcttggctaggttggacgcgctgaggattaagaggggttttaggtattctggatccagagattgactcctcaagggtccgattgatgggacttcgaactcttcttctagagttttgtggtcatctggagaaactcgttgcttctcgtactcttggatggagtttgttattttgtttaggataggggctgctactgtgtcgccgtctaacccgctggccaatgcctggcgggcgtgtgccttttggaaatgtacgtctttgttgtttactgtcacgtcgcctttggtgaacttgaggtggaactgttgtttgcgcatcagtagctgacttcgaaatacggagtcaaaattaaatgagaaatggagggagagatggaagaatggtcctagttgtgctagttattagggcgggaaatagcttaccttttcaatcatctctttcatattcatgacttcagacttgtcttctcccacttccctcgcgggagaccatcccataagaaggacatagttcagtagagcgataggcagaatcccgctttctttccagttagaaagactgaatccaccgaatcgcttgcttagtttttgcttgttcttatcgaccaacaacccgacatgggcaaatttgggaggctgccagccgaatgtgttatacagagctacgtggcgtggtgtcgacaccaaccattcc

SEQ ID NO: 23406 - DNA, 756 bp, Muscodor strobelii
  misc_feature: SGI cDNA ID NO. 567964
  misc_feature: Encodes the peptide sequence at SEQ ID NO 23407
atgtccagagccactatcctaaggccaatacggcagtccttgtcgcggcctctcgtcggccaaagtcgacatgttattcctggtcttgtcaccacgcgctcgctcgcatcaatagtcgatgaggatgctaagccccctcagttgttaaacgagcagcccaatcctgtcgatgcgaagagtgttcgatatccccgagctgtccaagccgtctatcttcaacccctccgacgagaagccgaatttggtgtaccgtcatgcgatctccagctcagatcctacagcatccctaatctagagttcttctgcgacttcgccctccgagccgcctactatctcggtctcccagccttcggccccgtaccactacccaaaatcaccgagcgatggaccgtcccgaggtctcacttcatcttcaaaaaatcacaggaaaactttgagcgtatcactcggaggagattaatacagatcagggatgggcacccggagaccgttcagatctggctagcctttttgcaaaaacacgcctactacggtatcggtatgaaggcaaacatgtgggagtattgttcgcttgatgccggcaagcagatggactcggagacacagtcgatgcagaaggccattgatgaaaagatagaaatgctcggtgctaaccaagttctgggtacggtggagaaggtcaaggagatgatggccagcgagaaattccaggctacctttaaaaatggtcattacaagttgagggaacagaattaa

SEQ ID NO: 23407 - protein, 251 aa, Muscodor strobelii
  misc_feature: SGI Peptide ID NO. 567964
  misc_feature (12)..(238): NCBI GI: 156064357 Blast Desc: SS1G_00186 [Sclerotinia sclerotiorum 1980] gi|154691048|gb|EDN90786.1| SS1G_00186 [Sclerotinia sclerotiorum 1980]
  misc_feature (50)..(238): NCBI GI: 154312142 Blast Desc: BC1G_06104 [Botryotinia fuckeliana B05.10] gi|150850067|gb|EDN25260.1| BC1G_06104 [Botryotinia fuckeliana B05.10]
  misc_feature (10)..(237): NCBI GI: 256726231 Blast Desc: [Nectria haematococca mpVI 77-13-4]
  misc_feature (10)..(237): NCBI GI: 46111449 Blast Desc: FG02606.1 [Gibberella zeae PH-1] gi|83305671|sp|Q4IJK2.1|RT10_GIBZE RecName: Full=30S ribosomal protein S10, mitochondrial; AltName: Full=Mitochondrial ribosomal
  misc_feature (62)..(239): NCBI GI: 85084029 Blast Desc: NCU00114 [Neurospora crassa OR74A] gi|74628428|sp|Q7RYL4.1|RT10_NEUCR RecName: Full=30S ribosomal protein S10, mitochondrial; AltName: Full=Mitochondrial ribosomal
  misc_feature (62)..(235): NCBI GI: 171685680 Blast Desc: protein product [Podospora anserina] gi|170942801|emb|CAP68454.1| protein product [Podospora anserina]
  misc_feature (35)..(235): NCBI GI: 145611326 Blast Desc: MGG_11573 [Magnaporthe grisea 70-15] gi|145018631|gb|EDK02910.1| MGG_11573 [Magnaporthe grisea 70-15]
  misc_feature (62)..(247): NCBI GI: 116208154 Blast Desc: CHGG_03370 [Chaetomium globosum CBS 148.51] gi|88183967|gb|EAQ91435.1| CHGG_03370 [Chaetomium globosum CBS 148.51]
  misc_feature (60)..(199): NCBI GI: 261358416 Blast Desc: 30S ribosomal protein S10 [Verticillium albo-atrum VaMs.102]
  misc_feature (26)..(236): NCBI GI: 226280234 Blast Desc: 30S ribosomal protein S10 [Paracoccidioides brasiliensis Pb01]
MSRATILRPIRQSLSRPLVGQSRHVIPGLVTTRSLASIVDEDAKPPQLLNEQPNPVDAKSVRYPRAVQAVYLQPLRREAEFGVPSCDLQLRSYSIPNLEFFCDFALRAAYYLGLPAFGPVPLPKITERWTVPRSHFIFKKSQENFERITRRRLIQIRDGHPETVQIWLAFLQKHAYYGIGMKANMWEYCSLDAGKQMDSETQSMQKAIDEKIEMLGANQVLGTVEKVKEMMASEKFQATFKNGHYKLREQN

SEQ ID NO: 23408 - DNA, 967 bp, Muscodor strobelii
  misc_feature: SGI EST ID NO. CUFF.55222.0
  misc_feature: Variant of the nucleotide sequence at SEQ ID NO 23406
cccagactggacctcagcgtcgcgcatcgaaccatcaaatcttggatgatcagtgttggacctcgtctgctggcatgtcaacgccaattccagcatcatgtccagagccactatcctaaggccaatacggcagtccttgtcgcggcctctcgtcggccaaagtcgacatgttattcctggtcttgtcaccacgcgctcgctcgcatcaatagtcgatgaggatgctaagccccctcagttgttaaacgagcagcccaatcctgtcgatgcgaagagtgttcgatatccccgagctgtccaagccgtctatcttcaacccctccgacgagaagccgaatttggtgtaccgtcatgcgatctccagctcagatcctacagcatccctaatctagagttcttctgcgacttcgccctccgagccgcctactatctcggtctcccagccttcggccccgtaccactacccaaaatcaccgagcgatggaccgtcccgaggtctcacttcatcttcaaaaaatcacaggaaaactttgagcgtatcactcggaggagattaatacagatcagggatgggcacccggagaccgttcagatctggctagcctttttgcaaaaacacgcctactacggtatcggtatgaaggcaaacatgtgggagtattgttcgcttgatgccggcaagcagatggactcggagacacagtcgatgcagaaggccattgatgaaaagatagaaatgctcggtgctaaccaagttctgggtacggtggagaaggtcaaggagatgatggccagcgagaaattccaggctacctttaaaaatggtcattacaagttgagggaacagaattaatcgaaggacatctgatgtctttcatgtaaaaccaacattggacatacattgtagctcaaatgtagaatacaacaattgtacatcacttcgaaatagacaagaattggccgagga

SEQ ID NO: 23409 - DNA, 891 bp, Muscodor strobelii
  misc_feature: SGI cDNA ID NO. 567965
  misc_feature: Reduced expression when VOC is produced
  misc_feature: Encodes the peptide sequence at SEQ ID NO 23410
atgccacaggatgcagagcagctcagagtccaaaggagagagatgctggcttgcttgttggctattgggctagatcccgagaaatgcactctgttttaccagtcttctgtgacacaacatgccgagctcatgtggattcttagctgttcatcgtccatgggctatctaggacgtatgacacaatacaagagtaaactccagtctacagacaaacaaggcagcctcgagcatgcgatggatacccgcttgaaactgggtctattctcctatcctgtgttacaagcagccgacatcctcgtccatcgcgccacgcacgtacccgtgggtgacgatcaaaggcagcatctcgaattcgcacgagaatgtgtgacgaatttccgacatacttacgaaagtaaggcgctcgtcccgcccgagactataactgctccatctgcacgtgttatgtctctcacaaacccgacggaaaagatgtcgaaatcagctctgaaggaatcatcacgtatcaacattacggcaacagaagccgaaatccgaaaatatatcatgggcgccaggacagacagcatggattatgcgtcatatgatccggtaaaccgacccggggtgtcaaatcttctggatatactcgcgcaatgtagcagcgaacccatgacgccagaagaagctgcggattcgcttgttgccggaacgaataaagagctcaaggagcgtaccgctgaagctgtggtgaaggagctcgcgggtgtgagtgagaaatatagagaggtgcttaaccgtaacggtggcaagtatcttgctgatgttgaggccgcgggtgctgaagttgcgagaaacaatgccgaggagactatggtactcgtgcgacaggctgtgggattagcgtattga

SEQ ID NO: 23410 - protein, 296 aa, Muscodor strobelii
  misc_feature: SGI Peptide ID NO. 567965
  misc_feature (1)..(248): Pfam Id: PF00579 Pfam Desc: tRNA synthetases class I (W and Y)
  misc_feature (2)..(248): Pfam Id: PF00579 Pfam Desc: tRNA synthetases class I (W and Y)
  misc_feature (1)..(294): NCBI GI: 261358417 Blast Desc: tryptophanyl-tRNA synthetase [Verticillium albo-atrum VaMs.102]
  misc_feature (1)..(294): NCBI GI: 256726230 Blast Desc: [Nectria haematococca mpVI 77-13-4]
  misc_feature (1)..(294): NCBI GI: 46111447 Blast Desc: FG02605.1 [Gibberella zeae PH-1]
  misc_feature (1)..(294): NCBI GI: 240110903 Blast Desc: tryptophanyl-tRNA synthetase, [Coccidioides posadasii C735 delta SOWgp]
  misc_feature (1)..(294): NCBI GI: 242824186 Blast Desc: tryptophanyl-tRNA synthetase, [Talaromyces stipitatus ATCC 10500] gi|218713128|gb|EED12553.1| tryptophanyl-tRNA synthetase, [Talaromyces stipitatus ATCC 10500]
  misc_feature (1)..(294): NCBI GI: 70984042 Blast Desc: tryptophanyl-tRNA synthetase [Aspergillus fumigatus Af293] gi|66845170|gb|EAL85505.1| tryptophanyl-tRNA synthetase, [Aspergillus fumigatus Af293]
  misc_feature (1)..(294): NCBI GI: 159122329 Blast Desc: tryptophanyl-tRNA synthetase, [Aspergillus fumigatus A1163]
  misc_feature (1)..(294): NCBI GI: 171685682 Blast Desc: protein product [Podospora anserina] gi|170942802|emb|CAP68455.1| protein product [Podospora anserina]
  misc_feature (1)..(294): NCBI GI: 259480053 Blast Desc: TPA: tryptophanyl-tRNA synthetase, (AFU_orthologue; AFUA_6G05340) [Aspergillus nidulans FGSC A4]
  misc_feature (1)..(294): NCBI GI: 169776869 Blast Desc: [Aspergillus oryzae RIB40] gi|83771637|dbj|BAE61767.1| protein product [Aspergillus oryzae]
  misc_feature (1)..(295): SWISSPROT Homolog: EC 6.1.1.2 Tryptophan--tRNA ligase
  misc_feature: Useful for introducing or modulating the production of volatile compounds
MPQDAEQLRVQRREMLACLLAIGLDPEKCTLFYQSSVTQHAELMWILSCSSSMGYLGRMTQYKSKLQSTDKQGSLEHAMDTRLKLGLFSYPVLQAADILVHRATHVPVGDDQRQHLEFARECVTNFRHTYESKALVPPETITAPSARVMSLTNPTEKMSKSALKESSRINITATEAEIRKYIMGARTDSMDYASYDPVNRPGVSNLLDILAQCSSEPMTPEEAADSLVAGTNKELKERTAEAVVKELAGVSEKYREVLNRNGGKYLADVEAAGAEVARNNAEETMVLVRQAVGLAY

SEQ ID NO: 23411 - DNA, 1438 bp, Muscodor strobelii
  misc_feature: SGI EST ID NO. CUFF.55080.0
  misc_feature: Variant of the nucleotide sequence at SEQ ID NO 23409
tataatcaatgttaactaacaatactttgtaggctcaaaatcgttgagaatttttgaagtctcgcaactaagaactagctcgtatggtcgtaccgtagcatttcatctcaaatctcagtctctttgaggggagagccattcggccaaagatataaatgctatcggtagcaagaacttgtctgcgatgccgtctcgctcgcccgacgcgacgggttctactctctgcacaaaatcgctacaagtcagatgatgcatatcagccaaggcctgccgttatcttctcagggatccagcccaccggcgtccctcatctcggcaattacctcggtgccttgaggcagtggaagatcttgcaagatcatgctggtccagatgacaggctatatttttcaatagtcgatctacacgccatcacaatgccacaggatgcagagcagctcagagtccaaaggagagagatgctggcttgcttgttggctattgggctagatcccgagaaatgcactctgttttaccagtcttctgtgacacaacatgccgagctcatgtggattcttagctgttcatcgtccatgggctatctaggacgtatgacacaatacaagagtaaactccagtctacagacaaacaaggcagcctcgagcatgcgatggatacccgcttgaaactgggtctattctcctatcctgtgttacaagcagccgacatcctcgtccatcgcgccacgcacgtacccgtgggtgacgatcaaaggcagcatctcgaattcgcacgagaatgtgtgacgaatttccgacatacttacgaaagtaaggcgctcgtcccgcccgagactataactgctccatctgcacgtgttatgtctctcacaaacccgacggaaaagatgtcgaaatcagctctgaaggaatcatcacgtatcaacattacggcaacagaagccgaaatccgaaaatatatcatgggcgccaggacagacagcatggattatgcgtcatatgatccggtaaaccgacccggggtgtcaaatcttctggatatactcgcgcaatgtagcagcgaacccatgacgccagaagaagctgcggattcgcttgttgccggaacgaataaagagctcaaggagcgtaccgctgaagctgtggtgaaggagctcgcgggtgtgagtgagaaatatagagaggtgcttaaccgtaacggtggcaagtatcttgctgatgttgaggccgcgggtgctgaagttgcgagaaacaatgccgaggagactatggtactcgtgcgacaggctgtgggattagcgtattgatgcggattgttagatttctgtcatccacatgacaagactgtacaactacctgtgtattatacatgtacaaattctgtacgtactcaacctattccgataatggatgacaaaatgacgattcactcctcgta

SEQ ID NO: 23412 - DNA, 1566 bp, Muscodor strobelii
  misc_feature: SGI cDNA ID NO. 567966
  misc_feature: Reduced expression when VOC is produced
  misc_feature: Encodes the peptide sequence at SEQ ID NO 23413
atggaagaagtcgacgtgctcatcgtcggaggcggttcagccggactatgcgccggcgtttggctcgcccgcgccgggatctcctaccgcattctcgagcgccgacccggaagactggagataggacaagcggacggtgtgcaagttcggactgtcgaattatttgagagcttcggacttgaggatcggttgttgacgaaggcttatcacgttcttgaagatgcattttggtcggatgaaggaaacatagatgagggcatacggcggacgagctcggcgcctgataccgaggctgggttaagtcatcttccgcatgttattttgaatcgtgcgtcgcttttccagtcactagtcaacgccaccctcacggacgaaatggaccgagctgctggatcgacaaacatcatttacggttgcgattttaaaagcctggagatcgatgagaaattggcagatgatccggacgcatattgcattactgccacagccactaaagatgatatcgagaaagtatacaaggctaaatacttgctgggcagtgatggtgctcatagccaagttcgaaaggcttgtgatattcgcatggttggtggaagtgacccatacgaaatcgacttcgcagaaacagcctggtggtccgcctacgtgatcggtcaacgtctcgcagacgcattccacgttcatcatcgggtcttcctgggcggcgacgcatgccatacgcactctcccaaagccggtcaagggatgaatgtttctctccaagatggttacaatattgggtggaagttagctgccgttctacggaagcaagttcagccgaaattactcgagacgtatgtccttgagcgtcacagcacagccgcggatcttattgaatttgatcgatactggaccaagttgttttcgacatctgagaaagagagtggtggtgggattacaccagagttgtttgttaaagcggggagggccggattagccacgaagtacgaagactcgatgattacctcagcggcgacaagtcatagctcgctcgcgaagagcctgacagtcggaatgcggtttccaggtgcccaagttatccgagtctgtgatgcacgacaccgcccccttacaacagcactccctgccgattcgcgttggcatatagtagtctttggaggcgacgtggcagaggaagctagcgcgaggcggctacaaaagccggcatcggacttggaggtgatgatcagtaaattcacagcccctggatccgacgcagatagcatattgaacactgttcttgttctgtcttctaagcgcagcaatgtgtcattggaaaatatcccaccatgttttacaccagtgacaggcaaatggaacatgcaaaatgtcttgaacatatttgtcgatgatgaggggcacaacaactctggccacggtcacgcgtatgatgcgtatgggatagatccgagtcagggtgctctaattattgtacgcccagatcagtatattgcaaggataggttcattggaggatgtctcgggcgttgagacattttttgaaggtttcctcaaagtatatacgtag

SEQ ID NO: 23413 - protein, 521 aa, Muscodor strobelii
  misc_feature: SGI Peptide ID NO. 567966
  misc_feature (3)..(294): Pfam Id: PF01494 Pfam Desc: FAD binding domain
  misc_feature (323)..(486): Pfam Id: PF07976 Pfam Desc: Phenol hydroxylase, C-terminal dimerisation domain
  misc_feature (5)..(28): Pfam Id: PF01266 Pfam Desc: FAD dependent oxidoreductase
  misc_feature (5)..(26): Pfam Id: PF00890 Pfam Desc: FAD binding domain
  misc_feature (211)..(294): Pfam Id: PF01494 Pfam Desc: FAD binding domain
  misc_feature (3)..(77): Pfam Id: PF01494 Pfam Desc: FAD binding domain
  misc_feature (3)..(35): Pfam Id: PF01946 Pfam Desc: Thi4 family
  misc_feature (2)..(517): NCBI GI: 116191227 Blast Desc: CHGG_05331 [Chaetomium globosum CBS 148.51] gi|88181244|gb|EAQ88712.1| CHGG_05331 [Chaetomium globosum CBS 148.51]
  misc_feature (1)..(516): NCBI GI: 242770503 Blast Desc: phenol 2-monooxygenase, [Talaromyces stipitatus ATCC 10500] gi|218725190|gb|EED24607.1| phenol 2-monooxygenase, [Talaromyces stipitatus ATCC 10500]
  misc_feature (3)..(517): NCBI GI: 259489242 Blast Desc: TPA: phenol 2-monooxygenase, (AFU_orthologue; AFUA_6G11480) [Aspergillus nidulans FGSC A4]
  misc_feature (3)..(476): NCBI GI: 67516443 Blast Desc: AN0503.2 [Aspergillus nidulans FGSC A4] gi|40747446|gb|EAA66602.1| AN0503.2 [Aspergillus nidulans FGSC A4]
  misc_feature (201)..(517): NCBI GI: 171681124 Blast Desc: protein product [Podospora anserina] gi|170940520|emb|CAP65748.1| protein product [Podospora anserina]
  misc_feature (201)..(516): NCBI GI: 212541793 Blast Desc: phenol 2-monooxygenase, [Penicillium marneffei ATCC 18224] gi|210065958|gb|EEA20051.1| phenol 2-monooxygenase, [Penicillium marneffei ATCC 18224]
  misc_feature (201)..(517): NCBI GI: 164424119 Blast Desc: NCU05708 [Neurospora crassa OR74A] gi|157070382|gb|EAA33834.2| NCU05708 [Neurospora crassa OR74A]
  misc_feature (1)..(398): NCBI GI: 115385537 Blast Desc: conserved [Aspergillus terreus NIH2624] gi|114187762|gb|EAU29462.1| conserved [Aspergillus terreus NIH2624]
  misc_feature (201)..(517): NCBI GI: 189199948 Blast Desc: phenol 2-monooxygenase [Pyrenophora tritici-repentis Pt-1C-BFP] gi|187983410|gb|EDU48898.1| phenol 2-monooxygenase [Pyrenophora tritici-repentis Pt-1C-BFP]
  misc_feature (201)..(521): NCBI GI: 255943979 Blast Desc: Pc20g01980 [Penicillium chrysogenum Wisconsin 54-1255] gi|211587492|emb|CAP85527.1| Pc20g01980 [Penicillium chrysogenum Wisconsin 54-1255]
  misc_feature (201)..(517): SWISSPROT Homolog: EC 1.14.13.7 Phenol 2-monooxygenase
  misc_feature: Useful for introducing or modulating the production of volatile compounds
MEEVDVLIVGGGSAGLCAGVWLARAGISYRILERRPGRLEIGQADGVQVRTVELFESFGLEDRLLTKAYHVLEDAFWSDEGNIDEGIRRTSSAPDTEAGLSHLPHVILNRASLFQSLVNATLTDEMDRAAGSTNIIYGCDFKSLEIDEKLADDPDAYCITATATKDDIEKVYKAKYLLGSDGAHSQVRKACDIRMVGGSDPYEIDFAETAWWSAYVIGQRLADAFHVHHRVFLGGDACHTHSPKAGQGMNVSLQDGYNIGWKLAAVLRKQVQPKLLETYVLERHSTAADLIEFDRYWTKLFSTSEKESGGGITPELFVKAGRAGLATKYEDSMITSAATSHSSLAKSLTVGMRFPGAQVIRVCDARHRPLTTALPADSRWHIVVFGGDVAEEASARRLQKPASDLEVMISKFTAPGSDADSILNTVLVLSSKRSNVSLENIPPCFTPVTGKWNMQNVLNIFVDDEGHNNSGHGHAYDAYGIDPSQGALIIVRPDQYIARIGSLEDVSGVETFFEGFLKVYT

SEQ ID NO: 23414 - DNA, 1602 bp, Muscodor strobelii
  misc_feature: SGI EST ID NO. CUFF.55089.0
  misc_feature: Variant of the nucleotide sequence at SEQ ID NO 23412
aagactacacggccacaaatttttatacgatgacggagattcaggcaactgaagaacgattattattgattgatgagctaacacgctatagacgattccacgtgaaggcgatttcctcctacgtctgtacatcgaaatgacgggtgaaactgccgctaaagacataacgctagcacaattgcaaggaaaagcgaaacaaatattatggtagatcagaacgttccggatctaaccattcaccatccgtaaaattgaaagcttcttctccaaaaactaatcggcgatccttcaacttagacccatacgaaatcgacttcgcagaaacagcctggtggtccgcctacgtgatcggtcaacgtctcgcagacgcattccacgttcatcatcgggtcttcctgggcggcgacgcatgccatacgcactctcccaaagccggtcaagggatgaatgtttctctccaagatggttacaatattgggtggaagttagctgccgttctacggaagcaagttcagccgaaattactcgagacgtatgtccttgagcgtcacagcacagccgcggatcttattgaatttgatcgatactggaccaagttgttttcgacatctgagaaagagagtggtggtgggattacaccagagttgtttgttaaagcggggaggtatacgtgagtatttaggtttcccttcatacgtaaccaagagtaccttacttggagaaatcgatacaaatcattctgcgacttgtcaacttacgaatataatcacttagggccggattagccacgaagtacgaagactcgatgattacctcagcggcgacaagtcatagctcgctcgcgaagagcctgacagtcggaatgcggtttccaggtgcccaagttatccgagtctgtgatgcacgacaccgcccccttacaacagcactccctgccgattcgcgttggcatatagtagtctttggaggcgacgtggcagaggaagctagcgcgaggcggctacaaaagccggcatcggacttggaggtgatgatcagtaaattcacagcccctggatccgacgcagatagcatattgaacactgttcttgttctgtcttctaagcgcagcaatgtgtcattggaaaatatcccaccatgttttacaccagtgacaggcaaatggaacatgcaaaatgtcttgaacatatttgtcgatgatgaggggcacaacaactctggccacggtcacgcgtatgatgcgtatgggatagatccgagtcagggtgctctaattattgtacgcccagatcagtatattgcaaggataggttcattggaggatgtctcgggcgttgagacattttttgaaggtttcctcaaagtatatacgtagacattttcacgtgcgttgaaggagttcctcaaaagactgagttggttatctcgagcgacgtggtatgtagggcgcaagggggcggcgaggtgatgaggaattagattctcgaacaatacaatattctattctcggtctcatgtcaaaggcgtcgattatatcactcgtcatcgtaggaagagactgtccgtctggccagaccatgtgtattacgggcgggagacaaa

SEQ ID NO: 23415 - DNA, 2379 bp, Muscodor strobelii
  misc_feature: SGI cDNA ID NO. 567967
  misc_feature: Encodes the peptide sequence at SEQ ID NO 23416
atgaattctctccacggattgtctcgacgagcaaaagagggcttactctctcgcaaacatggtaacgatgaagcttttgtccactcgaggctgaaagcctcgcaaggggaatcctggataagactcgtgtcgcttgaagaaggcagtaaaggcagcattctcaaatgcacgctcagggatgtcgacctagacgcgaatccccgacagccatatgacgcagtttcctattcatggcgcaaggacgtcctcgacaaccatgaaagtctatctgagtggtttccggacaagtattcgatgtacgatagacaagaggccgacaagggcaccaaactcatcctctgcaatgacaagacgatgcgcatccatcttaacctctatgattttcttgttcgcctacgtgccaaaaaccgtggtttgcccttgtggattgacgctatttgcattgaccaggatgagaatgacccagcagtccggagggagaaacttggacagctcaatatgatggggagaatctacgccaacgcggagaccgtgctcgtctggctcggggagtcgggaaatctcagctacagcttcgaccgcaaactcaacgacatgcaacagatgccggtggagtacgagccgtatgacactgaatacgacatctggaaagtccataagaagaagcctcctttgcgcatcgttggctatttgcaaggaacgggcatcatgagccttgctcacctagtgaaccgcgactatttccagcgatcatgggtagtacaggagatcgctcttgcgcgaaagctcatattctaccttgggggtatggaattatcacctgagagtttgctaggggccattcacaccatggcggcgtgtgatcttaatcagcatactgaagtcgtgagcccagccgaggtcagtgggtcgggatttcgggcaataccgcacatgcttcaggcacaggcgcacccgtctcggcatactgtgtggtcgttccgcgactacttgtttctatgccgcgatcgggcggccttccgagcagaggataaggtctttgcaatccttggtcttgtaggcgccgaaaagcgccagctgcttaccaaaaacgctattgggagcgatggtaagaccatcctgagtaagctgtatgccaactgtgcctttattttagcatccgagcacggttggccctatgtcctgtctttagtagcttgtggtgcagcagaaacgctggacctgtcaacttggattcctgatcttaggtttcgacttcagccaaagccgttttggtacttcggaagcactcacttttgcgcggcaacagatctggaaggtatcttcaccattatcgaagagaacagcagtagtcgacctgagatagaaggcgaaagctctacatcccagatgcctagccttggagcggctctgactctacgcatagcgtacatagatgaaattgtgcaagttagcgaaactcaagccgaactgctaccaacacaaatcaaatacgcgaaagggcatatactcgatctggtcacgaagctaggcacgcactacgcgaaaacatccgagttgagtatggatgcagtgatgaggaccctcaccgccgatgtattcgagcgagatcgcaagataccccttcccaagctacggcgggcattccttgcatggttctcactgcttgtgtctaatctcagctttgagccctccaaaacgaggccacaggacagcttcttccgcaacacggcgaagggccgactggctgtggagctacacaagacgagcgccataatagaggatatcgaggctgcggtaggggattttgttgatgtccatgacactcccgagtttccgtttctccgtcagctcacggcgggcggagctgtcagtaaacctatcaacgccgggaagcccgaacttattatttctggcgaagagctactcggtgtcgacgttgtggacgcgatggaagagcggctgaatagaatgatgggagaggatcataaagataaaaaggataggcgaaagcgtcttgtcacagagtgggaggccaacgacccgcacgtcttctggcagtacgaagaacaacaagttgggagcgtaaattgggttgcgaaccagatgttccgtcatcgtcgcatcttccgaacgaaagatcgaaatctcgtgggtatgggtcaccaggatgtgaagcctggggatgtcgtctgtctggtggctggagctgaaaccccttttgtcttccggaggtcacataacgccgcgccgaatcagactggaacggaattactacaagatcttagattagtcggaagtgcatatactcatggcatcatgtatggtgaatttcataaacacgtcgagcgtgagttcacaactgtaaaagtcagatag

SEQ ID NO: 23416 - protein, 792 aa, Muscodor strobelii
  misc_feature: SGI Peptide ID NO. 567967
  misc_feature (71)..(256): Pfam Id: PF06985 Pfam Desc: Heterokaryon incompatibility protein (HET)
  misc_feature (139)..(188): Pfam Id: PF06985 Pfam Desc: Heterokaryon incompatibility protein (HET)
  misc_feature (25)..(458): NCBI GI: 256728445 Blast Desc: NECHADRAFT_54320 [Nectria haematococca mpVI 77-13-4]
  misc_feature (39)..(562): NCBI GI: 156043030 Blast Desc: SS1G_11315 [Sclerotinia sclerotiorum 1980] gi|154695699|gb|EDN95437.1| SS1G_11315 [Sclerotinia sclerotiorum 1980]
  misc_feature (107)..(360): NCBI GI: 238492901 Blast Desc: AFLA_042250 [Aspergillus flavus NRRL3357] gi|220696181|gb|EED52523.1| AFLA_042250 [Aspergillus flavus NRRL3357]
  misc_feature (40)..(438): NCBI GI: 256721216 Blast Desc: NECHADRAFT_101059 [Nectria haematococca mpVI 77-13-4]
  misc_feature (84)..(435): NCBI GI: 169599709 Blast Desc: SNOG_02678 [Phaeosphaeria nodorum SN15] gi|111068289|gb|EAT89409.1| SNOG_02678 [Phaeosphaeria nodorum SN15]
  misc_feature (40)..(352): NCBI GI: 171688850 Blast Desc: protein product [Podospora anserina] gi|170944387|emb|CAP70497.1| protein product [Podospora anserina]
  misc_feature (40)..(544): NCBI GI: 171678233 Blast Desc: protein product [Podospora anserina] gi|170937186|emb|CAP61843.1| protein product [Podospora anserina]
  misc_feature (34)..(352): NCBI GI: 238483469 Blast Desc: conserved [Aspergillus flavus NRRL3357] gi|220701023|gb|EED57361.1| conserved [Aspergillus flavus NRRL3357]
  misc_feature (6)..(353): NCBI GI: 256731912 Blast Desc: NECHADRAFT_100683 [Nectria haematococca mpVI 77-13-4]
  misc_feature (35)..(352): NCBI GI: 256729340 Blast Desc: NECHADRAFT_84187 [Nectria haematococca mpVI 77-13-4]
MNSLHGLSRRAKEGLLSRKHGNDEAFVHSRLKASQGESWIRLVSLEEGSKGSILKCTLRDVDLDANPRQPYDAVSYSWRKDVLDNHESLSEWFPDKYSMYDRQEADKGTKLILCNDKTMRIHLNLYDFLVRLRAKNRGLPLWIDAICIDQDENDPAVRREKLGQLNMMGRIYANAETVLVWLGESGNLSYSFDRKLNDMQQMPVEYEPYDTEYDIWKVHKKKPPLRIVGYLQGTGIMSLAHLVNRDYFQRSWVVQEIALARKLIFYLGGMELSPESLLGAIHTMAACDLNQHTEVVSPAEVSGSGFRAIPHMLQAQAHPSRHTVWSFRDYLFLCRDRAAFRAEDKVFAILGLVGAEKRQLLTKNAIGSDGKTILSKLYANCAFILASEHGWPYVLSLVACGAAETLDLSTWIPDLRFRLQPKPFWYFGSTHFCAATDLEGIFTIIEENSSSRPEIEGESSTSQMPSLGAALTLRIAYIDEIVQVSETQAELLPTQIKYAKGHILDLVTKLGTHYAKTSELSMDAVMRTLTADVFERDRKIPLPKLRRAFLAWFSLLVSNLSFEPSKTRPQDSFFRNTAKGRLAVELHKTSAIIEDIEAAVGDFVDVHDTPEFPFLRQLTAGGAVSKPINAGKPELIISGEELLGVDVVDAMEERLNRMMGEDHKDKKDRRKRLVTEWEANDPHVFWQYEEQQVGSVNWVANQMFRHRRIFRTKDRNLVGMGHQDVKPGDVVCLVAGAETPFVFRRSHNAAPNQTGTELLQDLRLVGSAYTHGIMYGEFHKHVEREFTTVKVR

SEQ ID NO: 23417 - DNA, 1281 bp, Muscodor strobelii
  misc_feature: SGI cDNA ID NO. 567968
  misc_feature: Reduced expression when VOC is produced
  misc_feature: Encodes the peptide sequence at SEQ ID NO 23418
atggcggcctccggtgacacccccgacttgtatgaactacttggcgttgacaggaatgccgacgccaacgagattaagaaggcctatcgcaagctcgcactaaagcatcaccccgacaaggttcctgaggaccagcgagaagaggccgaagtcaccttcaaagccgtcacgcaagcctacgagattctccgagatgagaatacccgcgccagatacgaccaacatggcatggctgccttcgatcccagcatgggaggcggcatgggcgagggcgcagacatcaatgacatactgtcgcaaatgtttggtatgaacgttggtggcatgcctggcatgggcggtatgggtggtggcggtcctaggaggcctcgccgtggtcccgacgaggagtccaaatacagcgtcagcttggaagatctatacaagggaaagaccgtcaagttcgctgccaacaagtccgtcatctgtggtacttgcaagggctccggcggcaaggaccctaaagtgaaacccccacagtgtgacaggtgtaaaggtgccggcatggtcgagatactccgccagatgggccctgggttgatgacccggagtgctgctccctgtgacaggtgtttaggatctgggattctatggaaggacaaggaccgctgtaagaagtgcaaggggaagcgaactgtccaggaaaccaagcccctggagatatacattcctcgtggtgcttaccaaggcgaacgcatcgtattagacggcgaggccgaccagagtcccgaccaaacacctggcgatcttgtattcgtcctagtcgaagaacctcatgatgtcttccaccgtgttgggaatgacctatcggcagatctcgagatcacccttgccgaatcgctctgcggattctcgcgtaccgtcataacccatctcgatgggagaggtatccacttgtcccatccccgaggcaaaatcctgcacccgggacaagtactaaaggtcgagggcgagggaatgccgctgaaaaagggggagaccaagggtgatctatatctgattgtcaaggtggaattccccgaggacggctgggtcatggacgatgccacctacgagtcgcttcagaagctactccccggccctggaccggagatcaaggcagaggaagttgacgaggtagaatacgatgacgatgccgacattgacgagatgggtgcaaactcaggcgacccccgatacggagagggatgggaagacgacgacgatgaagagggtccacaagctcagtgtgcccaacagtaa

SEQ ID NO: 23418 - protein, 426 aa, Muscodor strobelii
  misc_feature: SGI Peptide ID NO. 567968
  misc_feature (9)..(73): Pfam Id: PF00226 Pfam Desc: DnaJ domain
  misc_feature (244)..(371): Pfam Id: PF01556 Pfam Desc: DnaJ C terminal region
  misc_feature (143)..(231): Pfam Id: PF00684 Pfam Desc: DnaJ central domain (4 repeats)
  misc_feature (244)..(354): Pfam Id: PF01556 Pfam Desc: DnaJ C terminal region
  misc_feature (2)..(426): NCBI GI: 85081771 Blast Desc: NCU00465 [Neurospora crassa OR74A] gi|28917861|gb|EAA27548.1| conserved [Neurospora crassa OR74A]
  misc_feature (9)..(426): NCBI GI: 261358107 Blast Desc: chaperone protein dnaJ 2 [Verticillium albo-atrum VaMs.102]
  misc_feature (9)..(407): NCBI GI: 171685930 Blast Desc: protein product [Podospora anserina] gi|170942926|emb|CAP68579.1| protein product [Podospora anserina]
  misc_feature (9)..(406): NCBI GI: 46116558 Blast Desc: FG04121.1 [Gibberella zeae PH-1]
  misc_feature (3)..(426): NCBI GI: 154303110 Blast Desc: BC1G_09575 [Botryotinia fuckeliana B05.10] gi|150855038|gb|EDN30230.1| BC1G_09575 [Botryotinia fuckeliana B05.10]
  misc_feature (9)..(426): NCBI GI: 39939982 Blast Desc: MGG_05249 [Magnaporthe grisea 70-15] gi|145010471|gb|EDJ95127.1| MGG_05249 [Magnaporthe grisea 70-15]
  misc_feature (9)..(426): NCBI GI: 119482127 Blast Desc: DnaJ domain protein (Mas5), [Neosartorya fischeri NRRL 181] gi|119409246|gb|EAW19195.1| DnaJ domain protein (Mas5), [Neosartorya fischeri NRRL 181]
  misc_feature (9)..(426): NCBI GI: 242817560 Blast Desc: DnaJ domain protein (Mas5), [Talaromyces stipitatus ATCC 10500] gi|218713445|gb|EED12869.1| DnaJ domain protein (Mas5), [Talaromyces stipitatus ATCC 10500]
  misc_feature (5)..(426): NCBI GI: 212530780 Blast Desc: DnaJ domain protein (Mas5), [Penicillium marneffei ATCC 18224] gi|210074945|gb|EEA29032.1| DnaJ domain protein (Mas5), [Penicillium marneffei ATCC 18224]
  misc_feature (9)..(426): NCBI GI: 146323060 Blast Desc: DnaJ domain protein (Mas5) [Aspergillus fumigatus Af293] gi|129558596|gb|EAL93927.2| DnaJ domain protein (Mas5), [Aspergillus fumigatus Af293] gi|159130020|gb|EDP55134.1| DnaJ
  misc_feature: Useful for introducing or modulating the production of volatile compounds
MAASGDTPDLYELLGVDRNADANEIKKAYRKLALKHHPDKVPEDQREEAEVTFKAVTQAYEILRDENTRARYDQHGMAAFDPSMGGGMGEGADINDILSQMFGMNVGGMPGMGGMGGGGPRRPRRGPDEESKYSVSLEDLYKGKTVKFAANKSVICGTCKGSGGKDPKVKPPQCDRCKGAGMVEILRQMGPGLMTRSAAPCDRCLGSGILWKDKDRCKKCKGKRTVQETKPLEIYIPRGAYQGERIVLDGEADQSPDQTPGDLVFVLVEEPHDVFHRVGNDLSADLEITLAESLCGFSRTVITHLDGRGIHLSHPRGKILHPGQVLKVEGEGMPLKKGETKGDLYLIVKVEFPEDGWVMDDATYESLQKLLPGPGPEIKAEEVDEVEYDDDADIDEMGANSGDPRYGEGWEDDDDEEGPQAQCAQQ

SEQ ID NO: 23419 - DNA, 2065 bp, Muscodor strobelii
  misc_feature: SGI EST ID NO. CUFF.55755.0
  misc_feature: Variant of the nucleotide sequence at SEQ ID NO 23417
tttaatcgttccaagtgcttgatattattactaggtccagtttgagcaagcacaagcgatccgtggttctgtctcgtcagaattgtcacaacaaagcggcgtcattccttctggcgctgataagcgttgtcgataagctgtgtcccaccttattttcttcctagcttaccctttatctattgcccatgacaagcgctgttctgcaagttcaacgcctggctagtctcccaactccactataatcttcctctcgaaagactcacgtcgcccctcctcgcctagtgatcaccgcaatctcaccgtagttcttagatcacaatcatggcggcctccggtgacacccccgacttgtatggtaagtacagctacgttcaagctgagctcagtccgaacattctgtctgatcttgctactctgtagaactacttggcgttgacaggaatgccgacgccaacgagattaagaaggcctatcgcaagctcgcactaaagcatcaccccgacaaggttcctgaggaccagcgagaagaggccgaagtcaccttcaaagccgtcacgcaagcctacgagattctccgagatgagaatacccgcgccagatacgaccaacatggcatggctgccttcgatcccagcatgggaggcggcatgggcgagggcgcagacatcaatgacatactgtcgcaaatgtttggtatgaacgttggtggcatgcctggcatgggcggtatgggtggtggcggtcctaggaggcctcgccgtggtcccgacgaggagtccaaatacagcgtcagcttggaagatctatacaagggaaagaccgtcaagttcgctgccaacaagtccgtcatctgtggtacttgcaagggctccggcggcaaggaccctaaagtgaaacccccacagtgtgacaggtgtaaaggtgccggcatggtcgagatactccgccagatgggccctgggttgatgacccggagtgctgctccctgtgacaggtgtttaggatctgggattctatggaaggacaaggaccgctgtaagaagtgcaaggggaagcgaactgtccaggaaaccaagcccctggagatatacattcctcgtggtgcttaccaaggcgaacgcatcgtattagacggcgaggccgaccagagtcccgaccaaacacctggcgatcttgtattcgtcctagtcgaagaacctcatgatgtcttccaccgtgttgggaatgacctatcggcagatctcgagatcacccttgccgaatcgctctgcggattctcgcgtaccgtcataacccatctcgatgggagaggtatccacttgtcccatccccgaggcaaaatcctgcacccgggacaagtactaaaggtcgagggcgagggaatgccgctgaaaaagggggagaccaagggtgatctatatctgattgtcaaggtggaattccccgaggacggctgggtcatggacgatgccacctacgagtcgcttcagaagctactccccggccctggaccggagatcaaggcagaggaagttgacgaggtagaatacgatgacgatgccgacattgacgagatgggtgcaaactcaggcgacccccgatacggagagggatgggaagacgacgacgatgaagagggtccacaagctcagtgtgcccaacagtaatgaggaacgagatacgactttcacgtcagaagccgaagtggcaacatgacatagcatgaaaaaatttaagatgctctcggggtagcagacaatcctgtggcgctctaggggaagaagcatcgagagaaatggccattgcaattgattgcatagccaatgatacctgggatacctatagatagcgagagacagaagccatggcttcttgcaccactctgcagggacgtatatagacccgattaaatgtgtatacacagcaaaatggacagaaattcgtcactcagtgtatttaatcagtattttcacggtgcctgtgacgatgaagtcaactttatgcagctcgcaattatgctcgcgctaaacgcgaaccaattgcccacctagaaacatgactcgaa

SEQ ID NO: 23420 - DNA, 507 bp, Muscodor strobelii
  misc_feature: SGI cDNA ID NO. 567969
  misc_feature: Reduced expression when VOC is produced
  misc_feature: Encodes the peptide sequence at SEQ ID NO 23421
atgccagttattctgatggtggccggtggcttacctaagcgctcgtctaaaatcgccccacttgacaaggtggctgcccacaaccaacccacgaagtttttgaatacaatcgtcaagatggttgccaagcacatccccatcgtcaagaagaagacgaagaagttcaaccgtcaccagtctgatcggttcaagtgccttgcccccagctggcgcaagcctaagggtattgacaatgccgtccgccgtcgtttccgcggccgcatggccatgccctccatcggctacggcagcaaccgcaagacccgccacatggccccgaacggcctgaaggctttcctcgtcaacaataccaaggacgtcgagcttctgttgatgcacaaggacacctacgccgctgagatcgcccacaacgtttcctccagaaagagaatcgatatcatcgcccgcgctaagcaactcggcgtcaaggtcaccaaccccaaggccaagattactactgagatctaa

SEQ ID NO: 23421 - protein, 168 aa, Muscodor strobelii
  misc_feature: SGI Peptide ID NO. 567969
  misc_feature (51)..(160): Pfam Id: PF01655 Pfam Desc: Ribosomal protein L32
  misc_feature (40)..(168): NCBI GI: 116207538 Blast Desc: 60S ribosomal protein L32 [Chaetomium globosum CBS 148.51] gi|88183659|gb|EAQ91127.1| 60S ribosomal protein L32 [Chaetomium globosum CBS 148.51]
  misc_feature (43)..(168): NCBI GI: 256725746 Blast Desc: [Nectria haematococca mpVI 77-13-4]
  misc_feature (26)..(168): NCBI GI: 171685928 Blast Desc: protein product [Podospora anserina] gi|170942925|emb|CAP68578.1| protein product [Podospora anserina]
  misc_feature (42)..(168): NCBI GI: 145602017 Blast Desc: 60S ribosomal protein L32 [Magnaporthe grisea 70-15] gi|145010472|gb|EDJ95128.1| 60S ribosomal protein L32 [Magnaporthe grisea 70-15]
  misc_feature (40)..(168): NCBI GI: 261358108 Blast Desc: 60S ribosomal protein L32 [Verticillium albo-atrum VaMs.102]
  misc_feature (43)..(168): NCBI GI: 156058678 Blast Desc: 60S ribosomal protein L32 [Sclerotinia sclerotiorum 1980] gi|154701138|gb|EDO00877.1| 60S ribosomal protein L32 [Sclerotinia sclerotiorum 1980]
  misc_feature (40)..(168): NCBI GI: 51701795 Blast Desc: 60S ribosomal protein L32 [Sclerotinia sclerotiorum 1980] gi|154701138|gb|EDO00877.1| 60S ribosomal protein L32 [Sclerotinia sclerotiorum 1980]
  misc_feature (43)..(168): NCBI GI: 154303108 Blast Desc: 60S ribosomal protein L32 [Botryotinia fuckeliana B05.10] gi|150855037|gb|EDN30229.1| 60S ribosomal protein L32 [Botryotinia fuckeliana B05.10]
  misc_feature (29)..(167): NCBI GI: 261200225 Blast Desc: ribosomal protein L32 [Ajellomyces dermatitidis SLH14081] gi|239593585|gb|EEQ76166.1| ribosomal protein L32 [Ajellomyces dermatitidis SLH14081] gi|239607535|gb|EEQ84522.1|
  misc_feature (40)..(167): NCBI GI: 189200146 Blast Desc: 60S ribosomal protein L32-A [Pyrenophora tritici-repentis Pt-1C-BFP] gi|187983509|gb|EDU48997.1| 60S ribosomal protein L32-A [Pyrenophora tritici-repentis Pt-1C-BFP]
  misc_feature: Useful for introducing or modulating the production of volatile compounds
MPVILMVAGGLPKRSSKIAPLDKVAAHNQPTKFLNTIVKMVAKHIPIVKKKTKKFNRHQSDRFKCLAPSWRKPKGIDNAVRRRFRGRMAMPSIGYGSNRKTRHMAPNGLKAFLVNNTKDVELLLMHKDTYAAEIAHNVSSRKRIDIIARAKQLGVKVTNPKAKITTEI

SEQ ID NO: 23422 - DNA, 1000 bp, Muscodor strobelii
  misc_feature: SGI EST ID NO. CUFF.55279.0
  misc_feature: Variant of the nucleotide sequence at SEQ ID NO 23420
ctaaaatcgccccacttgacaaggtggctgcccacaaccaacccacgaagtttttgagtgagcatcgaaaagtccacgcctttgaccgtcgaccaacaccaacaaccccttcacgaccgatcagatacaatcgtcaagatggttgccaagcacatccccatcgtcaagtacaagacgaagaagttcaaccgtcaccagtctgatcggttcaagtgccttgcccccagctggcgcaagcctaagggtattgacaatgccgtccgccgtcgtttccgcggccgcatggccatgccctccatcggctacggcagcaaccgcaagacccgccacatggccccgaacggcctgaaggctttcctcgtcaacaataccaaggacgtcgagcttctgttgatgcacaaggacacctacgccgctgagatcgcccacaacgtttcctccagaaagagaatcgatatcatcgcccgcgctaagcaactcggcgtcaaggtcaccaaccccaaggccaagattactactgagatctaaaaatggggtggatgatgtggtacctctggagttcggtttcctcgttttaggcactttgcatgtatgggaagggttcatactctacggtctacggacggttcgagctagcaatttcgtgctagaaaatacatcacgaattctatgatgacaacaacctcgatgttcccagtatttaccaggcatgaagatgagctatgactgaaacgcgacctcgctccaatgagagagtctgtcgtgactcccgaaatcagttcctccgacagactgaacacctcgagggtctcacataggcaatatcggatcgagaccaacctactgtcctgccgccgggtagccaatcaaactagctctgcttgcaagttttgagcactcttgcatgtacagacgagcggaaccatgacagttatctagctctacatgaatcaaaaataacttcaaataacatgtcgcccattgcctacctgtgttgata

SEQ ID NO: 23423 - DNA, 1059 bp, Muscodor strobelii
  misc_feature: SGI cDNA ID NO. 567970
  misc_feature: Encodes the peptide sequence at SEQ ID NO 23424
atgcctcatcatccttatcatcatcgatacgccatctgcaaatccacacggaaccggccagtcaccctcatctcagctacccaaggcgccgacggacagatgtttcaaaccgtgctaagtggccccaagccaacaatatctccgtatttcgaagacgaaggaatctacatcctgtacaagaaccgagcgttacagatcgcagctactgcctgcgatcaacgacgatgtaacacaactcgtgtctgtacctgtgcagcagtcggtagcactgctaacctcacatcaaacaaccaccatcaaaacgtcccaaaactacccaaaggatgtacaacagaatgcatggcctcatggctccatctctacgaagcagtggaacaaacccgctctctcgaattctgcttcctggctcatcctcgaagcttgacatgggacgattcagactcacctggcaataacacgacatttacctatgactcagagatagaagatcaatacaccgcttctaagacctggcgctatacctggccatgcacgaagaagtctaagagagacccctgccgggtgatgttgcaggttcaagagagctggaaggcattcttggaggccggaggccagaaaatgcgttctgtcgtcgcgcttacggatgaagctgccgatgagagtcaggatcgtcttgaggagtgggatgattctgatgttcctctaccggaggagagtggtgaaccgcataaagaggaagaagaaggagagtttgatactattgaggatttgattgaggaggagttccccaagcttcgaagccgatcgacatctccgcgaggtgatagtctcccgtgcggtgcgactaagcggagattgagtatgagcagcacgaagtctgaggagctgccggtcccggtaattacaccgccgaagaatatgcgtattggtcggcacaagtcgtttccgatgagcgatagacatgtgacgaagagagatacgaggggatgtaaggatatgaaggaatcgtggatcgagaaacattttggattcctgcggggtggtctagttgtatcttga

SEQ ID NO: 23424 - protein, 352 aa, Muscodor strobelii
  misc_feature: SGI Peptide ID NO. 567970
MPHHPYHHRYAICKSTRNRPVTLISATQGADGQMFQTVLSGPKPTISPYFEDEGIYILYKNRALQIAATACDQRRCNTTRVCTCAAVGSTANLTSNNHHQNVPKLPKGCTTECMASWLHLYEAVEQTRSLEFCFLAHPRSLTWDDSDSPGNNTTFTYDSEIEDQYTASKTWRYTWPCTKKSKRDPCRVMLQVQESWKAFLEAGGQKMRSVVALTDEAADESQDRLEEWDDSDVPLPEESGEPHKEEEEGEFDTIEDLIEEEFPKLRSRSTSPRGDSLPCGATKRRLSMSSTKSEELPVPVITPPKNMRIGRHKSFPMSDRHVTKRDTRGCKDMKESWIEKHFGFLRGGLVVS

SEQ ID NO: 23425 - DNA, 487 bp, Muscodor strobelii
  misc_feature: SGI EST ID NO. CUFF.55113.0
  misc_feature: Variant of the nucleotide sequence at SEQ ID NO 23423
attctgatgttcctctaccggaggagagtggtgaaccgcataaagaggaagaagaaggagagtttgatactattgaggatttgattgaggaggagttccccaagcttcgaagccgatcgacatctccgcgaggtgatagtctcccgtgcggtgcgactaagcggagattgagtatgagcagcacgaagtctgaggagctgccggtcccggtaattacaccgccgaagaatatgcgtattggtcggcacaagtcgtttccgatgagcgatagacatgtgacgaagagagatacgaggggatgtaaggatatgaaggaatcgtggatcgagaaacattttggattcctgcggggtggtctagttgtatcttgagagtttggattactgggaacgaataaggattaagcgagaagcgcttatgaaaagtacgggttggcgagagaagatgggtgtgcaagactgatgttgacgaatagagaggtgaatag

SEQ ID NO: 23426 - DNA, 3018 bp, Muscodor strobelii
  misc_feature: SGI cDNA ID NO. 567971
  misc_feature: Encodes the peptide sequence at SEQ ID NO 23427
atggacaacagcatccctatccctacaaccctgccagaggttgaaaatctaatccatgagctgtactcttccagcaacgctgctgtgatctctcaaattcaagaagtactgcaacgccttcagaagtcaccccaaggctgggatcttgctcaggggctattagttcgaccaggagacaatgtcaagtttttcggagccttgaccgtcatcgtgaaactgaatacagaaaaggtctctgataatgatgccatctctgtgctccaaaatctcatcaactggcttctacactcgctccaagagaacgcaggtcctattgttatcagaaaactctgctccgcgctggtaacatatttcatccactactcacacacttgggcaaaatgtgtcagccacgtacttgtctgcctagatcgtggtgtgtatgtgcccctcgaccagattgagccctgtcccgaactcgttattcgggatctggatgcccagaaatacctagccgccagttggttcgcaacagcactagccgaggaaaccgagaaggtcgatactaaatccacaaagttcattgctctccatgaacgtgttcaagacaatgtgaaagatgtcgctgtcttgattgctagtcggctgaagggtgctaatggagtgctcaatcttcaaagcaagaaggagtcgataaattgcttgcaagcctggtttctctacgctcagcggagtcccaagcagcctttagtgcaggctcttcaagacttggtacggccaactatcgaatgtctttgggtagaagagctgtacgatagcacggtagagctgctaactgacacgttgaacaactggcaaccatttttcacgaaggaccacatcgactccctatatttactattcaacagcgaatgggcgcaacaacgatatcaagccctgacagaaggagatttcgaatttgacgctgtacagttcggtctgttcatgttagcctttggcgactctcagatggtcgagacaatggactcgtcagacactcgagcccaatcctttctcgccaaattagccgggcttttgactgctccaggacaccccgccgtggacgacaagatcttcgttccggctctcgagttctggagcgctttcgtggagaatttggttgacatccttttctccgaatcagttagcaatcttccatgggacagaccaccattgacccaagtcatgggtgtggtgtctcatagctggaagaagatccaatacccgtctctcgatatatacaatgattgggattcaacggaaaaggctgggttcggcgatgcccgcaaagatgtcgctgactttttgcaatctgtctacaccatctcaggcctacccctcatctcactctttgtagtttttgttcttcaagctctgaagaattctgcctgggctgagctcgaagcaggttgcttctgtctaggatccttatcagactgtgtttcagaaggagactcatacgacgatgctttaaccaaagtatttggctcatcgctattcgatctacttcgagaaggacagaatgtcgtcccagttcgagctagacagacatgcctgtacttgattgaacgatactccgaatactttgttcgacatgcagagtatcttccagccgcgctcaacctgttgttcactgcggtttctgacagaaacctcgccttgccttcgtctaaatctatctttaccttatgctcatcttgcaggaatcttctcacatctgaaacaggcgcatttctagagcaatactccgctttgaggaacactcaggaattagactccatggctgaagaacgggtagtcggtgcgattgcggcaatcatacagtcgatcacagatgaagagcagaaaatagctgcaacgcaaaaactattatctaccgtcagcctagacataagtagttgccttggtctgaaatcagcacaagaagatacgatgatcgatccaagtgacgctgtgatctttcgcgctttcgatgtatctcaacggccgctatcaccgatatcagctcatgaagtagccctgcaagtcgcgattcgagcgctccattgcttatgtagtattgcaaaaggacttcaagcccccgtggatatcgagtccgaagatgatccccccaatacaagcctgaatcaatcccttgaacgtattcatggcgatattatgggcctcttagtgcaacttaaggatctattctcggctaacagcgaagttgttgatactatttgcaatatccttcgtgctggattttcagaaacagagcctgggccttttgtcttcccaccacagatggtcgcgaaccttattataagcaactggcaaaatcgaattgctacggttgtgaatactgctagtatatttgtcagctcattgaacaccggaaggaccaaacagcacaccgctccaattctaagtctcttgctcccttgggtatttaaccttttgcaccaattgccgggccctgaaagtgacccggaactatctcaatacggcattgaatttgcccagcgagtcttacttcgacgtccagaggtactcatgtcacaagcaccgaacgttctcgagtttcttttcggcttcgcgatcaagttattgaacggaacagaaccattgccgaaagcggcttcggcagaattctggaccactttcataactgccaaaactgacgacccgaacacccaagcaaatctgcgtgatgcattgtcacatttcgggccgtcacttgcccagtcattgatgcagaatataggaggaagagcatccaggagtgatcttgataggctcagtgacccgctcaagaaactggttgttcaacatgtagacgcctcaaaatggttagaatcatctcttaacgatgcgtctttcccgagcgacatagtatcggctgccgacaaatctttgtttctgaagaaagttgttagtctgcgaggtggtcgagcaacgggccaggtcgtacgagacttctggttagcttgtaggggctctaattttgcatatgtctcttag

SEQ ID NO: 23427 - protein, 1005 aa, Muscodor strobelii
  misc_feature: SGI Peptide ID NO. 567971
  misc_feature (2)..(1005): NCBI GI: 145611320 Blast Desc: MGG_00475 [Magnaporthe grisea 70-15] gi|145018628|gb|EDK02907.1| MGG_00475 [Magnaporthe grisea 70-15]
  misc_feature (3)..(1005): NCBI GI: 171686530 Blast Desc: protein product [Podospora anserina] gi|170943226|emb|CAP68879.1| protein product [Podospora anserina]
  misc_feature (5)..(989): NCBI GI: 164428852 Blast Desc: NCU00113 [Neurospora crassa OR74A] gi|157072308|gb|EAA28001.2| conserved [Neurospora crassa OR74A]
  misc_feature (6)..(1005): NCBI GI: 256725823 Blast Desc: NECHADRAFT_43042 [Nectria haematococca mpVI 77-13-4]
  misc_feature (5)..(954): NCBI GI: 116208156 Blast Desc: CHGG_03371 [Chaetomium globosum CBS 148.51] gi|88183968|gb|EAQ91436.1| CHGG_03371 [Chaetomium globosum CBS 148.51]
  misc_feature (7)..(1005): NCBI GI: 46111445 Blast Desc: FG02604.1 [Gibberella zeae PH-1]
  misc_feature (7)..(1005): NCBI GI: 156064603 Blast Desc: SS1G_00309 [Sclerotinia sclerotiorum 1980] gi|154691171|gb|EDN90909.1| SS1G_00309 [Sclerotinia sclerotiorum 1980]
  misc_feature (7)..(1005): NCBI GI: 154322993 Blast Desc: BC1G_00839 [Botryotinia fuckeliana B05.10] gi|150848173|gb|EDN23366.1| BC1G_00839 [Botryotinia fuckeliana B05.10]
  misc_feature (105)..(1005): NCBI GI: 261358418 Blast Desc: conserved [Verticillium albo-atrum VaMs.102]
  misc_feature (7)..(1005): NCBI GI: 115433608 Blast Desc: conserved [Aspergillus terreus NIH2624] gi|114189793|gb|EAU31493.1| conserved [Aspergillus terreus NIH2624]
MDNSIPIPTTLPEVENLIHELYSSSNAAVISQIQEVLQRLQKSPQGWDLAQGLLVRPGDNVKFFGALTVIVKLNTEKVSDNDAISVLQNLINWLLHSLQENAGPIVIRKLCSALVTYFIHYSHTWAKCVSHVLVCLDRGVYVPLDQIEPCPELVIRDLDAQKYLAASWFATALAEETEKVDTKSTKFIALHERVQDNVKDVAVLIASRLKGANGVLNLQSKKESINCLQAWFLYAQRSPKQPLVQALQDLVRPTIECLWVEELYDSTVELLTDTLNNWQPFFTKDHIDSLYLLFNSEWAQQRYQALTEGDFEFDAVQFGLFMLAFGDSQMVETMDSSDTRAQSFLAKLAGLLTAPGHPAVDDKIFVPALEFWSAFVENLVDILFSESVSNLPWDRPPLTQVMGVVSHSWKKIQYPSLDIYNDWDSTEKAGFGDARKDVADFLQSVYTISGLPLISLFVVFVLQALKNSAWAELEAGCFCLGSLSDCVSEGDSYDDALTKVFGSSLFDLLREGQNVVPVRARQTCLYLIERYSEYFVRHAEYLPAALNLLFTAVSDRNLALPSSKSIFTLCSSCRNLLTSETGAFLEQYSALRNTQELDSMAEERVVGAIAAIIQSITDEEQKIAATQKLLSTVSLDISSCLGLKSAQEDTMIDPSDAVIFRAFDVSQRPLSPISAHEVALQVAIRALHCLCSIAKGLQAPVDIESEDDPPNTSLNQSLERIHGDIMGLLVQLKDLFSANSEVVDTICNILRAGFSETEPGPFVFPPQMVANLIISNWQNRIATVVNTASIFVSSLNTGRTKQHTAPILSLLLPWVFNLLHQLPGPESDPELSQYGIEFAQRVLLRRPEVLMSQAPNVLEFLFGFAIKLLNGTEPLPKAASAEFWTTFITAKTDDPNTQANLRDALSHFGPSLAQSLMQNIGGRASRSDLDRLSDPLKKLVVQHVDASKWLESSLNDASFPSDIVSAADKSLFLKKVVSLRGGRATGQVVRDFWLACRGSNFAYVS

SEQ ID NO: 23428 - DNA, 3822 bp, Muscodor strobelii
  misc_feature: SGI EST ID NO. CUFF.55117.0
  misc_feature: Variant of the nucleotide sequence at SEQ ID NO 23426
aatggacaataattattattactgtattggcaggtccggcacgatcatagtcgtaatcacaacttgacaacgcaattgagaagaagcaacaaggcgagacgtgcgacttccagtggttattagcaatagtcgtacagcaaaagttgaacagcaacttcaaccttgatgttgatttctctacagattatctttggcgattgcccgcgtgcaccgatcatctcatctaatttcaacgagaatggggccaatgggtgcggctacggacccagacagggtgtggcgatagcatgaatcagaaagggaaaatgttggaggggttcttgacgttctgaatcgtgtgatctggcagagctacctggtagaagaaaggtgtttcatagatcgcaagcacaatcaccactggctgtcattccaagcaagtacgacagacaagtgtgatttaatgaatgaggtagacagatgagttgatatcgatgtgcttggccaacattgaatcgcaagcaaagacctcgcttgctgtaaacaatttctgaaatggtccaaatagattgatcgaaatcggccaatattagaccacaattcccagtgtgaacagacctctcaagaccaaccatcagacataatactcatttcagggctgtgactgtgcccattacacattgcacacatacaacgaccttgcgccatgagtggcatctccaaatatcgaacactatggacaacagcatccctatccctacaaccctgccagaggttgaaaatctaatccatgagctgtactcttccagcaacgctgctgtgatctctcaaattcaagaagtactgcaacgccttcagaagtcaccccaaggctgggatcttgctcaggggctattagttcgaccaggagacaatgtcaagtttttcggagccttgaccgtcatcgtgaaactgaatacagaaaaggtctctgataatgatgccatctctgtgctccaaaatctcatcaactggcttctacactcgctccaagagaacgcaggtcctattgttatcagaaaactctgctccgcgctggtaacatatttcatccactactcacacacttgggcaaaatgtgtcagccacgtacttgtctgcctagatcgtggtgtgtatgtgcccctcgaccagattgagccctgtcccgaactcgttattcgggatctggatgcccagaaatacctagccgccagttggttcgcaacagcactagccgaggaaaccgagaaggtcgatactaaatccacaaagttcattgctctccatgaacgtgttcaagacaatgtgaaagatgtcgctgtcttgattgctagtcggctgaagggtgctaatggagtgctcaatcttcaaagcaagaaggagtcgataaattgcttgcaagcctggtttctctacgctcagcggagtcccaagcagcctttagtgcaggctcttcaagacttggtacggccaactatcgaatgtctttgggtagaagagctgtacgatagcacggtagagctgctaactgacacgttgaacaactggcaaccatttttcacgaaggaccacatcgactccctatatttactattcaacagcgaatgggcgcaacaacgatatcaagccctgacagaaggagatttcgaatttgacgctgtacagttcggtctgttcatgttagcctttggcgactctcagatggtcgagacaatggactcgtcagacactcgagcccaatcctttctcgccaaattagccgggcttttgactgctccaggacaccccgccgtggacgacaagatcttcgttccggctctcgagttctggagcgctttcgtggagaatttggttgacatccttttctccgaatcagttagcaatcttccatgggacagaccaccattgacccaagtcatgggtgtggtgtctcatagctggaagaagatccaatacccgtctctcgatatatacaatgattgggattcaacggaaaaggctgggttcggcgatgcccgcaaagatgtcgctgactttttgcaatctgtctacaccatctcaggcctacccctcatctcactctttgtagtttttgttcttcaagctctgaagaattctgcctgggctgagctcgaagcaggttgcttctgtctaggatccttatcagactgtgtttcagaaggagactcatacgacgatgctttaaccaaagtatttggctcatcgctattcgatctacttcgagaaggacagaatgtcgtcccagttcgagctagacagacatgcctgtacttgattgaacgatactccgaatactttgttcgacatgcagagtatcttccagccgcgctcaacctgttgttcactgcggtttctgacagaaacctcgccttgccttcgtctaaatctatctttaccttatgctcatcttgcaggaatcttctcacatctgaaacaggcgcatttctagagcaatactccgctttgaggaacactcaggaattagactccatggctgaagaacgggtagtcggtgcgattgcggcaatcatacagtcgatcacagatgaagagcagaaaatagctgcaacgcaaaaactattatctaccgtcagcctagacataagtagttgccttggtctgaaatcagcacaagaagatacgatgatcgatccaagtgacgctgtgatctttcgcgctttcgatgtatctcaacggccgctatcaccgatatcagctcatgaagtagccctgcaagtcgcgattcgagcgctccattgcttatgtagtattgcaaaaggacttcaagcccccgtggatatcgagtccgaagatgatccccccaatacaagcctgaatcaatcccttgaacgtattcatggcgatattatgggcctcttagtgcaacttaaggatctattctcggctaacagcgaagttgttgatactatttgcaatatccttcgtgctggattttcagaaacagagcctgggccttttgtcttcccaccacagatggtcgcgaaccttattataagcaactggcaaaatcgaattgctacggttgtgaatactgctagtatatttgtcagctcattgaacaccggaaggaccaaacagcacaccgctccaattctaagtctcttgctcccttgggtatttaaccttttgcaccaattgccgggccctgaaagtgacccggaactatctcaatacggcattgaatttgcccagcgagtcttacttcgacgtccagaggtactcatgtcacaagcaccgaacgttctcgagtttcttttcggcttcgcgatcaagttattgaacggaacagaaccattgccgaaagcggcttcggcagaattctggaccactttcataactgccaaaactgacgacccgaacacccaagcaaatctgcgtgatgcattgtcacatttcgggccgtcacttgcccagtcattgatgcagaatataggaggaagagcatccaggagtgatcttgataggctcagtgacccgctcaagaaactggttgttcaacatgtagacgcctcaaaatggttagaatcatctcttaacgatgcgtctttcccgagcgacatagtatcggctgccgacaaatctttgtttctgaagaaagttgttagtctgcgaggtggtcgagcaacgggccaggtcgtacgagacttctggttagcttgtaggggctctaattttgcatatgtctcttagcatagcgtcttgatctagatggcaaatgtgagaagcttgtaatggtgtccagaaacggaaagaagtagacacacagaacttgatacgcga

SEQ ID NO: 23429 - DNA, 1851 bp, Muscodor strobelii
  misc_feature: SGI cDNA ID NO. 567972
  misc_feature: Encodes the peptide sequence at SEQ ID NO 23430
atggagacagtcaataccactgctcggctgtccgagcttcggaaacttatgagcgaccgcaaagtcgacgtatacattgttccatctgaggacagtcactcttccgagtatatcgcagcatgtgatgctcgccgttttttcatctcaggcttttcagggtccgctggttgtgccgtcatcactcacgaaaaggccgctctggcgactgatggccgttattttaaccaagctgctaagcaattggatgagaactggtctttattgaaacagggcattcaagacgttccaacatggcaggaatggtctgccgaacagtccgctggtggaaaagtcgttgcagttgacccgaccctcctaacaagtggcactgctgagaagttggccaagaacatcaagaagaacggcggcaaggacctggaggcagtcggtgaaaatctggttgatcttgtttggggctccgaaaagcctgcccgaccgagtgagccagtcatcattctggatgataaattcgctggcaaggacgtaaaaacgaagctcgaagagctgcgtaaagaactagagaagaagaagtcccttggtttcatcatttccatgcttgatgagattgcgtggctctttaatctccgaggaaacgacatcccatacaaccccgtgttcttctcatatgccatcgtcacagcggacgaggctactctttacattgactcttctaaactgagctcggagtgtcaatccttcctcgagaagaacagtgttgccattaagccatatcaggacatttttggtgatgccactgcgcttgggcagactgctggagccaacaaatctgaaacaagcgagggcggaaaattccttatctccaataaggcatcctgggcacttaagcgggctctaggtggcagtgagctggttgaggagattagaagtccaatcggtgatgccaaagcaatcaagaacgagaccgaattggaaggcatgcggcaatgtcacatcagagatggtgcggctttgatagagtattttgcctggcttgaggaccaattaatcgcgaagggtgcgaaaatcgacgaggttgaggctgccgataagctggaggcctgccgtacgaagcaaaaggatttcgttgggctgtctttcgacacgatctcatctaccggtgctaatgctgctgtcattcactacaaaccggagaggggaagctgtcccatcatcgaccctgcagctatctatctttgcgattcaggcgcgcagtacttggatggtaccacggatactacacggacgttgcatttcactacgccgtcagaacgagagatagaggccaacactctggtactgaagggtcacattgctttggatatgaccgtgtttcctaagggtacaactggctttgctatcgacgcaatggcacgccaatttctttggaaacaaggacttgactaccgtcatggcaccggtcatggtgttggctcctatttgaacgtccacgaaggacctattggcattggcacgaggatacagttctcagaggtcgcactatcaccaggcaacgtgatttccaacgagcctgggttctacgaggacggtgctttcggcactcgtatcgagaacattgtcatggtcaaagaggtagaaaccaagcataaatttggcgataagccttggctgggtttcgaaaatgtcaccatggtcccatattgccggaagttgatcgaccctgaactactaactgcacctgaaaaggagtggctgaatagttaccacgccaaggtgttcgagaagaccaagggatactttgaaaatgacgagttgacgatggcctggctcaagagggagacgcagcccttctga

SEQ ID NO: 23430 - protein, 616 aa, Muscodor strobelii
  misc_feature: SGI Peptide ID NO. 567972
  misc_feature (9)..(147): Pfam Id: PF01321 Pfam Desc: Creatinase/Prolidase N-terminal domain
  misc_feature (336)..(563): Pfam Id: PF00557 Pfam Desc: metallopeptidase family M24
  misc_feature (45)..(80): Pfam Id: PF01321 Pfam Desc: Creatinase/Prolidase N-terminal domain
  misc_feature (1)..(616): NCBI GI: 154322991 Blast Desc: BC1G_00838 [Botryotinia fuckeliana B05.10] gi|150848172|gb|EDN23365.1| BC1G_00838 [Botryotinia fuckeliana B05.10]
  misc_feature (1)..(616): NCBI GI: 156064605 Blast Desc: SS1G_00310 [Sclerotinia sclerotiorum 1980] gi|154691172|gb|EDN90910.1| SS1G_00310 [Sclerotinia sclerotiorum 1980]
  misc_feature (1)..(616): NCBI GI: 171686532 Blast Desc: protein product [Podospora anserina] gi|170943227|emb|CAP68880.1| protein product [Podospora anserina]
  misc_feature (3)..(616): NCBI GI: 85084019 Blast Desc: NCU00112 [Neurospora crassa OR74A] gi|28918324|gb|EAA28000.1| NCU00112 [Neurospora crassa OR74A]
  misc_feature (1)..(616): NCBI GI: 116208158 Blast Desc: CHGG_03372 [Chaetomium globosum CBS 148.51] gi|88183969|gb|EAQ91437.1| CHGG_03372 [Chaetomium globosum CBS 148.51]
  misc_feature (1)..(616): NCBI GI: 39974755 Blast Desc: MGG_00476 [Magnaporthe grisea 70-15] gi|145018627|gb|EDK02906.1| MGG_00476 [Magnaporthe grisea 70-15]
  misc_feature (1)..(616): NCBI GI: 261358419 Blast Desc: xaa-Pro aminopeptidase [Verticillium albo-atrum VaMs.102]
  misc_feature (1)..(616): NCBI GI: 225562165 Blast Desc: xaa-pro aminopeptidase [Ajellomyces capsulatus G186AR]
  misc_feature (1)..(616): NCBI GI: 239608983 Blast Desc: xaa-pro aminopeptidase [Ajellomyces dermatitidis ER-3]
  misc_feature (1)..(616): NCBI GI: 261189432 Blast Desc: xaa-pro aminopeptidase [Ajellomyces dermatitidis SLH14081] gi|239591704|gb|EEQ74285.1| xaa-pro aminopeptidase [Ajellomyces dermatitidis SLH14081]
  misc_feature (4)..(616): SWISSPROT Homolog: EC 3.4.11.9 Xaa-Pro aminopeptidase
METVNTTARLSELRKLMSDRKVDVYIVPSEDSHSSEYIAACDARRFFISGFSGSAGCAVITHEKAALATDGRYFNQAAKQLDENWSLLKQGIQDVPTWQEWSAEQSAGGKVVAVDPTLLTSGTAEKLAKNIKKNGGKDLEAVGENLVDLVWGSEKPARPSEPVIILDDKFAGKDVKTKLEELRKELEKKKSLGFIISMLDEIAWLFNLRGNDIPYNPVFFSYAIVTADEATLYIDSSKLSSECQSFLEKNSVAIKPYQDIFGDATALGQTAGANKSETSEGGKFLISNKASWALKRALGGSELVEEIRSPIGDAKAIKNETELEGMRQCHIRDGAALIEYFAWLEDQLIAKGAKIDEVEAADKLEACRTKQKDFVGLSFDTISSTGANAAVIHYKPERGSCPIIDPAAIYLCDSGAQYLDGTTDTTRTLHFTTPSEREIEANTLVLKGHIALDMTVFPKGTTGFAIDAMARQFLWKQGLDYRHGTGHGVGSYLNVHEGPIGIGTRIQFSEVALSPGNVISNEPGFYEDGAFGTRIENIVMVKEVETKHKFGDKPWLGFENVTMVPYCRKLIDPELLTAPEKEWLNSYHAKVFEKTKGYFENDELTMAWLKRETQPF

SEQ ID NO: 23431 - DNA, 3074 bp, Muscodor strobelii
  misc_feature: SGI EST ID NO. CUFF.55200.1
  misc_feature: Variant of the nucleotide sequence at SEQ ID NO 23429
cgcatctgtagtatccccattgtctgtccttccccatgcgcagcttcttaggtttcgctgcattacctttaaatacctgttggtctagagcaccacctgtaacgacaagcctctcaattgctcgtctctcccgtttgtctcacactacaagccggcgtccgactgttcggttgaaatcaatcgctgctctcgatatggagacagtcaataccactgctcggctgtccgagcttcggaaacttatgagcgaccgcaaagtcgacgtatacattgttccatctgaggacagtcactcttccgagtatatcgcagcatgtgatgctcgccgttttttcatctcaggcttttcagggtccgctggttgtgccgtcatcactcacgaaaaggccgctctggcgactgatggccgttattttaaccaagctgctaagcaattggatgagaactggtctttattgaaacagggcattcaagacgttccaacatggcaggaatggtctgccgaacagtccgctggtggaaaagtcgttgcagttgacccgaccctcctaacaagtggcactgctgagaagttggccaagaacatcaagaagaacggcggcaaggacctggaggcagtcggtgaaaatctggttgatcttgtttggggctccgaaaagcctgcccgaccgagtgagccagtcatcattctggatgataaattcgctggcaaggacgtaaaaacgaagctcgaagagctgcgtaaagaactagagaagaagaagtcccttggtttcatcatttccatgcttgatgagattgcgtggctctttaatctccgaggaaacgacatcccatacaaccccgtgttcttctcatatgccatcgtcacagcggacgaggctactctttacattgactcttctaaactgagctcggagtgtcaatccttcctcgagaagaacagtgttgccattaagccatatcaggacatttttggtgatgccactgcgcttgggcagactgctggagccaacaaatctgaaacaagcgagggcggaaaattccttatctccaataaggcatcctgggcacttaagcgggctctaggtggcagtgagctggttgaggagattagaagtccaatcggtgatgccaaagcaatcaagaacgagaccgaattggaaggcatgcggcaatgtcacatcagagatggtgcggctttgatagagtattttgcctggcttgaggaccaattaatcgcgaagggtgcgaaaatcgacgaggttgaggctgccgataagctggaggcctgccgtacgaagcaaaaggatttcgttgggctgtctttcgacacgatctcatctaccggtgctaatgctgctgtcattcactacaaaccggagaggggaagctgtcccatcatcgaccctgcagctatctatctttgcgattcaggcgcgcagtacttggatggtaccacggatactacacggacgttgcatttcactacgccgtcagaacgagagatagaggccaacactctggtactgaagggtcacattgctttggatatgaccgtgtttcctaagggtacaactggctttgctatcgacgcaatggcacgccaatttctttggaaacaaggacttgactaccgtcatggcaccggtcatggtgttggctcctatttgaacgtccacgaaggacctattggcattggcacgaggatacagttctcagaggtcgcactatcaccaggcaacgtgatttccaacgagcctgggttctacgaggacggtgctttcggcactcgtatcgagaacattgtcatggtcaaagaggtagaaaccaagcataaatttggcgataagccttggctgggtttcgaaaatgtcaccatggtcccatattgccggaagttgatcgaccctgaactactaactgcacctgaaaaggagtggctgaatagttaccacgccaaggtgttcgagaagaccaagggatactttgaaaatgacgagttgacgatggcctggctcaagagggagacgcagcccttctgatcgttctagcatataacggcgcagggaaagtatatataagcatccactgaatcgagcaatcgagcaatatcgattattgctataggatttagtctataactgcataaatgcggataaggcaaagaagagcccaaaagaaagcttaaatgccgggtctttctcgagagctgctaatacgcgtgatttacctaatcgttgctttaagcgcagctggtcgactatatcaatgccgtatctggctgctatctactccgtgtattagacaccaaaattcctcagggaccaagctgaataaagacatacctgtataaccacaactgtcacacccgcaagcaagacaagcgtcttagaaaacacactgatcaccaagccagccaggaatcccgtcacacttccaccggataactgcttcatgagctccgggctcagagactccttcttgggcttgtgttctgatgagaaggctggtgaggacgtgctgaaggttgttgttcctgtgcgaggtgcgttgagtgagtcgaagcggacgcgcggttgttgggatacggcgacgccgagggagagcccgatgcaggacccgactgcgaggcgtgaggtccgtggggaccgcaggagagtgcgggatgtttggaggaggcgcgcggacatgttgagggactgacggggctaatggatgagtgggcttgagggtgtgattgggagcgaggttgtaaaggtaattggctctctaggttggtgagatctggttcgtctggtatcaaacatacagaaaacacgtaagtcgaagacgagacaaaaacgcgccgaggtcaattggtgaggtcagcggtgtgatgttcgaggtgagtgtgtgacctcggggctactaggttaggttagatggctggtagctattgggaatgtcatccatgtcataggtattgtccgtcacaatgcagtcgagctgtgaatggacttgactattatgtaattgtaagattcgatctccacactaattgcttcttctcacgactttgatcttatgttgag

SEQ ID NO: 23432 - DNA, 498 bp, Muscodor strobelii
  misc_feature: SGI cDNA ID NO. 567973
  misc_feature: Reduced expression when VOC is produced
  misc_feature: Encodes the peptide sequence at SEQ ID NO 23433
atgtccgcgcgcctcctccaaacatcccgcactctcctgcggtccccacggacctcacgcctcgcagtcgggtcctgcatcgggctctccctcggcgtcgccgtatcccaacaaccgcgcgtccgcttcgactcactcaacgcacctcgcacaggaacaacaaccttcagcacgtcctcaccagccttctcatcagaacacaagcccaagaaggagtctctgagcccggagctcatgaagcagttatccggtggaagtgtgacgggattcctggctggcttggtgatcagtgtgttttctaagacgcttgtcttgcttgcgggtgtgacagttgtggttatacagatagcagccagatacggcattgatatagtcgaccagctgcgcttaaagcaacgattaggtaaatcacgcgtattagcagctctcgagaaagacccggcatttaagctttcttttgggctcttctttgccttatccgcatttatgcagttatag

SEQ ID NO: 23433 - protein, 165 aa, Muscodor strobelii
  misc_feature: SGI Peptide ID NO. 567973
  misc_feature (34)..(163): NCBI GI: 171686534 Blast Desc: protein product [Podospora anserina] gi|170943228|emb|CAP68881.1| protein product [Podospora anserina]
  misc_feature (70)..(163): NCBI GI: 164428850 Blast Desc: NCU00111 [Neurospora crassa OR74A] gi|157072307|gb|EAA27999.2| [Neurospora crassa OR74A]
  misc_feature (9)..(165): NCBI GI: 154322995 Blast Desc: [Botryotinia fuckeliana B05.10] gi|150848174|gb|EDN23367.1| [Botryotinia fuckeliana B05.10]
  misc_feature (75)..(165): NCBI GI: 169612411 Blast Desc: SNOG_09328 [Phaeosphaeria nodorum SN15] gi|111062400|gb|EAT83520.1| SNOG_09328 [Phaeosphaeria nodorum SN15]
  misc_feature (27)..(163): NCBI GI: 116208160 Blast Desc: [Chaetomium globosum CBS 148.51] gi|88183970|gb|EAQ91438.1| [Chaetomium globosum CBS 148.51]
  misc_feature (40)..(165): NCBI GI: 189190160 Blast Desc: conserved [Pyrenophora tritici-repentis Pt-1C-BFP] gi|187973025|gb|EDU40524.1| conserved [Pyrenophora tritici-repentis Pt-1C-BFP]
  misc_feature (38)..(165): NCBI GI: 240109231 Blast Desc: CPC735_027360 [Coccidioides posadasii C735 delta SOWgp]
  misc_feature (20)..(162): NCBI GI: 255949486 Blast Desc: Pc22g15940 [Penicillium chrysogenum Wisconsin 54-1255] gi|211592527|emb|CAP98882.1| Pc22g15940 [Penicillium chrysogenum Wisconsin 54-1255]
  misc_feature (27)..(165): NCBI GI: 226281341 Blast Desc: conserved [Paracoccidioides brasiliensis Pb01]
  misc_feature (48)..(165): NCBI GI: 258571748 Blast Desc: [Uncinocarpus reesii 1704] gi|237904947|gb|EEP79348.1| [Uncinocarpus reesii 1704]
  misc_feature: Useful for introducing or modulating the production of volatile compounds
MSARLLQTSRTLLRSPRTSRLAVGSCIGLSLGVAVSQQPRVRFDSLNAPRTGTTTFSTSSPAFSSEHKPKKESLSPELMKQLSGGSVTGFLAGLVISVFSKTLVLLAGVTVVVIQIAARYGIDIVDQLRLKQRLGKSRVLAALEKDPAFKLSFGLFFALSAFMQL

SEQ ID NO: 23434 - DNA, 3274 bp, Muscodor strobelii
  misc_feature: SGI EST ID NO. CUFF.55201.0
  misc_feature: Variant of the nucleotide sequence at SEQ ID NO 23432
ctcaacataagatcaaagtcgtgagaagaagcaattagtgtggagatcgaatcttacaattacataatagtcaagtccattcacagctcgactgcattgtgacggacaatacctatgacatggatgacattcccaatagctaccagccatctaacctaacctagtagccccgaggtcacacactcacctcgaacatcacaccgctgacctcaccaattgacctcggcgcgtttttgtctcgtcttcgacttacgtgttttctgtatgtttgataccagacgaaccagatctcaccaacctagagagccaattacctttacaacctcgctcccaatcacaccctcaagcccactcatccattagccccgtcagtccctcaacatgtccgcgcgcctcctccaaacatcccgcactctcctgcggtccccacggacctcacgcctcgcagtcgggtcctgcatcgggctctccctcggcgtcgccgtatcccaacaaccgcgcgtccgcttcgactcactcaacgcacctcgcacaggaacaacaaccttcagcacgtcctcaccagccttctcatcagaacacaagcccaagaaggagtctctgagcccggagctcatgaagcagttatccggtggaagtgtgacgggattcctggctggcttggtgatcagtgtgttttctaagacgcttgtcttgcttgcgggtgtgacagttgtggttatacagatagcagccagatacggcattgatatagtcgaccagctgcgcttaaagcaacgattaggtaaatcacgcgtattagcagctctcgagaaagacccggcatttaagctttcttttgggctcttctttgccttatccgcatttatgcagttatagactaaatcctatagcaataatcgatattgctcgattgctcgattcagtggatgcttatatatactttccctgcgccgttatatgctagaacgatcagaagggctgcgtctccctcttgagccaggccatcgtcaactcgtcattttcaaagtatcccttggtcttctcgaacaccttggcgtggtaactattcagccactccttttcaggtgcagttagtagttcagggtcgatcaacttccggcaatatgggaccatggtgacattttcgaaacccagccaaggcttatcgccaaatttatgcttggtttctacctctttgaccatgacaatgttctcgatacgagtgccgaaagcaccgtcctcgtagaacccaggctcgttggaaatcacgttgcctggtgatagtgcgacctctgagaactgtatcctcgtgccaatgccaataggtccttcgtggacgttcaaataggagccaacaccatgaccggtgccatgacggtagtcaagtccttgtttctgtattcaaatttagtggattatatttcgaagacgcgagcgtaaactaacccaaagaaattggcgtgccattgcgtcgatagcaaagccagttgtacccttaggaaacacggtcatatccaaagcaatgtgacccttcagtaccagagtgttggcctctatctctcgttctgacggcgtagtgaaatgcaacgtccgtgtagtatccgtggtaccatccaagtactgcgcgcctgaatcgcaaagatagatagctgcagggtcgatgatgggacagcttcccctctccggtttgtagtgaatgacagcagcactataaaacgtcagtcaactttctctccttagatcagacgatgtcagttcggagacttacttagcaccggtagatgagatcgtgtcgaaagacagcccaacgaaatccttttgcttcgtacggcaggcctccagcttatcggcagcctcaacctcgtcgattttcgcacccttcgcgattaattggtcctcaagccaggcaaaatactctatcaaagccgcaccatctctgatgtgacattgccgcatgccttccaattcggtctcgttcttgattgctttggcatcaccgattggacttctaatctcctcaaccagctcactgccacctagagcccgcttaagtgcccaggatgccttattggagataaggaattttccgccctcgcttgtttcagatttgttggctccagcagtctgcccaagcgcagtggcatcaccaaaaatgtcctgatatggcttaatggcaacactgttcttctcgaggaaggattgacactccgagctcagtttagaagagtcaatgtaaagagtagcctcgtccgctgtgacgatggcatatgagaagaacacggggttgtatgggatgtcgtttcctcggagattaaagagccacgcaatctcatcaagcatggaaatgatgaaaccaagggacttcttcttctctagttctttacgcagctcttcgagcttcgtttttacgtccttgccagcgaatttatcatccagaatgatgactggctcactcggtcgggcaggcttttcggagccccaaacaagatcaaccagattttcaccgactgcctccaggtccttgccgccgttcttcttgatgttcttggccaacttctcagcagtgccacttgttaggagggtcgggtcaactgcaacgacttttccaccagcggactgttcggcagaccattcctgccatgttggaacgtcttgaatgccctgtttcaataaagaccagttctcatccaattgcttagcagcttggttaaaataacggccatcagtcgccagagcggccttttcgtgagtgatgacggcacaaccagcggaccctgaaaagcctgagatgaaaaaacggcgagcatcacatgctgcgatatactcggaagagtgactgtcctcagatggaacaacttgatgcaaatatccgtattagctgatcggcaatatattgaaaaacttggcatgcatactgtatacgtcgactttgcggtcgctcataagtttccgaagctcggacagccgagcagtggtattgactgtctccatatcgagagcagcgattgatttcaaccgaacagtcggacgccggcttgtagtgtgagacaaacgggagagacgagcaattgagaggcttgtcgttacaggtggtgctctagaccaacaggtatttaaaggtaatgcagcgaaacctaagaagctgcgcatggggaaggacagacaatggggatactacagatgcgtgttggtggaccctgtaagtatttgcggccagctatttgctgtagagctacctgccttccacctcttaggcacgtacggcttcctt

SEQ ID NO: 23435 - DNA, 432 bp, Muscodor strobelii
  misc_feature: SGI cDNA ID NO. 567974
  misc_feature: Encodes the peptide sequence at SEQ ID NO 23436
atgctccgtggtcgaggccgtgggagaggaggagctagaggcggtcgtggaggagctggaagaggaggtgctgccgccgccgctgtacagcctggcgacccgatcccatatccacgacgcagaagatatcgacccggtactctcgcattgcgagaaatccgaagattacagaacagtaccgatcttctaatgagaaagctgccattttcaagagtggtccgcgaaatagccctaacccttcgtccccgagatgagggaatgcgctggcaatcccaggccattctagcccttcaagaagctaccgaggccttccttgtccacctattcgaggacgccaatctgtgcgccatacatgcaaagcgtgtcacaatcatgcagaaagatattcagcttgcccggcgcatccgtggcgtctggggtggcattggctaa

SEQ ID NO: 23436 - protein, 143 aa, Muscodor strobelii
  misc_feature: SGI Peptide ID NO. 567974
  misc_feature (59)..(136): Pfam Id: PF00125 Pfam Desc: Core histone H2A/H2B/H3/H4
  misc_feature (5)..(143): NCBI GI: 156064593 Blast Desc: SS1G_00304 [Sclerotinia sclerotiorum 1980] gi|154691166|gb|EDN90904.1| SS1G_00304 [Sclerotinia sclerotiorum 1980]
  misc_feature (20)..(143): NCBI GI: 85081112 Blast Desc: histone H3 [Neurospora crassa OR74A] gi|74613900|sp|Q7RXR3.1|CENPA_NEUCR RecName: Full=Histone H3-like centromeric protein cse-4; AltName: Full=CENP-A homolog histone
  misc_feature (4)..(143): NCBI GI: 154323003 Blast Desc: BC1G_00844 [Botryotinia fuckeliana B05.10] gi|150848178|gb|EDN23371.1| BC1G_00844 [Botryotinia fuckeliana B05.10]
  misc_feature (7)..(143): NCBI GI: 169777003 Blast Desc: [Aspergillus oryzae RIB40] gi|238494084|ref|XP_002378278.1| centromere protein Cse4, [Aspergillus flavus NRRL3357] gi|83771704|dbj|BAE61834.1| protein
  misc_feature (29)..(143): NCBI GI: 256725822 Blast Desc: NECHADRAFT_44242 [Nectria haematococca mpVI 77-13-4]
  misc_feature (9)..(137): NCBI GI: 145608690 Blast Desc: MGG_06445 [Magnaporthe grisea 70-15] gi|145016137|gb|EDK00627.1| MGG_06445 [Magnaporthe grisea 70-15]
  misc_feature (4)..(143): NCBI GI: 238840681 Blast Desc: histone H3 [Microsporum canis CBS 113480]
  misc_feature (3)..(143): NCBI GI: 121703636 Blast Desc: histone H3 variant, [Aspergillus clavatus NRRL 1] gi|119398226|gb|EAW08656.1| histone H3 variant, [Aspergillus clavatus NRRL 1]
  misc_feature (7)..(143): NCBI GI: 115386254 Blast Desc: histone H3 [Aspergillus terreus NIH2624] gi|114190666|gb|EAU32366.1| histone H3 [Aspergillus terreus NIH2624]
  misc_feature (27)..(143): NCBI GI: 255945785 Blast Desc: Pc20g11740 [Penicillium chrysogenum Wisconsin 54-1255] gi|211588395|emb|CAP86503.1| Pc20g11740 [Penicillium chrysogenum Wisconsin 54-1255]
MLRGRGRGRGGARGGRGGAGRGGAAAAAVQPGDPIPYPRRRRYRPGTLALREIRRLQNSTDLLMRKLPFSRVVREIALTLRPRDEGMRWQSQAILALQEATEAFLVHLFEDANLCAIHAKRVTIMQKDIQLARRIRGVWGGIG

SEQ ID NO: 23437 - DNA, 1368 bp, Muscodor strobelii
  misc_feature: SGI EST ID NO. CUFF.55123.0
  misc_feature: Variant of the nucleotide sequence at SEQ ID NO 23435
cgtcgaggggtcaatttctcgtgagccgggcgcgtccagcgtcgcattaagagatgaacagaagggagctgccgcaccccagccacttgcattttgcgccttccaattttccatcttctttcccatcgttcccgtcttcagttgtcgctactgtttcccctcttcatcttcactctggaattcaatcttctcccgttacggcgccttctaatagaaatctcagtacattccgtcttcgaccccttcggacgttgatcttctaaccctgttcctgacggcaccgacaagaacatcggcgtgtcttctcaacctcatctgtacctgcgatcgggcgactctctcagcgcatcgctttctccttttcaattttcgtgccatttcacgactatccagtaattgaatcgcttgcaaagacaattgcgactcaaaaaacctgcccaccgacgcttcataccagaaccagcattgctgagctcttctcgctgctatttgcatatagacccggacttccactggtcgcggaccattgagccatgctccgtggtcgaggccgtgggagaggaggagctagaggcggtcgtggaggagctggaagaggaggtgctgccgccgccgctgtacagcctggcgacccgatcccatatccacgacgcagaagatatcgacccggtactctcgcattgcgagaaatccgaagattacagaacagtaccgatcttctaatgagaaagctgccattttcaagagtggtccgcgaaatagccctaacccttcgtccccgagatgagggaatgcgctggcaatcccaggccattctagcccttcaagaagctaccgaggccttccttgtccacctattcgaggacgccaatctgtgcgccatacatgcaaagcgtgtcacaatcatgcagaaagatattcagcttgcccggcgcatccgtggcgtctggggtggcattggctaaactacttgccatatttcagagagcttggcgttcaggtctgattttgtttgagtgtggcacaaaacgtggaagatgatattcgcaggtaggagacaacaacatttgggttgagctctttgagcacaaatttggtgtctcttgtcactatatgcggattagttggcttgagatgccgcgagaggtttcaaacaaggcaagatgccttataggcgttaaggagtcgattcggtctgaatggcgcatcgggatgtgcgcaatgaagaggtcacgacttgcaggtgtgtttaggaagataccaactactaaagaatataatattgttaacaaacatcacaatcgtggttcctcgaattcaaatctaggagtgatgattggtgttatgacttgctggcaaccgatgttt

SEQ ID NO: 23438 - DNA, 1167 bp, Muscodor strobelii
  misc_feature: SGI cDNA ID NO. 567975
  misc_feature: Encodes the peptide sequence at SEQ ID NO 23439
atgtctgagaagaagaacgacgactttgccattcgcatgggcggcagccccataggcgagagggaggcagattcattcattcctcgtccgtctcgagtcgcagttcgcccctcgacgctgcagtcgcagatagccagagtcgagaacagccctcctgcgtcgattctcgcctactgcctctcctccatctccatgaccgtcgtcaacaaatacgttgtttctggctccgattggaatctcaactttttctacctcgctgtccagtcgatagtctgtattgccaccatctatatcttgaaacaggtcggtgttattacgaatcttgctcctttcgatcccaacaagggccgaagatggtttccaatctcccttctcctcgttggcatgatctataccagcaccaagtcgctgcaattcctctcggttcctgtctacacgatcttcaagaatctgactattatcgttattgcgtacggtgaagttctatggtttggaggcagcgtcacccctctcgccctcctctccttcggtctcatggtccttagctccgtcgtagctgcatgggccgacacccgccatgccagtcaagcaggtagccaagctgctgaagcgcttgcgactctcaacgcgggctacgcctggatgggtctgaacgtcttctgcaccgcttcctatctgctgtgcatgcgcaagttcatcaaggggatgaacttcaaggactgggacaccatgttctacaacaatttcctgacgatccctgtcctcgttgtctgctctctgctggtcgaagattggtctagcgaaaacttggccaagaacttccccgtagatacgcgcaataccctgtttatcggcatgatctactctggaacggcggcggtctttatctcgtactgctccgcatggtgcatccgtgttacctcgtccacaacctattcgatggtcggtgctttgaacaagcttcctatcgctgtgagcggcctcatctttttctcggctcctgtcactgttggtagtgtctcggctattttcattggctttgtcagtggtatggtctatgcctgggccaaagtccgacaatctgaagtggcgaagaactccctgcccattgctcagccgaccatgagcgccagctcccagagcaaccgcgatgctgccaactcatag

SEQ ID NO: 23439 - protein, 388 aa, Muscodor strobelii
  misc_feature: SGI Peptide ID NO. 567975
  misc_feature (56)..(361): Pfam Id: PF08449 Pfam Desc: UAA transporter family
  misc_feature (1)..(385): NCBI GI: 256726225 Blast Desc: NECHADRAFT_43433 [Nectria haematococca mpVI 77-13-4]
  misc_feature (1)..(388): NCBI GI: 39953751 Blast Desc: MGG_08858 [Magnaporthe grisea 70-15] gi|189041719|sp|A4RM13.1|GMT_MAGGR RecName: Full=GDP-mannose transporter; Short=GMT gi|145021205|gb|EDK05334.1| MGG_08858
  misc_feature (3)..(388): NCBI GI: 261360090 Blast Desc: GDP-mannose transporter [Verticillium albo-atrum VaMs.102]
  misc_feature (1)..(388): NCBI GI: 156064845 Blast Desc: GDP-mannose transporter [Sclerotinia sclerotiorum 1980] gi|189041723|sp|A7E558.1|GMT_SCLS1 RecName: Full=GDP-mannose transporter; Short=GMT GDP-mannose transporter
  misc_feature (1)..(388): NCBI GI: 154322673 Blast Desc: golgi GDP-mannose transporter [Botryotinia fuckeliana B05.10] gi|189041363|sp|A6RJQ8.1|GMT_BOTFB RecName: Full=GDP-mannose transporter; Short=GMT golgi GDP-mannose B05.10]
  misc_feature (1)..(385): NCBI GI: 189041379 Blast Desc: golgi GDP-mannose transporter [Botryotinia fuckeliana B05.10] gi|189041363|sp|A6RJQ8.1|GMT_BOTFB RecName: Full=GDP-mannose transporter; Short=GMT golgi GDP-mannose B05.10]
  misc_feature (1)..(388): NCBI GI: 85109433 Blast Desc: GDP-mannose transporter [Neurospora crassa OR74A] gi|74617386|sp|Q7SBC5.1|GMT_NEUCR RecName: Full=GDP-mannose transporter; Short=GMT gi|28924558|gb|EAA33678.1| GDP-mannose
  misc_feature (1)..(385): NCBI GI: 116207146 Blast Desc: CHGG_02866 [Chaetomium globosum CBS 148.51] gi|88183463|gb|EAQ90931.1| CHGG_02866 [Chaetomium globosum CBS 148.51]
  misc_feature (2)..(387): NCBI GI: 256725685 Blast Desc: [Nectria haematococca mpVI 77-13-4]
  misc_feature (3)..(386): NCBI GI: 46111635 Blast Desc: FG02699.1 [Gibberella zeae PH-1]
MSEKKNDDFAIRMGGSPIGEREADSFIPRPSRVAVRPSTLQSQIARVENSPPASILAYCLSSISMTVVNKYVVSGSDWNLNFFYLAVQSIVCIATIYILKQVGVITNLAPFDPNKGRRWFPISLLLVGMIYTSTKSLQFLSVPVYTIFKNLTIIVIAYGEVLWFGGSVTPLALLSFGLMVLSSVVAAWADTRHASQAGSQAAEALATLNAGYAWMGLNVFCTASYLLCMRKFIKGMNFKDWDTMFYNNFLTIPVLVVCSLLVEDWSSENLAKNFPVDTRNTLFIGMIYSGTAAVFISYCSAWCIRVTSSTTYSMVGALNKLPIAVSGLIFFSAPVTVGSVSAIFIGFVSGMVYAWAKVRQSEVAKNSLPIAQPTMSASSQSNRDAANS

SEQ ID NO: 23440 - DNA, 2135 bp, Muscodor strobelii
  misc_feature: SGI EST ID NO. CUFF.55134.0
  misc_feature: Variant of the nucleotide sequence at SEQ ID NO 23438
gcagtgattcgcaggtgtctgggtctgctaatcggtcgtcgattggactcctgacacggtgagcatgggaggacccatggcttccgaagttcccacctcaatttacaggtattattagcaggaattgcccaacagatcgctctgcaaattgcgagtgcctgggccaaactaaatattttggcacgcgttctgctcgtccgcccgaaccctcgaactttcgatctgtccccgtcccatcctgtcctcatcagccactgccagtcacttgtgcgacgacgaacccccgttcccgggcccctttcaagtgttggtttcactgaccacttgtcaatcttatttccacgtccatacttcagttgcttgcgcgtctcgcttcttcgaccacctattcaaaccaattcagcacacgcccgcacaccacgaccagcgacgacgacctgctacgatctttccatcgcgacctccatcatgtctgagaagaagaacgacgactttgccattcgcatgggcggcagccccataggcgagagggaggcagattcattcattcctcgtccgtctcgagtcgcagttcgcccctcgacgctgcagtcgcagatagccagagtcgagaacagccctcctgcgtcgattctcgcctactgcctctcctccatctccatgaccgtcgtcaacaaatacgttgtttctggctccgattggaatctcaactttttctacctcgctgtccagtcgatagtctgtattgccaccatctatatcttgaaacaggtcggtgttattacgaatcttgctcctttcgatcccaacaagggccgaagatggtttccaatctcccttctcctcgttggcatgatctataccagcaccaagtcgctgcaattcctctcggttcctgtctacacgatcttcaagaatctgactattatcgttattgcgtacggtgaagttctatggtttggaggcagcgtcacccctctcgccctcctctccttcggtctcatggtccttagctccgtcgtagctgcatgggccgacacccgccatgccagtcaagcaggtagccaagctgctgaagcgcttgcgactctcaacgcgggctacgcctggatgggtctgaacgtcttctgcaccgcttcctatctgctgtgcatgcgcaagttcatcaaggggatgaacttcaaggactgggacaccatgttctacaacaatttcctgacgatccctgtcctcgttgtctgctctctgctggtcgaagattggtctagcgaaaacttggccaagaacttccccgtagatacgcgcaataccctgtttatcggcatgatctactctggaacggcggcggtctttatctcgtactgctccgcatggtgcatccgtgttacctcgtccacaacctattcgatggtcggtgctttgaacaagcttcctatcgctgtgagcggcctcatctttttctcggctcctgtcactgttggtagtgtctcggctattttcattggctttgtcagtggtatggtctatgcctgggccaaagtccgacaatctgaagtggcgaagaactccctgcccattgctcagccgaccatgagcgccagctcccagagcaaccgcgatgctgccaactcatagacagggcatgtaagacgatttgtgtactatttgtaataggccaccacgaagtctacagcccagcccgacaccatacgaggcctgaacaaccccgcgccatctcattcttacgggccatgctctctccaggaagagcgaagcgcccggccccttttcgacaagactactatatgtataataatgttggggttcaggccaatgtcgggaaagatcttttgaatctgtcgcggacttcacaaggctggaggaaatggagctgggtcaacgggcatatcatttttacacagcggcgcatgacggcatgggcaaagatcagagcatggaagtcgttgttgcgactcttgcccaagtgcaccgaaggcgaggtgctgattttacggtatgaattatgttgaagaatttatataatcaatagaacgtgatttctactaggacatgcctgtaccttcaaaatcagatcatttgaaacgactggcatagagatagatgaggagacggcg

SEQ ID NO: 23441 - DNA, 1065 bp, Muscodor strobelii
  misc_feature: SGI cDNA ID NO. 567976
  misc_feature: Encodes the peptide sequence at SEQ ID NO 23442
atggaatccgtgtctactccggagcttggtgcatctcccggtagcatcaatgctcccagagggaagctgcttctaccaccaagttgcgagcctccggtgccaaacgcaccgcgcaagcaactagtatggattgtctttggaggaacaggtcatatgggccgatctctagtgaaatgtgccctcgcccgaggtgacctggtaacagacgtagggcgaacctttgaaacaagtccggaagcaatggaaacggatcaagcaaactgtctcggcatgctttgcgacgttcgcgctcgccaaagcgtgtctaccgtcattgagcgaacactcgagcacttcggccgcatagacgtaatcacgaattgcagcggctatggcgtaattggagcatgtgaagaccaagatgagcacgaaattcggaatcagttcgagacaaatttcatgggaactttgcatattattcaggcatctcttccatacttccgctcgcaaaacgcaggtcgatatttaatcttcagctctacaagcggtgccctcggtgtccctggtctaggcccttattgcgcaacgaaatacgccgtggaaggacttatagaagctatgttatatgaaacagactccttcaatgtaaaagccacactcgtcgaacccggtctcgtccgccgtgacgagccgggttctctcaccaaccccttacctacatggggtcatttcctcatcaaacccgcgagcgacgcatatgctcatgagacctcgccggctctacatgcgaagagaatggtgcaatggcttggtgacaaacaaccgacgagcgccgtcaagtgcgccgaactcgtgtggcaactcgcgcattgctcgtatccgcccctcaggctggtgctggggagttacgctattgagagtatcagggacagactaaggtctgtgacggaggagttggaggactggaaacatttgaattatcctgcggctactgatgctgaggtcggtgggcctgccacgacaacggcggtagagatgaagcttgagaaagaggagagcatggttgagggggatggggagatgtag

SEQ ID NO: 23442 - protein, 354 aa, Muscodor strobelii
  misc_feature: SGI Peptide ID NO. 567976
  misc_feature (41)..(205): Pfam Id: PF00106 Pfam Desc: short chain dehydrogenase
  misc_feature (43)..(294): Pfam Id: PF01370 Pfam Desc: NAD dependent epimerase/dehydratase family
  misc_feature (93)..(200): Pfam Id: PF00106 Pfam Desc: short chain dehydrogenase
  misc_feature (22)..(323): NCBI GI: 171685698 Blast Desc: protein product [Podospora anserina] gi|170942810|emb|CAP68463.1| protein product [Podospora anserina]
  misc_feature (25)..(329): NCBI GI: 256726226 Blast Desc: [Nectria haematococca mpVI 77-13-4]
  misc_feature (25)..(329): NCBI GI: 46111435 Blast Desc: FG02599.1 [Gibberella zeae PH-1]
  misc_feature (22)..(323): NCBI GI: 261360089 Blast Desc: 3-oxoacyl-[acyl-carrier-protein] reductase [Verticillium albo-atrum VaMs.102]
  misc_feature (22)..(325): NCBI GI: 156064589 Blast Desc: SS1G_00302 [Sclerotinia sclerotiorum 1980] gi|154691164|gb|EDN90902.1| SS1G_00302 [Sclerotinia sclerotiorum 1980]
  misc_feature (6)..(353): NCBI GI: 154323007 Blast Desc: BC1G_00846 [Botryotinia fuckeliana B05.10] gi|150848180|gb|EDN23373.1| BC1G_00846 [Botryotinia fuckeliana B05.10]
  misc_feature (52)..(351): NCBI GI: 145614270 Blast Desc: MGG_08857 [Magnaporthe grisea 70-15] gi|145021206|gb|EDK05335.1| MGG_08857 [Magnaporthe grisea 70-15]
  misc_feature (20)..(323): NCBI GI: 85081126 Blast Desc: NCU00148 [Neurospora crassa OR74A] gi|28917734|gb|EAA27425.1| NCU00148 [Neurospora crassa OR74A]
  misc_feature (12)..(354): NCBI GI: 239613171 Blast Desc: short chain dehydrogenase/reductase [Ajellomyces dermatitidis ER-3]
  misc_feature (12)..(354): NCBI GI: 261190939 Blast Desc: short chain dehydrogenase/reductase [Ajellomyces dermatitidis SLH14081] gi|239590922|gb|EEQ73503.1| short chain dehydrogenase/reductase [Ajellomyces dermatitidis SLH14081]
MESVSTPELGASPGSINAPRGKLLLPPSCEPPVPNAPRKQLVWIVFGGTGHMGRSLVKCALARGDLVTDVGRTFETSPEAMETDQANCLGMLCDVRARQSVSTVIERTLEHFGRIDVITNCSGYGVIGACEDQDEHEIRNQFETNFMGTLHIIQASLPYFRSQNAGRYLIFSSTSGALGVPGLGPYCATKYAVEGLIEAMLYETDSFNVKATLVEPGLVRRDEPGSLTNPLPTWGHFLIKPASDAYAHETSPALHAKRMVQWLGDKQPTSAVKCAELVWQLAHCSYPPLRLVLGSYAIESIRDRLRSVTEELEDWKHLNYPAATDAEVGGPATTTAVEMKLEKEESMVEGDGEM

SEQ ID NO: 23443 - DNA, 2563 bp, Muscodor strobelii
  misc_feature: SGI EST ID NO. CUFF.55140.0
  misc_feature: Variant of the nucleotide sequence at SEQ ID NO 23441
gcgccggcgacgtcatttttttcgatttcattcatccgaagtattcgtagaggcttccggcagataaacataaatatttctctgcagaacttgaccataccataacactgaaccttattttgactagagccaactgcgacttttgcttgcgacaaatttcatctgcgccgttcaccttatatcgatccgtacatctccgccaaaatgagagcctactggtacgataatgtcgcaggggaccagcgcctaccgcacaactccggcaaggatgtagacaaggcagagctcgagagaatcggcgtgctgtactaccgcatctcagagatggaaggcgtagatgctcttgctcaacagcgcggatacaagaaccgtgatgagatcaccgtctccccagcccagatgggcgatgcgtacgagagcaaggtccgcatgttcttcgatgagcatctccatgaggatgaggagatccgatacattcgcgatggccaaggttacttcgacgttcgctccaagggcgatgattgggttcgcatccagcttgagaaggatgacttgattatcctaccggctggcatttatcatcgattcacgacggatgaggacaattacatccaagccatgcgccttttcaaggaggagccgaagtggactcctctcaaccgctccgaagacttggatgccaatgagtatcgcaaggcttatgtctcagagttcattcaggcataaacgacgaattggaattaaagatagtaaaaatgacgagagaatgatcggatgtgatattttataggcagtttatgagtttacgaaaccacttccttcgtatcatattcaagtttgaacatttgtgttatgtatagtctaggtcgcgggttgtctaaggcgtcatacgtgtaatttcgagagtactcagtatctctggtaaatctgaagctaggttatagtcctgaaggaggtcgtagatccgaagcatacaaggcgagagagaaaccctgcacacatccgcaataccgaccgacggtcttgcggggtctccacaattgccgtctttccgcttcattttgtacaagacatatcacagaaatgatcaagtatgtgacctcaattcttccatgcgagattcctctgcttgcagtaggcacatctaggggatgatcattgcgttaatcgctaaacacatagcttcctcctcgtagcgcaagccaatgcggtatgagtgtgtcgacacagagccaagatggaatccgtgtctactccggagcttggtgcatctcccggtagcatcaatgctcccagagggaagctgcttctaccaccaagttgcgagcctccggtgccaaacgcaccgcgcaagcaactagtatggattgtctttggaggaacaggtcatatgggccgatctctagtgaaatgtgccctcgcccgaggtgacctggtaacagacgtagggcgaacctttgaaacaagtccggaagcaatggaaacggatcaagcaaactgtctcggcatgctttgcgacgttcgcgctcgccaaagcgtgtctaccgtcattgagcgaacactcgagcacttcggccgcatagacgtaatcacgaattgcagcggctatggcgtaattggagcatgtgaagaccaagatgagcacgaaattcggaatcagttcgagacaaatttcatgggaactttgcatattattcaggcatctcttccatacttccgctcgcaaaacgcaggtcgatatttaatcttcagctctacaagcggtgccctcggtgtccctggtctaggcccttattgcgcaacgaaatacgccgtggaaggacttatagaagctatgttatatgaaacagactccttcaatgtaaaagccacactcgtcgaacccggtctcgtccgccgtgacgagccgggttctctcaccaaccccttacctacatggggtcatttcctcatcaaacccgcgagcgacgcatatgctcatgagacctcgccggctctacatgcgaagagaatggtgcaatggcttggtgacaaacaaccgacgagcgccgtcaagtgcgccgaactcgtgtggcaactcgcgcattgctcgtatccgcccctcaggctggtgctggggagttacgctattgagagtatcagggacagactaaggtctgtgacggaggagttggaggactggaaacatttgaattatcctgcggctactgatgctgaggtcggtgggcctgccacgacaacggcggtagagatgaagcttgagaaagaggagagcatggttgagggggatggggagatgtaggggagatatcttagctactcttgatagtttcgtttcaactctctatttcggcgtttgagtctgtcattaactacatgtattcaactgatttctaataggaaacctaagggccgccatacggctaagattttcaaaacgaatactcactatgagcaaacatgagaagaaggtcttgccaaaaaaaccattgtatatatatcaagtactattcctatacttcttaacatggccaacaaaactagacatttgggcatgtggtag

SEQ ID NO: 23444 - DNA, 522 bp, Muscodor strobelii
  misc_feature: SGI cDNA ID NO. 567977
  misc_feature: Encodes the peptide sequence at SEQ ID NO 23445
atgagagcctactggtacgataatgtcgcaggggaccagcgcctaccgcacaactccggcaaggatgtagacaaggcagagctcgagagaatcggcgtgctgtactaccgcatctcagagatggaaggcgtagatgctcttgctcaacagcgcggatacaagaaccgtgatgagatcaccgtctccccagcccagatgggcgatgcgtacgagagcaaggtccgcatgttcttcgatgagcatctccatgaggatgaggagatccgatacattcgcgatggccaaggttacttcgacgttcgctccaagggcgatgattgggttcgcatccagcttgagaaggatgacttgattatcctaccggctggcatttatcatcgattcacgacggatgaggacaattacatccaagccatgcgccttttcaaggaggagccgaagtggactcctctcaaccgctccgaagacttggatgccaatgagtatcgcaaggcttatgtctcagagttcattcaggcataa

SEQ ID NO: 23445 - protein, 173 aa, Muscodor strobelii
  misc_feature: SGI Peptide ID NO. 567977
  misc_feature (2)..(150): Pfam Id: PF03079 Pfam Desc: ARD/ARD' family
  misc_feature (80)..(133): Pfam Id: PF07883 Pfam Desc: Cupin domain
  misc_feature (1)..(173): NCBI GI: 85081121 Blast Desc: NCU00147 [Neurospora crassa OR74A] gi|28917733|gb|EAA27424.1| NCU00147 [Neurospora crassa OR74A]
  misc_feature (1)..(173): NCBI GI: 261358422 Blast Desc: 1,2-dihydroxy-3-keto-5-methylthiopentene dioxygenase [Verticillium albo-atrum VaMs.102]
  misc_feature (1)..(173): NCBI GI: 171686590 Blast Desc: protein product [Podospora anserina] gi|170943256|emb|CAP68909.1| protein product [Podospora anserina]
  misc_feature (1)..(173): NCBI GI: 261190949 Blast Desc: 1,2-dihydroxy-3-keto-5-methylthiopentene dioxygenase [Ajellomyces dermatitidis SLH14081] gi|239590927|gb|EEQ73508.1| 1,2-dihydroxy-3-keto-5-methylthiopentene dioxygenase [Ajellomyces
  misc_feature (1)..(170): NCBI GI: 238494136 Blast Desc: ARD/ARD family protein, [Aspergillus flavus NRRL3357] gi|220694954|gb|EED51297.1| ARD/ARD family protein, [Aspergillus flavus NRRL3357]
  misc_feature (1)..(173): NCBI GI: 154272571 Blast Desc: HCAG_08247 [Ajellomyces capsulatus NAm1] gi|150409125|gb|EDN04581.1| HCAG_08247 [Ajellomyces capsulatus NAm1]
  misc_feature (1)..(173): NCBI GI: 240276891 Blast Desc: 1,2-dihydroxy-3-keto-5-methylthiopentene dioxygenase [Ajellomyces capsulatus H143]
  misc_feature (1)..(173): NCBI GI: 225554737 Blast Desc: 1,2-dihydroxy-3-keto-5-methylthiopentene dioxygenase [Ajellomyces capsulatus G186AR]
  misc_feature (1)..(169): NCBI GI: 121703668 Blast Desc: ARD/ARD family protein, [Aspergillus clavatus NRRL 1] gi|119398242|gb|EAW08672.1| ARD/ARD family protein, [Aspergillus clavatus NRRL 1]
  misc_feature (1)..(171): NCBI GI: 256726227 Blast Desc: NECHADRAFT_70472 [Nectria haematococca mpVI 77-13-4]
  misc_feature (13)..(157): SWISSPROT Homolog: EC 1.13.11.53 Acireductone dioxygenase (Ni(2+)-requiring)
  misc_feature (13)..(157): SWISSPROT Homolog: EC 1.13.11.54 Acireductone dioxygenase (Fe(2+)-requiring)
MRAYWYDNVAGDQRLPHNSGKDVDKAELERIGVLYYRISEMEGVDALAQQRGYKNRDEITVSPAQMGDAYESKVRMFFDEHLHEDEEIRYIRDGQGYFDVRSKGDDWVRIQLEKDDLIILPAGIYHRFTTDEDNYIQAMRLFKEEPKWTPLNRSEDLDANEYRKAYVSEFIQA

SEQ ID NO: 23446 - DNA, 2563 bp, Muscodor strobelii; identical to SEQ ID NO: 23443
  misc_feature: SGI EST ID NO. CUFF.55140.0
  misc_feature: Variant of the nucleotide sequence at SEQ ID NO 23444

SEQ ID NO: 23447 - DNA, 741 bp, Muscodor strobelii
  misc_feature: SGI cDNA ID NO. 567978
  misc_feature: Reduced expression when VOC is produced
  misc_feature: Encodes the peptide sequence at SEQ ID NO 23448
atggatcaaatgatgggcgatgccggtcgcaacccgctggaggcatggttctgggagatgcccatctgcacccgatggtggaccaccgcgaccgttctcaccagcgcactcgtgcaatgccagatggtcacgcccttccagctgttctacagcgttaggaccgtcttcaccaaaggagagtactggcgactgttgactacattcctctacttcggacccttctccctcgatctcctcttccatgtctacttcctccagcgctatgcccgactcctcgaagagtcctccggccgatcgcccgcccacttctcctggctgcttctctactcgacagccttcctgatcgtcctgtcgccactcgtctccatgcccttcctcggccaccccttgtcctctacgctcgtctacatttggtcgcgacgaaaccccgataccagactcagctttctgggcctgcttgtctttaccgcaccctacctaccctgggtcctgatgggcttcagccttgttatgcacgggactatacccaaagacgagatcatgggtgttgtcatcggccacatctggtatttcttcaccgacgtgtacccaccgatgcacaatggctctcgtccgcttgatccgcccatgtggtggcgacgattgtttgagggaaggcaaagagaagagacggctgacaccgtcgacaacgaattcgccgtcgcaggaggacctgagctcgcagccgctgacgtacgataa

SEQ ID NO: 23448 - protein, 246 aa, Muscodor strobelii
  misc_feature: SGI Peptide ID NO. 567978
  misc_feature (20)..(210): Pfam Id: PF04511 Pfam Desc: Der1-like family
  misc_feature (1)..(246): NCBI GI: 85081116 Blast Desc: NCU00146 [Neurospora crassa OR74A] gi|28917732|gb|EAA27423.1| conserved [Neurospora crassa OR74A]
  misc_feature (1)..(242): NCBI GI: 261358421 Blast Desc: derlin-2 [Verticillium albo-atrum VaMs.102]
  misc_feature (7)..(245): NCBI GI: 256726228 Blast Desc: [Nectria haematococca mpVI 77-13-4]
  misc_feature (1)..(237): NCBI GI: 46111439 Blast Desc: FG02601.1 [Gibberella zeae PH-1]
  misc_feature (1)..(246): NCBI GI: 171686588 Blast Desc: protein product [Podospora anserina] gi|170943255|emb|CAP68908.1| protein product [Podospora anserina]
  misc_feature (1)..(244): NCBI GI: 39977083 Blast Desc: conserved [Magnaporthe grisea 70-15] gi|145016138|gb|EDK00628.1| conserved [Magnaporthe grisea 70-15]
  misc_feature (6)..(241): NCBI GI: 119173554 Blast Desc: CIMG_10224 [Coccidioides immitis RS]
  misc_feature (6)..(240): NCBI GI: 145250179 Blast Desc: An15g00640 [Aspergillus niger] gi|134082117|emb|CAK42233.1| protein product [Aspergillus niger]
  misc_feature (6)..(240): NCBI GI: 121703634 Blast Desc: ER-associated proteolytic system protein Der1, [Aspergillus clavatus NRRL 1] gi|119398225|gb|EAW08655.1| ER-associated proteolytic system protein Der1, [Aspergillus NRRL
  misc_feature (6)..(240): NCBI GI: 70984186 Blast Desc: ER-associated proteolytic system protein Der1 [Aspergillus fumigatus Af293] gi|66845238|gb|EAL85573.1| ER-associated proteolytic system protein Der1, [Aspergillus Der1,
  misc_feature: Useful for introducing or modulating the production of volatile compounds
MDQMMGDAGRNPLEAWFWEMPICTRWWTTATVLTSALVQCQMVTPFQLFYSVRTVFTKGEYWRLLTTFLYFGPFSLDLLFHVYFLQRYARLLEESSGRSPAHFSWLLLYSTAFLIVLSPLVSMPFLGHPLSSTLVYIWSRRNPDTRLSFLGLLVFTAPYLPWVLMGFSLVMHGTIPKDEIMGVVIGHIWYFFTDVYPPMHNGSRPLDPPMWWRRLFEGRQREETADTVDNEFAVAGGPELAAADVR

SEQ ID NO: 23449 - DNA, 1229 bp, Muscodor strobelii
  misc_feature: SGI EST ID NO. CUFF.55143.0
  misc_feature: Variant of the nucleotide sequence at SEQ ID NO 23447
cgacaaccgggctctgctcgactttacctccaacatccaaaagtaacctacctccatgtacctatatgaccctgtgaatttggacactttgcatcaagactgcggctgctctgactattcctacgcacaaacaccaaggattgactaatcgctttctttgttgccttagcatcattacctaaggtatcctgagtgccgcgccactttcccacttgccaatattctacacttccaaaccatccgtcatacaacaagcgcccaccatggatcaaatgatgggcgatgccggtcgcaacccgctggaggcatggttctgggagatgcccatctgcacccgatggtggaccaccgcgaccgttctcaccagcgcactcgtgcaatgccagatggtcacgcccttccagctgttctacagcgttaggaccgtcttcaccaaaggagagtactggcgactgttgactacattcctctacttcggacccttctccctcgatctcctcttccatgtctacttcctccagcgctatgcccgactcctcgaagagtcctccggccgatcgcccgcccacttctcctggctgcttctctactcgacagccttcctgatcgtcctgtcgccactcgtctccatgcccttcctcggccaccccttgtcctctacgctcgtctacatttggtcgcgacgaaaccccgataccagactcagctttctgggcctgcttgtctttaccgcaccctacctaccctgggtcctgatgggcttcagccttgttatgcacgggactatacccaaagacgagatcatgggtgttgtcatcggccacatctggtatttcttcaccgacgtgtacccaccgatgcacaatggctctcgtccgcttgatccgcccatgtggtggcgacgattgtttgagggaaggcaaagagaagagacggctgacaccgtcgacaacgaattcgccgtcgcaggaggacctgagctcgcagccgctgacgtacgataaacgtgccgatatgcttccttttcgctactctcattattaagctctcttttctggcgttcggacaagcgtttacgatacggatgttgcatggcatggaatgaagggacggcgttctcagtgtagagcatcaatacatagatatacattgcacaggcttggtattttttaaaacaaaagaaaaaccaataatgacagcattgcattctccattaatcagtactgccg

SEQ ID NO: 23450 - DNA, 1668 bp, Muscodor strobelii
  misc_feature: SGI cDNA ID NO. 567979
  misc_feature: Reduced expression when VOC is produced
  misc_feature: Encodes the peptide sequence at SEQ ID NO 23451
atgcttccttacatcaactacccctttgagcacctctctgctgcacttggcgcatcgacagacgagctcaagctcatcttctccttcctactctcctatccgctcgctgggcttcttaaaagagttcccgacaaacacccgcactacaagaacctattcattataggcggtggcctcttctacttagtcggtctcttctcgctatggactggcgttcggacgctcatcatatcttccggcgtcacctatgccctcgcctattatcttcccaagtccccttatatgccatggatggtctttgtctttctgatgggccacatggctatcaaccagctgagccgtcagtttgccaacgagccatctgctgtggatattaccggcacgcagatggttctcgtcatgaaactatccgcgtttgcttggaatgttttcgacgggactctgccagatgatcagctcagcgaccatcaaagagaccgcaaaatagtccggcttccaggtttcttagactatgccgcgtatgtactgttcttcccctcgctcatggctggtccagctttcgactacaatgagtatcggggatggatcgactgcaccatgttcgacgttcctgcttccgttgaccctaccaagagagcccccacaagaaagaagcggaagatccctagaagtggtactcccgctatgtggaagttggccagcggtcttgtctatattctagcgtttttgaacttgagcaagtggtatagcagtgatgtgctcttctccgatcgatttatgacctacaacttcattcgccgtcttgtcatactgcacatgcatggactgacagcgcgcacgaaatattacggtgtttggttcctagctgaaggttcatgcattctcgctgggctaggctacaatggcatcgaccccaccactggtaaagtttcgtggaatcgcctgcaaaacatcaatccttggggtgtcgagttggcgcaaaatagtcgtgcttatcttggaaactggaacatgaataccaataactggttgcgaaactacatataccttcgtgtaacgccaagaggcaagaagcctggcttccgcgcaagtatggccacgttcgttaccagcgccttctggcacggattttatcctggttattatctggcctttgtcctggcaagctttattcaaacagctgcgaaacactgtcgtcggtacttccgccctttctttatcgatcctgtgacacaaaaagaactaccgaacaagaagtattacgacattgcttcttgggtcgcaactcagacgacattctcctttaccgtggcaccgttcatcatactaggatttaacgattcgctgactgcatggtctcgggtttatttctatgctgtaattacgacttttggaacactggccttcttctcttctccggccaaggcacatctgcgcaaaaagcttgagaagcgcacgcgcgatgcgggcgcacggttagcacgcactgctagttcggagagtttgaatagtgctcatccggaacctgttctgggtttgagtgctgaccccggtaaagacattgatgaggcattcaatgagatccgtggcgaggtcctgagagcgaagaaagagcttgacgagaaatctatgaagagaagggcctcaagcgggaagaaggcatcgtga

SEQ ID NO: 23451 - protein, 555 aa, Muscodor strobelii
  misc_feature: SGI Peptide ID NO. 567979
  misc_feature (112)..(438): Pfam Id: PF03062 Pfam Desc: MBOAT family
  misc_feature (1)..(545): NCBI GI: 154322685 Blast Desc: BC1G_00685 [Botryotinia fuckeliana B05.10] gi|150848019|gb|EDN23212.1| BC1G_00685 [Botryotinia fuckeliana B05.10]
  misc_feature (1)..(545): NCBI GI: 156064837 Blast Desc: SS1G_00426 [Sclerotinia sclerotiorum 1980] gi|154691288|gb|EDN91026.1| SS1G_00426 [Sclerotinia sclerotiorum 1980]
  misc_feature (1)..(546): NCBI GI: 171685688 Blast Desc: protein product [Podospora anserina] gi|170942805|emb|CAP68458.1| protein product [Podospora anserina]
  misc_feature (1)..(542): NCBI GI: 145614272 Blast Desc: MGG_08856 [Magnaporthe grisea 70-15] gi|145021207|gb|EDK05336.1| MGG_08856 [Magnaporthe grisea 70-15]
  misc_feature (23)..(532): NCBI GI: 85109620 Blast Desc: NCU06194 [Neurospora crassa OR74A] gi|28924653|gb|EAA33770.1| conserved [Neurospora crassa OR74A]
  misc_feature (1)..(545): NCBI GI: 261360091 Blast Desc: membrane-bound O-acyltransferase domain-containing protein [Verticillium albo-atrum VaMs.102]
  misc_feature (22)..(539): NCBI GI: 256726224 Blast Desc: NECHADRAFT_70470 [Nectria haematococca mpVI 77-13-4]
  misc_feature (1)..(531): NCBI GI: 159122377 Blast Desc: MBOAT family protein, [Aspergillus fumigatus A1163]
  misc_feature (1)..(531): NCBI GI: 146324349 Blast Desc: MBOAT family protein [Aspergillus fumigatus Af293] gi|129556236|gb|EAL85553.2| MBOAT family protein, [Aspergillus fumigatus Af293]
  misc_feature (1)..(537): NCBI GI: 261190913 Blast Desc: MBOAT family protein [Ajellomyces dermatitidis SLH14081] gi|239590909|gb|EEQ73490.1| MBOAT family protein [Ajellomyces dermatitidis SLH14081] gi|239613184|gb|EEQ90171.1|
  misc_feature (5)..(523): SWISSPROT Homolog: EC 2.3.1.51 1-acylglycerol-3-phosphate O-acyltransferase
  misc_feature (5)..(523): SWISSPROT Homolog: EC 2.3.1.23 1-acylglycerophosphocholine O-acyltransferase
  misc_feature: Useful for introducing or modulating the production of volatile compounds
MLPYINYPFEHLSAALGASTDELKLIFSFLLSYPLAGLLKRVPDKHPHYKNLFIIGGGLFYLVGLFSLWTGVRTLIISSGVTYALAYYLPKSPYMPWMVFVFLMGHMAINQLSRQFANEPSAVDITGTQMVLVMKLSAFAWNVFDGTLPDDQLSDHQRDRKIVRLPGFLDYAAYVLFFPSLMAGPAFDYNEYRGWIDCTMFDVPASVDPTKRAPTRKKRKIPRSGTPAMWKLASGLVYILAFLNLSKWYSSDVLFSDRFMTYNFIRRLVILHMHGLTARTKYYGVWFLAEGSCILAGLGYNGIDPTTGKVSWNRLQNINPWGVELAQNSRAYLGNWNMNTNNWLRNYIYLRVTPRGKKPGFRASMATFVTSAFWHGFYPGYYLAFVLASFIQTAAKHCRRYFRPFFIDPVTQKELPNKKYYDIASWVATQTTFSFTVAPFIILGFNDSLTAWSRVYFYAVITTFGTLAFFSSPAKAHLRKKLEKRTRDAGARLARTASSESLNSAHPEPVLGLSADPGKDIDEAFNEIRGEVLRAKKELDEKSMKRRASSGKKAS

SEQ ID NO: 23452 - DNA, 6879 bp, Muscodor strobelii
  misc_feature: SGI EST ID NO. CUFF.55378.0
  misc_feature: Variant of the nucleotide sequence at SEQ ID NO 23450
cgtcgttctactcctttgcgctaggaacctccataacaactcgcaacaatgaaacttccctttttataatatcgaaatacctcgcactctactcttggcctttgaaaggattgaagcgcgggaagttaatcccactcgaatgggaccttttcgtcgaccgttcgcttcttctaggcctactaccaccctactaaattctatctacaaccactgtctctgcaacctcaaagatgcttccttacatcaactacccctttgagcacctctctgctgcacttggcgcatcgacagacgagctcaagctcatcttctccttcctactctcctatccgctcgctgggcttcttaaaagagttcccgacaaacacccgcactacaagaacctattcattatagggtatgccaaccctctattccctgcttagctttgtcgacggccccccgtgctgacctggctctcactcttcagcggtggcctcttctacttagtcggtctcttctcgctatggactggcgttcggacgctcatcatatcttccggcgtcacctatgccctcgcctattatcttcccaagtccccttatatgccatggatggtctttgtctttctgatgggccacatggctatcaaccagctgagccgtcagtttgccaacgagccatctgctgtggatattaccggcacgcagatggttctcgtcatgaaactatccgcgtttgcttggaatgttttcgacgggactctgccagatgatcagctcagcgaccatcaaagagaccgcaaaatagtccggcttccaggtttcttagactatgccgcgtatgtactgttcttcccctcgctcatggctggtccagctttcgactacaatgagtatcggggatggatcgactgcaccatgttcgacgttcctgcttccgttgaccctaccaagagagcccccacaagaaagaagcggaagatccctagaagtggtactcccgctatgtggaagttggccagcggtcttgtctatattctagcgtttttgaacttgagcaagtggtatagcagtgatgtgctcttctccgatcgatttatgacctacaacttcattcgccgtcttgtcatactgcacatgcatggactgacagcgcgcacgaaatattacggtgtttggttcctagctgaaggttcatgcattctcgctgggctaggctacaatggcatcgaccccaccactggtaaagtttcgtggaatcgcctgcaaaacatcaatccttggggtgtcgagttggcgcaaaatagtcgtgcttatcttggaaactggaacatgaataccaataactggttgcgaaactacatataccttcgtgtaacgccaagaggcaagaagcctggcttccgcgcaagtatggccacgttcgttaccagcgccttctggcacggattttatcctggttattatctggcctttgtcctggcaagctttattcaaacagctgcgaaacactgtcgtcggtacttccgccctttctttatcgatcctgtgacacaaaaagaactaccgaacaagaagtattacgacattgcttcttgggtcgcaactcagacgacattctcctttaccgtggcaccgttcatcatactaggatttaacgattcgctgactgcatggtctcgggtttatttctatgctgtaattacgacttttggaacactggccttcttctcttctccggccaaggcacatctgcgcaaaaagcttgagaagcgcacgcgcgatgcgggcgcacggttagcacgcactgctagttcggagagtttgaatagtgctcatccggaacctgttctgggtttgagtgctgaccccggtaaagacattgatgaggcattcaatgagatccgtggcgaggtcctgagagcgaagaaagagcttgacgagaaatctatgaagagaagggcctcaagcgggaagaaggcatcgtgaagaaacaaattcgatttacgataccgttacacaaggcgtcagtgaatttggttagcatggcgtggcgtggttatggggactggatatcctaatatgtgcaaaagttttcagagcaaagattgctcaagtcgggaggcaagatctgcttgagcacccactggaacggcaattacacgattacacacgcaagccttgtgtgtcacgaaagtgtattgtaaataatcatacggaactaagaacaatcataagataagcatgcgatatatgagtgatagaccatgtctgcagtttcactacaatgattttacaaaaagttcttttgaatggaaaatattcataaatgtattgtagaaaagctgaacgctcattgtcattaggtcatggtcgcttaggtgtggagtgtagctattctactcgagaattccatattatccatttaatggcatgaaatcatgtttcctgttccccatctgaatatttccaagcaacagcaaaataaagcaaaagcggatatcggcgggtatcttgacataaaaagtcgaatgtctgactgcctatttcgtccgaatgcaaaacgcccaaatactttttatgaccgcggtcattctgttggtcccgtctatcggattgcgaagtgaagagaatcatagtgtacaaatcttgtatgtcggaggttcagtggtaatagaacactgggaggcgtagatgtaaggtgataggtggttgagtaatgagaaatgtacagtgtacaattattcgtaagaggtaaattaagtacgtagattcgtgaagtttgggttatgcaaaaacggccggtttttgcatggtagttatggaatagatgaacgatttatgcttcgtgtcaggcgtgtgtgatgctcaggatgagcggtcgaaagagtgtaagtaagcgcatagcgtaaatcgtcgcggaaatgattccgggagtcgagtctagttgtgtagcgttgaggccgtaaaaaagtacggcgtagctcgtaaatatcattaataaatatcatagtcgtattgaaaatctcgttcagtgtcttctcgtcgtcggtagtgataaaaagcaaaaagtgacgacatagaaatacgctgaacggcgtggttgttcgtatagaaatcaaaagtcgtgagcaagaaatgtgtgagtcgtgtctcggtgtggtgtgtatgtctcagttccctaattgttgattgacaccaaggacagccaatgctgcgatagcacctaagattaacaggccaattacagacatgaagcgattgagatttctccaccagcgcgcactctggaaacgagaatcatcgaccggtttcactcgctgggcaaaggtttctggcttggtgtaatcgggtgctggaacctgttgctccaaatcgtacgctggatttggaggtaatggcaagagagctgcaataaaccacgctgaaaatttgacacaggttagaaatgtcgaggaaatgaacgcatgtagttgacactcaccaaacgggaaaatgaaacccagcgtaaataggactagttgtctattacgctgtccaaacacgcggttttccgcagaccaagttgttgacggcgggttatcccatatactatagccactggatcgatggtctcttcggagatggggtgaccagatgcttgaagtcattttctttggtcctcgtcggatctgttcgatgcctggaggcataggcgtgatctccattgaacttggtcgaggagcattcggtgatgcagctgcatgggtccgtatttctcggggacgacgacgtggattatgtatattttgttgaaaatgctctggagcgggtgagttgctcggagcccatgaacttggccgcgaactgtcgtcatcttcgccttcatgtatcacgaagtcactatctctagcatagaagatcctgtagataagtaagcattttattccaagcgttgacaaatgcagaaaaaggagtgtgcgtactttgcccatgcaggtagtcctctacgcaagctgctgttcgagcgcattggtcttagacttctgtctgatcccatagagcgcaagctcttgtcagatgattgtcgtgatagaaatcctccactaatgcgacttcttgatgatttagactgaagctggcgaaattgttcaagatctgccaagccgtcaccgtgttcgtcatggtttctgacggtgcgaggcggtgggcttggtaattctctagtacctcgtctacttgtggtggtttgcttgtctagcgagtcggatagtgaatttgatcgggaatgcgatctgggtggatccaatgtctcaagaatagaggaattaatgctttgaatatggcgactgcctctactcccgagaccactgctgccacgatcccgtacagatgcaagagaggttactcttgagccaggattgctgccctcgtactctgaattcacagtggaaagttgtccactccatgggtgatcgtccatcggtttcttgaacccaacgctgcttcgaccagcccatgaagattgctgcagtgatgacgcagaaggagtatgagctaagcgaacgatgtttggcacagaatcctgtgtcaaaatgctagagattgacgaaaacgagtttgaacgtgtatggtgcgaatcgtttgatctctgtcttgtatgcaagtgcagttgttcggacgatgatcgtttgtgtggtcggagtggcgcaatcagaagactttcttgggagtattgcggtttgacttctcgtctgaagctatcgagagataccttgttcagtggtcgtcgggcgaatgggtttactgaagatgctaccgaggcggtattgtgaacaacgtagttctggctccctggggtttcaagcggcgtctgttcagaagtaggatatggactgtcatgtacgatgaagtttttgctgccaggagtatcgagaatttggtgtataatgaagttcttgctgccgggcgtatcgagatgttcgtattcgcgcgatgacgaggcgggcacttgtggaggggatgagtgtccgatgagctggtagttggagctgctcgacgaagatggaggtatctcgatgctgtcagtatctggcagaggtggtgaacttcggccaatcactttgtaattagtggtgtgctctaatgtcgaatcgctactgtcagtagcaaaggatggttttgcggcaagcgcgaaggactgttctgcttcagctggttcagatggttcgacgctggtttctggcaatggtggaagtggttccgtcgcgatttcctttccctttcccttgtccttcacgtccggagtcttcgggaccttgcgtactccgccgatcatgcgataattccagggtgaagaagcaatatgatcaacggctacttccaggggtgacacgggagtgcctggtgacgaaggcgagacactgcgctctggcaccgagctgaatagagaactggggtagtcgtcggttgtaacatcaaacgatgcctcttcgagcggactgaaagcagaagtacttgaatagcgatgagatggtatcgtagactcagtgcccgttgacgtccgtgttttggttggtcttaaaacgagagaaaatgttttgtcggaatgaacattaatgaccctttctcgacgcgaaggagatttggatcttgatggcgaggaaggccttgcataatcatgctggtcttcaagtggctgcatcgcattaatgcgtctgatattacttccgaatgaagttcttgtcataacaggggcaggtggggtgagttgtgtgctgccagacatgtcagaggccaatcttgattctgaaacgtcctttcgccagatccctgtcgatgaagtggtgggcgaagttggcgacgatggcgacgacaatgcggtccctgcatttctttctttccatgaggtcgtggatgtgtgaccgacatcgtagcccgtgggtcgttcgtgactttccctgctcctagctgttgctcttgagtcccgcccacttgaactgaggtcatcttctcctactatccttgggggagaataaggtactagacgaactccaagcttattcttttccgagctacttctctcatttaatggggtcctctgtgaatgggccgacgaagacgatgttgatgtagacatgatctatgggatcccgtggaccaagcacacctcgctttgccgcacaattatatagatcgagctgaagatcggaaagtcgacatcgtaataatattcaattatgcggaccagcaggtaagtgttgttgaaccaaaaagcggcacgtttcctcctgtactagatgttcgagctgtgctcgtgaggtataaaatattgtatacttataaaatgtgcttgaagatggccgggttggcatgtgattcgtacgtattaaagtgttgttatgaagtcggagttagaaaatgaaggaatggttgaacaaagagagtgagtgacaatgaaatgtaaagatgaaccaactggttcaagaaatggttgaattaggaatgctgtcgaggtggtgtggccatttgcaaaaatacaagcgtctggtgaagcaaaactcgaacgaaatatgcgcaattaagcggcgagcacctatattttgcgccgaccacacgctcgtaaggcgaaaaggaatgataaatgagagacagcaaaagaagttcgttgacaagaattcgtggattacattacgtggtggctaagaaagatccattggctagcaagtcacagcatcggaacattgaccgctctcgtcgacgacctcactggacatcaactcaaaaaggagctgcaaagatgcagccgggggccaggccagcgattgcaattctgtggattttgtgagtaggggttgaacagggactgcagcttggcttgacgaagcttggggtcaaaatagaccaggaatgaaaccta

SEQ ID NO: 23453 - DNA, 2388 bp, Muscodor strobelii
  misc_feature: SGI cDNA ID NO. 567980
  misc_feature: Encodes the peptide sequence at SEQ ID NO 23454
atgcagccacttgaagaccagcatgattatgcaaggccttcctcgccatcaagatccaaatctccttcgcgtcgagaaagggtcattaatgttcattccgacaaaacattttctctcgttttaagaccaaccaaaacacggacgtcaacgggcactgagtctacgataccatctcatcgctattcaagtacttctgctttcagtccgctcgaagaggcatcgtttgatgttacaaccgacgactaccccagttctctattcagctcggtgccagagcgcagtgtctcgccttcgtcaccaggcactcccgtgtcacccctggaagtagccgttgatcatattgcttcttcaccctggaattatcgcatgatcggcggagtacgcaaggtcccgaagactccggacgtgaaggacaagggaaagggaaaggaaatcgcgacggaaccacttccaccattgccagaaaccagcgtcgaaccatctgaaccagctgaagcagaacagtccttcgcgcttgccgcaaaaccatcctttgctactgacagtagcgattcgacattagagcacaccactaattacaaagtgattggccgaagttcaccacctctgccagatactgacagcatcgagatacctccatcttcgtcgagcagctccaactaccagctcatcggacactcatcccctccacaagtgcccgcctcgtcatcgcgcgaatacgaacatctcgatacgcccggcagcaagaacttcattatacaccaaattctcgatactcctggcagcaaaaacttcatcgtacatgacagtccatatcctacttctgaacagacgccgcttgaaaccccagggagccagaactacgttgttcacaataccgcctcggtagcatcttcagtaaacccattcgcccgacgaccactgaacaaggtatctctcgatagcttcagacgagaagtcaaaccgcaatactcccaagaaagtcttctgattgcgccactccgaccacacaaacgatcatcgtccgaacaactgcacttgcatacaagacagagatcaaacgattcgcaccatacacgttcaaactcgttttcgtcaatctctagcattttgacacaggattctgtgccaaacatcgttcgcttagctcatactccttctgcgtcatcactgcagcaatcttcatgggctggtcgaagcagcgttgggttcaagaaaccgatggacgatcacccatggagtggacaactttccactgtgaattcagagtacgagggcagcaatcctggctcaagagtaacctctcttgcatctgtacgggatcgtggcagcagtggtctcgggagtagaggcagtcgccatattcaaagcattaattcctctattcttgagacattggatccacccagatcgcattcccgatcaaattcactatccgactcgctagacaagcaaaccaccacaagtagacgaggtactagagaattaccaagcccaccgcctcgcaccgtcagaaaccatgacgaacacggtgacggcttggcagatcttgaacaatttcgccagcttcagtctaaatcatcaagaagtcgcattagtggaggatttctatcacgacaatcatctgacaagagcttgcgctctatgggatcagacagaagtctaagaccaatgcgctcgaacagcagcttgcgtagaggactacctgcatgggcaaagatcttctatgctagagatagtgacttcgtgatacatgaaggcgaagatgacgacagttcgcggccaagttcatgggctccgagcaactcacccgctccagagcattttcaacaaaatatacataatccacgtcgtcgtccccgagaaatacggacccatgcagctgcatcaccgaatgctcctcgaccaagttcaatggagatcacgcctatgcctccaggcatcgaacagatccgacgaggaccaaagaaaatgacttcaagcatctggtcaccccatctccgaagagaccatcgatccagtggctatagtatatgggataacccgccgtcaacaacttggtctgcggaaaaccgcgtgtttggacagcgtaatagacaactagtcctatttacgctgggtttcattttcccgtttgcgtggtttattgcagctctcttgccattacctccaaatccagcgtacgatttggagcaacaggttccagcacccgattacaccaagccagaaacctttgcccagcgagtgaaaccggtcgatgattctcgtttccagagtgcgcgctggtggagaaatctcaatcgcttcatgtctgtaattggcctgttaatcttaggtgctatcgcagcattggctgtccttggtgtcaatcaacaattagggaactga

SEQ ID NO: 23454 - protein, 795 aa, Muscodor strobelii
  misc_feature: SGI Peptide ID NO. 567980
  misc_feature (5)..(795): NCBI GI: 256725821 Blast Desc: NECHADRAFT_100997 [Nectria haematococca mpVI 77-13-4]
  misc_feature (20)..(795): NCBI GI: 116207150 Blast Desc: CHGG_02868 [Chaetomium globosum CBS 148.51] gi|88183465|gb|EAQ90933.1| CHGG_02868 [Chaetomium globosum CBS 148.51]
  misc_feature (19)..(772): NCBI GI: 39953719 Blast Desc: MGG_08855 [Magnaporthe grisea 70-15] gi|145021208|gb|EDK05337.1| MGG_08855 [Magnaporthe grisea 70-15]
  misc_feature (28)..(794): NCBI GI: 171685692 Blast Desc: protein product [Podospora anserina] gi|170942807|emb|CAP68460.1| protein product [Podospora anserina]
  misc_feature (7)..(791): NCBI GI: 85109624 Blast Desc: NCU06196 [Neurospora crassa OR74A] gi|28924655|gb|EAA33772.1| [Neurospora crassa OR74A]
  misc_feature (287)..(771): NCBI GI: 156064839 Blast Desc: SS1G_00427 [Sclerotinia sclerotiorum 1980] gi|154691289|gb|EDN91027.1| SS1G_00427 [Sclerotinia sclerotiorum 1980]
  misc_feature (446)..(774): NCBI GI: 154322683 Blast Desc: BC1G_00684 [Botryotinia fuckeliana B05.10] gi|150848018|gb|EDN23211.1| BC1G_00684 [Botryotinia fuckeliana B05.10]
  misc_feature (507)..(790): NCBI GI: 189195050 Blast Desc: conserved [Pyrenophora tritici-repentis Pt-1C-BFP] gi|187979742|gb|EDU46368.1| conserved [Pyrenophora tritici-repentis Pt-1C-BFP]
  misc_feature (508)..(789): NCBI GI: 240110840 Blast Desc: CPC735_037020 [Coccidioides posadasii C735 delta SOWgp]
  misc_feature (508)..(789): NCBI GI: 119196565 Blast Desc: CIMG_02657 [Coccidioides immitis RS]
MQPLEDQHDYARPSSPSRSKSPSRRERVINVHSDKTFSLVLRPTKTRTSTGTESTIPSHRYSSTSAFSPLEEASFDVTTDDYPSSLFSSVPERSVSPSSPGTPVSPLEVAVDHIASSPWNYRMIGGVRKVPKTPDVKDKGKGKEIATEPLPPLPETSVEPSEPAEAEQSFALAAKPSFATDSSDSTLEHTTNYKVIGRSSPPLPDTDSIEIPPSSSSSSNYQLIGHSSPPQVPASSSREYEHLDTPGSKNFIIHQILDTPGSKNFIVHDSPYPTSEQTPLETPGSQNYVVHNTASVASSVNPFARRPLNKVSLDSFRREVKPQYSQESLLIAPLRPHKRSSSEQLHLHTRQRSNDSHHTRSNSFSSISSILTQDSVPNIVRLAHTPSASSLQQSSWAGRSSVGFKKPMDDHPWSGQLSTVNSEYEGSNPGSRVTSLASVRDRGSSGLGSRGSRHIQSINSSILETLDPPRSHSRSNSLSDSLDKQTTTSRRGTRELPSPPPRTVRNHDEHGDGLADLEQFRQLQSKSSRSRISGGFLSRQSSDKSLRSMGSDRSLRPMRSNSSLRRGLPAWAKIFYARDSDFVIHEGEDDDSSRPSSWAPSNSPAPEHFQQNIHNPRRRPREIRTHAAASPNAPRPSSMEITPMPPGIEQIRRGPKKMTSSIWSPHLRRDHRSSGYSIWDNPPSTTWSAENRVFGQRNRQLVLFTLGFIFPFAWFIAALLPLPPNPAYDLEQQVPAPDYTKPETFAQRVKPVDDSRFQSARWWRNLNRFMSVIGLLILGAIAALAVLGVNQQLGN

SEQ ID NO: 23455 - DNA, 6921 bp, Muscodor strobelii
  misc_feature: SGI EST ID NO. CUFF.55379.1
  misc_feature: Variant of the nucleotide sequence at SEQ ID NO 23453
taggtttcattcctggtctattttgaccccaagcttcgtcaagccaagctgcagtccctgttcaacccctactcacaaaatccacagaattgcaatcgctggcctggcccccggctgcatctttgcagctcctttttgagttgatgtccagtgaggtcgtcgacgagagcggtcaatgttccgatgctgtgacttgctagccaatggatctttcttagccaccacgtaatgtaatccacgaattcttgtcaacgaacttcttttgctgtctctcatttatcattccttttcgccttacgagcgtgtggtcggcgcaaaatataggtgctcgccgcttaattgcgcatatttcgttcgagttttgcttcaccagacgcttgtatttttgcaaatggccacaccacctcgacagcattcctaattcaaccatttcttgaaccagttggttcatctttacatttcattgtcactcactctctttgttcaaccattccttcattttctaactccgacttcataacaacactttaatacgtacgaatcacatgccaacccggccatcttcaagcacattttataagtatacaatattttatacctcacgagcacagctcgaacatctagtacaggaggaaacgtgccgctttttggttcaacaacacttacctgctggtccgcataattgaatattattacgatgtcgactttccgatcttcagctcgatctatataattgtgcggcaaagcgaggtgtgcttggtccacgggatcccatagatcatgtctacatcaacatcgtcttcgtcggcccattcacagaggaccccattaaatgagagaagtagctcggaaaagaataagcttggagttcgtctagtaccttattctcccccaaggatagtaggagaagatgacctcagttcaagtgggcgggactcaagagcaacagctaggagcagggaaagtcacgaacgacccacgggctacgatgtcggtcacacatccacgacctcatggaaagaaagaaatgcagggaccgcattgtcgtcgccatcgtcgccaacttcgcccaccacttcatcgacagggatctggcgaaaggacgtttcagaatcaagattggcctctgacatgtctggcagcacacaactcaccccacctgcccctgttatgacaagaacttcattcggaagtaatatcagacgcattaatgcgatgcagccacttgaagaccagcatgattatgcaaggccttcctcgccatcaagatccaaatctccttcgcgtcgagaaagggtcattaatgttcattccgacaaaacattttctctcgttttaagaccaaccaaaacacggacgtcaacgggcactgagtctacgataccatctcatcgctattcaagtacttctgctttcagtccgctcgaagaggcatcgtttgatgttacaaccgacgactaccccagttctctattcagctcggtgccagagcgcagtgtctcgccttcgtcaccaggcactcccgtgtcacccctggaagtagccgttgatcatattgcttcttcaccctggaattatcgcatgatcggcggagtacgcaaggtcccgaagactccggacgtgaaggacaagggaaagggaaaggaaatcgcgacggaaccacttccaccattgccagaaaccagcgtcgaaccatctgaaccagctgaagcagaacagtccttcgcgcttgccgcaaaaccatcctttgctactgacagtagcgattcgacattagagcacaccactaattacaaagtgattggccgaagttcaccacctctgccagatactgacagcatcgagatacctccatcttcgtcgagcagctccaactaccagctcatcggacactcatcccctccacaagtgcccgcctcgtcatcgcgcgaatacgaacatctcgatacgcccggcagcaagaacttcattatacaccaaattctcgatactcctggcagcaaaaacttcatcgtacatgacagtccatatcctacttctgaacagacgccgcttgaaaccccagggagccagaactacgttgttcacaataccgcctcggtagcatcttcagtaaacccattcgcccgacgaccactgaacaaggtatctctcgatagcttcagacgagaagtcaaaccgcaatactcccaagaaagtcttctgattgcgccactccgaccacacaaacgatcatcgtccgaacaactgcacttgcatacaagacagagatcaaacgattcgcaccatacacgttcaaactcgttttcgtcaatctctagcattttgacacaggattctgtgccaaacatcgttcgcttagctcatactccttctgcgtcatcactgcagcaatcttcatgggctggtcgaagcagcgttgggttcaagaaaccgatggacgatcacccatggagtggacaactttccactgtgaattcagagtacgagggcagcaatcctggctcaagagtaacctctcttgcatctgtacgggatcgtggcagcagtggtctcgggagtagaggcagtcgccatattcaaagcattaattcctctattcttgagacattggatccacccagatcgcattcccgatcaaattcactatccgactcgctagacaagcaaaccaccacaagtagacgaggtactagagaattaccaagcccaccgcctcgcaccgtcagaaaccatgacgaacacggtgacggcttggcagatcttgaacaatttcgccagcttcagtctaaatcatcaagaagtcgcattagtggaggatttctatcacgacaatcatctgacaagagcttgcgctctatgggatcagacagaagtctaagaccaatgcgctcgaacagcagcttgcgtagaggactacctgcatgggcaaagatcttctatgctagagatagtgacttcgtgatacatgaaggcgaagatgacgacagttcgcggccaagttcatgggctccgagcaactcacccgctccagagcattttcaacaaaatatacataatccacgtcgtcgtccccgagaaatacggacccatgcagctgcatcaccgaatgctcctcgaccaagttcaatggagatcacgcctatgcctccaggcatcgaacagatccgacgaggaccaaagaaaatgacttcaagcatctggtcaccccatctccgaagagaccatcgatccagtggctatagtatatgggataacccgccgtcaacaacttggtctgcggaaaaccgcgtgtttggacagcgtaatagacaactagtcctatttacgctgggtttcattttcccgtttgcgtggtttattgcagctctcttgccattacctccaaatccagcgtacgatttggagcaacaggttccagcacccgattacaccaagccagaaacctttgcccagcgagtgaaaccggtcgatgattctcgtttccagagtgcgcgctggtggagaaatctcaatcgcttcatgtctgtaattggcctgttaatcttaggtgctatcgcagcattggctgtccttggtgtcaatcaacaattagggaactgagacatacacaccacaccgagacacgactcacacatttcttgctcacgacttttgatttctatacgaacaaccacgccgttcagcgtatttctatgtcgtcactttttgctttttatcactaccgacgacgagaagacactgaacgagattttcaatacgactatgatatttattaatgatatttacgagctacgccgtacttttttacggcctcaacgctacacaactagactcgactcccggaatcatttccgcgacgatttacgctatgcgcttacttacactctttcgaccgctcatcctgagcatcacacacgcctgacacgaagcataaatcgttcatctattccataactaccatgcaaaaaccggccgtttttgcataacccaaacttcacgaatctacgtacttaatttacctcttacgaataattgtacactgtacatttctcattactcaaccacctatcaccttacatctacgcctcccagtgttctattaccactgaacctccgacatacaagatttgtacactatgattctcttcacttcgcaatccgatagacgggaccaacagaatgaccgcggtcataaaaagtatttgggcgttttgcattcggacgaaataggcagtcagacattcgactttttatgtcaagatacccgccgatatccgcttttgctttattttgctgttgcttggaaatattcagatggggaacaggaaacatgatttcatgccattaaatggataatatggaattctcgagtagaatagctacactccacacctaagcgaccatgacctaatgacaatgagcgttcagcttttctacaatacatttatgaatattttccattcaaaagaactttttgtaaaatcattgtagtgaaactgcagacatggtctatcactcatatatcgcatgcttatcttatgattgttcttagttccgtatgattatttacaatacactttcgtgacacacaaggcttgcgtgtgtaatcgtgtaattgccgttccagtgggtgctcaagcagatcttgcctcccgacttgagcaatctttgctctgaaaacttttgcacatattaggatatccagtccccataaccacgccacgccatgctaaccaaattcactgacgccttgtgtaacggtatcgtaaatcgaatttgtttcttcacgatgccttcttcccgcttgaggcccttctcttcatagatttctcgtcaagctctttcttcgctctcaggacctcgccacggatctcattgaatgcctcatcaatgtctttaccggggtcagcactcaaacccagaacaggttccggatgagcactattcaaactctccgaactagcagtgcgtgctaaccgtgcgcccgcatcgcgcgtgcgcttctcaagctttttgcgcagatgtgccttggccggagaagagaagaaggccagtgttccaaaagtcgtaattacagcatagaaataaacccgagaccatgcagtcagcgaatcgttaaatcctagtatgatgaacggtgccacggtaaaggagaatgtcgtctgagttgcgacccaagaagcaatgtcgtaatacttcttgttcggtagttctttttgtgtcacaggatcgataaagaaagggcggaagtaccgacgacagtctgtaagtttgttagctagtacgtaaaaattaggggctctgtctgtacttacgtttcgcagctgtttgaataaagcttgccaggacaaaggccagataataaccaggataaaatccgtgccagaaggcgctggtaacgaacgtggccatacttgcgcggaagccaggcttcttgcctcttggcgttacacgaaggtatatgtagtttcgcaaccagttattggtattcatgttccagtttccaagataagcacgactattttgcgccaactcgacaccccaaggattgatgttttgcaggcgattccacgaaactttaccagtggtggggtcgatgccattgtagcctagcccagcgagaatgcatgaaccttcagctaggaaccaaacaccgtaatatttcgtgcgcgctgtcagtccatgcatgtgcagtatgacaagacggcgaatgaagttgtaggtcataaatcgatcggagaagagcacatcactgctataccacttgctcaagttcaaaaacgctagaatatagacaagaccgctggccaacttccacatagcgggagtaccacttctagggatcttccgcttctttcttgtgggggctctcttggtagggtcaacggaagcaggaacgtcgaacatggtgcagtcgatccatccccgatactcattgtagtcgaaagctggaccagccatgagcgaggggaagaacagtacatacgcggcatagtctaagaaacctggaagccggactattttgcggtctctttgatggtcgctgagctgatcatctggcagagtcccgtcgaaaacattccaagcaaacgcggatagtttcatgacgagaaccatctgcgtgccggtaatatccacagcagatggctcgttggcaaactgacggctcagctggttgatagccatgtggcccatcagaaagacaaagaccatccatggcatataaggggacttgggaagataataggcgagggcataggtgacgccggaagatatgatgagcgtccgaacgccagtccatagcgagaagagaccgactaagtagaagaggccaccgctgaagagtgagagccaggtcagcacggggggccgtcgacaaagctaagcagggaatagagggttggcataccctataatgaataggttcttgtagtgcgggtgtttgtcgggaactcttttaagaagcccagcgagcggataggagagtaggaaggagaagatgagcttgactacggccaagttactttcacggatcactcatgtaggagcagggtacagaagggggacatacgctcgtctgtcgatgcgccaagtgcagcagagaggtgctcaaaggcttcggacgagttagcgctgacacaagagccgaatcacaagagatcgtacggtagttgatgtaaggaagcatctttgaggttgcagagacagtggttgtagatagaatttagtagggtggtagtaggcctagaagaagcgaacggtcgacgaaaaggtcccattcgagtgggattaacttcccgcgcttcaatcctttcaaaggccaagagtagagtgcgaggtatttcgatattataaaaagggaagtttcattgttgcgagttgttatggaggttcctagcgcaaaggagtagaacgacg

SEQ ID NO: 23456 - DNA, 993 bp, Muscodor strobelii
  misc_feature: SGI cDNA ID NO. 567981
  misc_feature: Encodes the peptide sequence at SEQ ID NO 23457
atgccgtcgatcatggataagctaaacgggtactttgggcacgagaaacccaaaccaccgccaatcaccacgggtactgcagccgcgctgcttgtggtatacacgctgatctacgtggtacctttctatctgtcggctaccacgcgcccatctaggacattatctcgagatgcgccggccgtcatacgtgcccgcattacctccgtgtgtctgacttgtgtcgtttgttccgtcatcacctttgtcattctcacgtctcagggccacgccacacatgccgaggccttgcattcactgggctactggcccgtcggcctgagggagaccatcaactctctcctgctgaccgccatccttttcagcgccccgttgtatgagaccctcgtggttgacggggcatggagagattggttgagtctgcggtcaatgtccagtctttggagcgaatggataacatggcgcaatatcgttgctggtccgctcacagaggagatactcttccgctcggcctccgtgcctttgatgcttatggcccgtgcgtctgtaacccagaccatcttcctctcgcctgtgatcttcgggctggcacacttccaccatttctacgagttccgcgtaacgcacccgcagatacccgtgatgacgggcctactacgctctgttcttcaattctcatacacgtcactatttggcgcgtatgctacctttctctttctgcgtacaggtagtgtactagcaatattcattgcgcacgctttctgtaatatcatgggtcttccgcgcctctggggtcgagttcagcctctctcggactacgactacttggaagttaacgaggagagagatggtgggaagtcgaaacaacggaaggagccttcgatcatgtggaccatcgtatactacgtccttcttgttgtcggagccattgggtggtggaagaacctgggcgtgttgacgaagagcgataataccctagttactatcaatatttag

SEQ ID NO: 23457 - protein, 330 aa, Muscodor strobelii
  misc_feature: SGI Peptide ID NO. 567981
  misc_feature (151)..(262): Pfam Id: PF02517 Pfam Desc: CAAX amino terminal protease family
  misc_feature (1)..(329): NCBI GI: 145614276 Blast Desc: MGG_08854 [Magnaporthe grisea 70-15] gi|145021210|gb|EDK05339.1| MGG_08854 [Magnaporthe grisea 70-15]
  misc_feature (1)..(326): NCBI GI: 116207148 Blast Desc: CHGG_02867 [Chaetomium globosum CBS 148.51] gi|88183464|gb|EAQ90932.1| CHGG_02867 [Chaetomium globosum CBS 148.51]
  misc_feature (11)..(308): NCBI GI: 154322677 Blast Desc: BC1G_00681 [Botryotinia fuckeliana B05.10] gi|150848015|gb|EDN23208.1| BC1G_00681 [Botryotinia fuckeliana B05.10]
  misc_feature (12)..(325): NCBI GI: 46111431 Blast Desc: FG02597.1 [Gibberella zeae PH-1]
  misc_feature (26)..(328): NCBI GI: 261360093 Blast Desc: CAAX prenyl protease [Verticillium albo-atrum VaMs.102]
  misc_feature (27)..(325): NCBI GI: 256726222 Blast Desc: [Nectria haematococca mpVI 77-13-4]
  misc_feature (21)..(323): NCBI GI: 164425258 Blast Desc: NCU11314 [Neurospora crassa OR74A] gi|157070854|gb|EDO65125.1| conserved [Neurospora crassa OR74A]
  misc_feature (20)..(329): NCBI GI: 145249256 Blast Desc: An14g03420 [Aspergillus niger] gi|134081645|emb|CAK46579.1| protein product [Aspergillus niger]
  misc_feature (20)..(329): NCBI GI: 169776955 Blast Desc: [Aspergillus oryzae RIB40] gi|238494034|ref|XP_002378253.1| CaaX prenyl proteinase Rce1 [Aspergillus flavus NRRL3357] gi|83771680|dbj|BAE61810.1| protein
  misc_feature (3)..(327): NCBI GI: 119196557 Blast Desc: CIMG_02653 [Coccidioides immitis RS]
MPSIMDKLNGYFGHEKPKPPPITTGTAAALLVVYTLIYVVPFYLSATTRPSRTLSRDAPAVIRARITSVCLTCVVCSVITFVILTSQGHATHAEALHSLGYWPVGLRETINSLLLTAILFSAPLYETLVVDGAWRDWLSLRSMSSLWSEWITWRNIVAGPLTEEILFRSASVPLMLMARASVTQTIFLSPVIFGLAHFHHFYEFRVTHPQIPVMTGLLRSVLQFSYTSLFGAYATFLFLRTGSVLAIFIAHAFCNIMGLPRLWGRVQPLSDYDYLEVNEERDGGKSKQRKEPSIMWTIVYYVLLVVGAIGWWKNLGVLTKSDNTLVTINI

SEQ ID NO: 23458 - DNA, 2058 bp, Muscodor strobelii
  misc_feature: SGI EST ID NO. CUFF.55158.0
  misc_feature: Variant of the nucleotide sequence at SEQ ID NO 23456
tgtggaattgtgatcttgtggtctatatcggcacaccacccgaaatgtggatgggtgcatatcgaagctctgggctggagatgggttccctttactagcccgctctcaacggcgcagattctagaataccggcaagatgcttggaattcgtctcatctaggctacaatagtctagcttcatctcgggcaagagctcccctcgatccacgtagacacttgttagacgccaatcgtttctcctattcatccatatcctgagaatagaataggactagagttggaatggcatagatgacacagcatgtgcgtctggtatggcaagtttgcataccgatgttccgacatatgtggcaggggccgaacggcatactcaagcaccctgcgtacaccaggcacgcgcttatggactggcgcttgttgatacgagatggagtacggaagtagtcacgagagaaaaacttgggccatctctgaattattaagcgctgtttcaatgcaggtctcaaacttgctgcagccctctctccgccgtgatgtacgaatttccaagtctgttcagcatttgggtctaaactgtataagcgacctcgtgaacccttgagcacgtccagcggaaacagtcattggctcaaatcgctaacgagctctccctgctcttatccgtgatcgagactggactgaaagtcccgatggttcgggctccaaaataggccagtctgcctcaagtattgtcgctatcggtaggaagtcgacattgaagagcaaagaccaggtttcgattgacattgagagcttgaagtcgtcggtcacgaccgacactctgatacggacccaccctatctggatctaatacttcacgatgccgtcgatcatggataagctaaacgggtactttgggcacgagaaacgcaagtctctgaacctgatgatgctcgatcaaaagaactgacccgactatgccagccaaaccaccgccaatcaccacgggtactgcagccgcgctgcttgtggtatacacgctgatctacgtggtacctttctatctgtcggctaccacgcgcccatctaggacattatctcgagatgcgccggccgtcatacgtgcccgcattacctccgtgtgtctgacttgtgtcgtttgttccgtcatcacctttgtcattctcacgtctcagggccacgccacacatgccgaggccttgcattcactgggctactggcccgtcggcctgagggagaccatcaactctctcctgctgaccgccatccttttcagcgccccgttgtatgagaccctcgtggttgacggggcatggagagattggttgagtctgcggtcaatgtccagtctttggagcgaatggataacatggcgcaatatcgttgctggtccgctcacagaggagatactcttccgctcggcctccgtgcctttgatgcttatggcccgtgcgtctgtaacccagaccatcttcctctcgcctgtgatcttcgggctggcacacttccaccatttctacgagttccgcgtaacgcacccgcagatacccgtgatgacgggcctactacgctctgttcttcaattctcatacacgtcactatttggcgcgtatgctacctttctctttctgcgtacaggtagtgtactagcaatattcattgcgcacgctttctgtaatatcatgggtcttccgcgcctctggggtcgagttcagcctctctcggactacgactacttggaagttaacgaggagagagatggtgggaagtcgaaacaacggaaggagccttcgatcatgtggaccatcgtatactacgtccttcttgttgtcggagccattgggtggtggaagaacctgggcgtgttgacgaagagcgataataccctagttactatcaatatttagagctatatattgactatgacgactacaaatgcacacaacttcatgatcaccaattgctatatgggaaatacactactgtataaccacccgcgcacaccagctcataaccatcccagaatcaggtacggaacgaacatcatcccactccgcg

SEQ ID NO: 23459 - DNA, 1353 bp, Muscodor strobelii
  misc_feature: SGI cDNA ID NO. 567982
  misc_feature: Encodes the peptide sequence at SEQ ID NO 23460
atgtctgccgcagatatatgcccgacgaaacctgaaccgacgtgggactgcccgttcaacttgtcctttatacagggcttgattgtcggccagatctctgtcgttcttttgatagctgcctttatcaaattcttcatcttcggcgaccctccctctcccgatcttactgcctccatacgagccaccgagcgccggtctcgcaccctctcccatcgcaagtcgcttctgacattgcgcacgccgaacgcgagacattcccagcccactcttaacaagaagaagtcgagcatactacgaaaccctcctaccttgaccattggttccatactcagcaagacatactataacgttgacagccaccagcccgagtcactggactggttcaatgtcctggtcgcccagaccattgcgcagtttcgcagcgacgcccagcacgatgatgcgatcctcacctctctgaccaaggccctgaatggcacctcgaggcccgactttttagacgagatcaaggttaccgagcttacactcggcgaggatttccccatcttcagcaactgttgcatcatccccgttgatgaagatggcctgagcctggagaaccacggtggtggccagaatggcggcgcacagaaacgcccggggctcgcagcgagtgcccgcgcaaagatgttggacgggtctcgactgcaggcgcgtatggacgtcgacctgagtgatatgatcaccatggccatcgagaccaaactactacttaattatcccaagcggctaactgccgttctacccgttgcgctggctgtaagtgttgtgcgcttcagtggaaccttaagcatatcgttcataccatcaaatccatccaagtcgacatctgctatgatgacattcagctttctcgacgactataggctggacttctcgatccgcagtctagtcggcagccgatcacgcttgcaagacgtgcccaagattgcacaattgatcgaggatcgcctccaccgctggtttgatgaccgtgctgttgaaccccggtttcaagaaattgccctgccgagcatgtggcctagaaagaagaacacgcggggcggcagtggtggagaagagggtcttgatggaatatcttctgctgctatgagcatggggaaaggtaaaggtagagaagtcgcaaaagatattcgcgacgaggcccgtaaagaagtcgaagctgagtccgctgctacagcaggatcaagaccggagctaaattcggacaacttgcgatataggcgggccagaggtagagaagatggcatgggcactggctctttctctatgcctgggagtctcccgggaatggacatgaatttgcagacgtga

SEQ ID NO: 23460 - protein, 450 aa, Muscodor strobelii
  misc_feature: SGI Peptide ID NO. 567982
  misc_feature (4)..(443): NCBI GI: 85109618 Blast Desc: NCU06193 [Neurospora crassa OR74A] gi|74624908|sp|Q9P353.1|MMM1_NEUCR RecName: Full=Maintenance of mitochondrial morphology protein 1 maintaining mitochondrial MMM1
  misc_feature (5)..(441): NCBI GI: 39953695 Blast Desc: MGG_08853 [Magnaporthe grisea 70-15] gi|259495814|sp|A4RM19.1|MMM1_MAGGR RecName: Full=Maintenance of mitochondrial morphology protein 1 gi|145021211|gb|EDK05340.1|
  misc_feature (3)..(446): NCBI GI: 46111429 Blast Desc: FG02596.1 [Gibberella zeae PH-1]
  misc_feature (3)..(400): NCBI GI: 261360094 Blast Desc: mitochondrial outer membrane protein MMM1 [Verticillium albo-atrum VaMs.102]
  misc_feature (3)..(446): NCBI GI: 171685686 Blast Desc: protein product [Podospora anserina] gi|259496062|sp|B2AVN3.1|MMM1_PODAN RecName: Full=Maintenance of mitochondrial morphology protein 1 gi|170942804|emb|CAP68457.1|
  misc_feature (4)..(442): NCBI GI: 256725820 Blast Desc: [Nectria haematococca mpVI 77-13-4]
  misc_feature (9)..(447): NCBI GI: 154322671 Blast Desc: BC1G_00678 [Botryotinia fuckeliana B05.10] gi|259495805|sp|A6RJQ7.1|MMM1_BOTFB RecName: Full=Maintenance of mitochondrial morphology protein 1 gi|150848012|gb|EDN23205.1|
  misc_feature (16)..(446): NCBI GI: 156064847 Blast Desc: SS1G_00431 [Sclerotinia sclerotiorum 1980] gi|259496066|sp|A7E559.1|MMM1_SCLS1 RecName: Full=Maintenance of mitochondrial morphology protein 1 gi|154691293|gb|EDN91031.1|
  misc_feature (4)..(428): NCBI GI: 189190360 Blast Desc: mitochondrial outer membrane protein MMM1 [Pyrenophora tritici-repentis Pt-1C-BFP] gi|259496064|sp|B2VVB9.1|MMM1_PYRTR RecName: Full=Maintenance of mitochondrial morphology protein 1
  misc_feature (13)..(363): NCBI GI: 169624078 Blast Desc: SNOG_15291 [Phaeosphaeria nodorum SN15] gi|121744215|sp|Q0TYM0.1|MMM1_PHANO RecName: Full=Maintenance of mitochondrial morphology protein 1 gi|111056104|gb|EAT77224.1|
MSAADICPTKPEPTWDCPFNLSFIQGLIVGQISVVLLIAAFIKFFIFGDPPSPDLTASIRATERRSRTLSHRKSLLTLRTPNARHSQPTLNKKKSSILRNPPTLTIGSILSKTYYNVDSHQPESLDWFNVLVAQTIAQFRSDAQHDDAILTSLTKALNGTSRPDFLDEIKVTELTLGEDFPIFSNCCIIPVDEDGLSLENHGGGQNGGAQKRPGLAASARAKMLDGSRLQARMDVDLSDMITMAIETKLLLNYPKRLTAVLPVALAVSVVRFSGTLSISFIPSNPSKSTSAMMTFSFLDDYRLDFSIRSLVGSRSRLQDVPKIAQLIEDRLHRWFDDRAVEPRFQEIALPSMWPRKKNTRGGSGGEEGLDGISSAAMSMGKGKGREVAKDIRDEARKEVEAESAATAGSRPELNSDNLRYRRARGREDGMGTGSFSMPGSLPGMDMNLQT

SEQ ID NO: 23461 - DNA, 1776 bp, Muscodor strobelii
  misc_feature: SGI cDNA ID NO. 567983
  misc_feature: Encodes the peptide sequence at SEQ ID NO 23462
atggatgtcgtccaggcagtctccggctacatctccaagatggtgtcggccggagacagcccatctgggggtccgtctgcaaagatgaagatactcctgctcgaccgcgagacagtgccaattgtttcaacagctgtcacgcagtcagccttactcaaccacgaggtctacctgaccgaccgcctagataatccgaatcgagagaagatgcgacatttgcgctgtctctgcttcgtgcgcccatctccagactcgattcaactgctgattgatgaactacgagagcccaagtatggggaatactatctctacttcagcaacgtcatcaagaaatcatcacttgagaggctagccgaagctgacgatcatgaagttgtcaaatctgtccaagagcactttgccgacttcattgttatcaacccggacctcttctccctcagcatgtccctaccccagcagaggatatggggcaacacgccagatatgtggaatgcagactcactacagcgaacgacgcagggcattatcgctgctctcctagcactcaagaagaagccactcattcgctatgagaagaacagccttttatcactgaagcttgcaaaggaagttcggtatcaaatcacacaagaggagcagctctttgattttcgaaaagtcgacacaccgccaatactacttattctagaccggagagaagaccccgcgactcccatcctaaaccaatggacatatcaggctatggtgcatcaactgctaggaatacataatggcagggtcgacctcggcgatgtgcaagatattcgcccagaacttaaagagattgtcttgtcacaggatcaggacccattcttcaagaagaacatgtatatgaactttggagatctcggaggtaacatcaaggattacgtggaacaataccagagcaagacgaagaataacgccaacattgagtccataacggacatgaagcggttcatcgaggagtatcccgaattccggaagctttctggaaacgtcagcaaacatgtgactttggtttcagaactgagtcggagggtgggcgccgagaacttattagaagtcagcgaagttgagcaaagcttagcttgcaatgacaatcatgctgccgatcttaagaacgtgcaaaagctgatccaaaatccttcggttgcgccggagaataaagtcggtctagtttcgctttacgctttgcgatatgaaaaacacccctcaaattcactgactatgctggtggaccttctgaacgcagcaggcggcgtgcctgcccgtcaagcagacatggtcgcaaaattacttatttatcacaactctcttcagcagtcgcaagcagccggtggcattgcagatatattcgagggaggaggcatattttcaggtgctagggcgatgaaaggtctgaaaggcgttgagaacgtctatacccagcattctccacacttagaaacaacgcttcaaaatatgatcaagggaaagctccgagatcaacaatatccattcgtcgatggaggtgggacaacaagagataaacctcaggatatcattgttttcatgataggaggcgcgacgtacgaggaggctaaaacagtagctgggattaatgcatcttcaccaggcatccgggtggtacttgggggaacttctattcataatgctgctaccttcttggaggaggtagacgatgcagtgtcatcttggccagagcctccccctacaacagctgcaggtcggctgaggaaagagattggtagataa

SEQ ID NO: 23462 - protein, 591 aa, Muscodor strobelii
  misc_feature: SGI Peptide ID NO. 567983
  misc_feature (29)..(566): Pfam Id: PF00995 Pfam Desc: Sec1 family
  misc_feature (1)..(591): NCBI GI: 154322687 Blast Desc: BC1G_00686 [Botryotinia fuckeliana B05.10] gi|150848020|gb|EDN23213.1| BC1G_00686 [Botryotinia fuckeliana B05.10]
  misc_feature (1)..(586): NCBI GI: 261360095 Blast Desc: vacuolar protein sorting-associated protein [Verticillium albo-atrum VaMs.102]
  misc_feature (1)..(586): NCBI GI: 116207158 Blast Desc: CHGG_02872 [Chaetomium globosum CBS 148.51] gi|88183469|gb|EAQ90937.1| CHGG_02872 [Chaetomium globosum CBS 148.51]
  misc_feature (1)..(591): NCBI GI: 226294749 Blast Desc: vacuolar protein sorting-associated protein [Paracoccidioides brasiliensis Pb18]
  misc_feature (1)..(591): NCBI GI: 225678542 Blast Desc: vacuolar protein sorting-associated protein VpsB [Paracoccidioides brasiliensis Pb03]
  misc_feature (1)..(591): NCBI GI: 261190941 Blast Desc: vacuolar protein sorting-associated protein 45 [Ajellomyces dermatitidis SLH14081] gi|239590923|gb|EEQ73504.1| vacuolar protein sorting-associated protein 45 [Ajellomyces 45
  misc_feature (1)..(591): NCBI GI: 169776961 Blast Desc: [Aspergillus oryzae RIB40] gi|238494040|ref|XP_002378256.1| vacuolar protein sorting-associated protein VpsB [Aspergillus flavus NRRL3357]
  misc_feature (1)..(591): NCBI GI: 225554732 Blast Desc: vacuolar sorting-associated protein [Ajellomyces capsulatus G186AR]
  misc_feature (1)..(591): NCBI GI: 242823889 Blast Desc: vacuolar protein sorting-associated protein VpsB [Talaromyces stipitatus ATCC 10500] gi|218713071|gb|EED12496.1| vacuolar protein sorting-associated protein VpsB [Talaromyces
  misc_feature (1)..(591): NCBI GI: 212546279 Blast Desc: vacuolar protein sorting-associated protein VpsB [Penicillium marneffei ATCC 18224] gi|210064813|gb|EEA18908.1| vacuolar protein sorting-associated protein VpsB [Penicillium
MDVVQAVSGYISKMVSAGDSPSGGPSAKMKILLLDRETVPIVSTAVTQSALLNHEVYLTDRLDNPNREKMRHLRCLCFVRPSPDSIQLLIDELREPKYGEYYLYFSNVIKKSSLERLAEADDHEVVKSVQEHFADFIVINPDLFSLSMSLPQQRIWGNTPDMWNADSLQRTTQGIIAALLALKKKPLIRYEKNSLLSLKLAKEVRYQITQEEQLFDFRKVDTPPILLILDRREDPATPILNQWTYQAMVHQLLGIHNGRVDLGDVQDIRPELKEIVLSQDQDPFFKKNMYMNFGDLGGNIKDYVEQYQSKTKNNANIESITDMKRFIEEYPEFRKLSGNVSKHVTLVSELSRRVGAENLLEVSEVEQSLACNDNHAADLKNVQKLIQNPSVAPENKVGLVSLYALRYEKHPSNSLTMLVDLLNAAGGVPARQADMVAKLLIYHNSLQQSQAAGGIADIFEGGGIFSGARAMKGLKGVENVYTQHSPHLETTLQNMIKGKLRDQQYPFVDGGGTTRDKPQDIIVFMIGGATYEEAKTVAGINASSPGIRVVLGGTSIHNAATFLEEVDDAVSSWPEPPPTTAAGRLRKEIGR

SEQ ID NO: 23463 - DNA, 2050 bp, Muscodor strobelii
  misc_feature: SGI EST ID NO. CUFF.55164.0
  misc_feature: Variant of the nucleotide sequence at SEQ ID NO 23461
gcctcacccgtgtatctgcactcaccttccaaagccaacacacttcacaagctctaatcttcacaccaattgtgtccagctttgctatcgcatcctatcgtgaaaagagagccgccatacagctgctggccaagtaaaaagcttcgcgaactcgatccatgccctggccctaatagaggtacaacatcgagtcatagcctggtctagacagttcactcacccaagatggatgtcgtccaggcagtctccggctacatctccaagatggtgtcggccggagacagcccatctgggggtccgtctgcaaagatgaagatactcctgctcgaccgcgagacagtgccaattgtttcaacagctgtcacgcagtcagccttactcaaccacgaggtctacctgaccgaccgcctagataatccgaatcgagagaagatgcgacatttgcgctgtctctgcttcgtgcgcccatctccagactcgattcaactgctgattgatgaactacgagagcccaagtatggggaatactatctctacttcagcaacgtcatcaagaaatcatcacttgagaggctagccgaagctgacgatcatgaagttgtcaaatctgtccaagagcactttgccgacttcattgttatcaacccggacctcttctccctcagcatgtccctaccccagcagaggatatggggcaacacgccagatatgtggaatgcagactcactacagcgaacgacgcagggcattatcgctgctctcctagcactcaagaagaagccactcattcgctatgagaagaacagccttttatcactgaagcttgcaaaggaagttcggtatcaaatcacacaagaggagcagctctttgattttcgaaaagtcgacacaccgccaatactacttattctagaccggagagaagaccccgcgactcccatcctaaaccaatggacatatcaggctatggtgcatcaactgctaggaatacataatggcagggtcgacctcggcgatgtgcaagatattcgcccagaacttaaagagattgtcttgtcacaggatcaggacccattcttcaagaagaacatgtatatgaactttggagatctcggaggtaacatcaaggattacgtggaacaataccagagcaagacgaagaataacgccaacattgagtccataacggacatgaagcggttcatcgaggagtatcccgaattccggaagctttctggaaacgtcagcaaacatgtgactttggtttcagaactgagtcggagggtgggcgccgagaacttattagaagtcagcgaagttgagcaaagcttagcttgcaatgacaatcatgctgccgatcttaagaacgtgcaaaagctgatccaaaatccttcggttgcgccggagaataaagtcggtctagtttcgctttacgctttgcgatatgaaaaacacccctcaaattcactgactatgctggtggaccttctgaacgcagcaggcggcgtgcctgcccgtcaagcagacatggtcgcaaaattacttatttatcacaactctcttcagcagtcgcaagcagccggtggcattgcagatatattcgagggaggaggcatattttcaggtgctagggcgatgaaaggtctgaaaggcgttgagaacgtctatacccagcattctccacacttagaaacaacgcttcaaaatatgatcaagggaaagctccgagatcaacaatatccattcgtcgatggaggtgggacaacaagagataaacctcaggatatcattgttttcatgataggaggcgcgacgtacgaggaggctaaaacagtagctgggattaatgcatcttcaccaggcatccgggtggtacttgggggaacttctattcataatgctgctaccttcttggaggaggtagacgatgcagtgtcatcttggccagagcctccccctacaacagctgcaggtcggctgaggaaagagattggtagataataatttggtgagaatcaatcaatcaaccggctttccaagtcaatatccg

SEQ ID NO: 23464 - DNA, 909 bp, Muscodor strobelii
  misc_feature: SGI cDNA ID NO. 567984
  misc_feature: Encodes the peptide sequence at SEQ ID NO 23465
atggcatcgaacgtcgcgacggacgaacggcgacctctgctacgagtgaatacgccgaatggccaaggccaaactcgagaagaaggttcgctaccgcaaccagagcatgggcgtctcgaagacgatgttttacctgaagaaagtgtgcttggaaggaatatagattggaagagtgcatacatcatctcgatatctagagttattggaagtgggttattcgctgtccctggtgtcattttaacatcagtcggaagtattggtctttcgttgacgctctggattttgggcgcggtgatcgttgcttctggtttggccgtttctcttgaatatggttgcatgttgccgcgctcaggcggtgacaaagtctatctcgaattcacatatccgcgcccgcggtttctcgcctcgactctaattgctgtccaagcagtgttgctaggtttcacagcgagtaactgtataatattcagccaatatgttttcttcgcattcgactacgagccagccgatgcctggcgcaaggggcttgctgttgcactgcttaccgttatcacggtcatccatggcgtttggtatcgagccggtattcatatacaaaactttctaggttggatcaaagtcttgatcgttgtattcatgatcttcagcgcattttatgttgttctgtttcgaccaaatgacatcgcctctcacgtgccaaatgctgccttggcaccggagctcagcacctgggacagtctttgggaaggcagtgattggagttttggtactatagcgacatcgctattcaaagtgttttattcatacgcgggtttgacgaatttgaataatgtgctgaatgaagtgggtatgcaacatttctctcctaatgctttacaaagctctccaatgggggacattaccgtttga

SEQ ID NO: 23465 - protein, 302 aa, Muscodor strobelii
  misc_feature: SGI Peptide ID NO. 567984
  misc_feature (3)..(278): NCBI GI: 169625338 Blast Desc: SNOG_15942 [Phaeosphaeria nodorum SN15] gi|160705638|gb|EAT76780.2| SNOG_15942 [Phaeosphaeria nodorum SN15]
  misc_feature (9)..(295): NCBI GI: 156043833 Blast Desc: SS1G_10920 [Sclerotinia sclerotiorum 1980] gi|154695307|gb|EDN95045.1| SS1G_10920 [Sclerotinia sclerotiorum 1980]
  misc_feature (4)..(282): NCBI GI: 242771514 Blast Desc: methionine permease, [Talaromyces stipitatus ATCC 10500] gi|218721477|gb|EED20895.1| methionine permease, [Talaromyces stipitatus ATCC 10500]
  misc_feature (38)..(282): NCBI GI: 261360476 Blast Desc: methionine permease [Verticillium albo-atrum VaMs.102]
  misc_feature (9)..(282): NCBI GI: 154297781 Blast Desc: BC1G_12302 [Botryotinia fuckeliana B05.10] gi|150858431|gb|EDN33623.1| BC1G_12302 [Botryotinia fuckeliana B05.10]
  misc_feature (8)..(282): NCBI GI: 256724685 Blast Desc: NECHADRAFT_96011 [Nectria haematococca mpVI 77-13-4]
  misc_feature (9)..(292): NCBI GI: 171676300 Blast Desc: protein product [Podospora anserina] gi|170936216|emb|CAP60875.1| protein product [Podospora anserina]
  misc_feature (1)..(282): NCBI GI: 145606434 Blast Desc: MGG_02328 [Magnaporthe grisea 70-15] gi|145014095|gb|EDJ98736.1| MGG_02328 [Magnaporthe grisea 70-15]
  misc_feature (9)..(282): NCBI GI: 121706342 Blast Desc: methionine permease, [Aspergillus clavatus NRRL 1] gi|119399580|gb|EAW10008.1| methionine permease, [Aspergillus clavatus NRRL 1]
  misc_feature (39)..(282): NCBI GI: 116205692 Blast Desc: CHGG_02139 [Chaetomium globosum CBS 148.51] gi|88182736|gb|EAQ90204.1| CHGG_02139 [Chaetomium globosum CBS 148.51]
MASNVATDERRPLLRVNTPNGQGQTREEGSLPQPEHGRLEDDVLPEESVLGRNIDWKSAYIISISRVIGSGLFAVPGVILTSVGSIGLSLTLWILGAVIVASGLAVSLEYGCMLPRSGGDKVYLEFTYPRPRFLASTLIAVQAVLLGFTASNCIIFSQYVFFAFDYEPADAWRKGLAVALLTVITVIHGVWYRAGIHIQNFLGWIKVLIVVFMIFSAFYVVLFRPNDIASHVPNAALAPELSTWDSLWEGSDWSFGTIATSLFKVFYSYAGLTNLNNVLNEVGMQHFSPNALQSSPMGDITV

SEQ ID NO: 23466 - DNA, 894 bp, Muscodor strobelii
  misc_feature: SGI cDNA ID NO. 567985
  misc_feature: Encodes the peptide sequence at SEQ ID NO 23467
atgccaccgctcaccaccgagaagcgaaggcctcaagatgttcgacagccaaatcaattactcaatactcgcttagacactctgcagacaaacacaggcttaaacgaggcgggtcacaatggtattgagttcggagaagacagttcgccaaaggcggacagagccgtggtatattttgccctagagagaagacgccatgatggtagcaataacgacgataacggcggcggaaatgggaggaatggaagtaatgatgacaacaatgatgataacaacgacaataacagccgcaacaatggcgggaaccagagaaatggcggcagaccgcaatccactaggaaagatgacaacggccgaagtagaggcagcaatggaggtgacagcaacagaagtaacgacaatggcgggaacagcaacttcagatctgaaagcagtagcaatggtaacggcgacaatggcagcggtagcagtggcggccgaggaggtggccccggaggtggcggcccaggaaatagaggaaacggcggaagcaatggtggagggagcaacggtggaggaaacgggaacaataacaacaacaataataataatgacaacggcaacaacggcaatgacagcaacaatggcggaggcagtaagaataacggtggcagcggcgacggcagtcgtggaggcaatgatagcagtacctcgtcatctgagagtacttcgacgagcacttccgaggttgatacgacaacaacaacgagcactagttcaaccgcgtcggtcacatctactatatcaactacgtcagactcaaatgtcgtcactggcacgccgacggtcagctctgttgcgaaaggagctgacccatctacactggtacgtattgcacagtcgaacctacactga

SEQ ID NO: 23467 - protein, 297 aa, Muscodor strobelii
  misc_feature: SGI Peptide ID NO. 567985
MPPLTTEKRRPQDVRQPNQLLNTRLDTLQTNTGLNEAGHNGIEFGEDSSPKADRAVVYFALERRRHDGSNNDDNGGGNGRNGSNDDNNDDNNDNNSRNNGGNQRNGGRPQSTRKDDNGRSRGSNGGDSNRSNDNGGNSNFRSESSSNGNGDNGSGSSGGRGGGPGGGGPGNRGNGGSNGGGSNGGGNGNNNNNNNNNDNGNNGNDSNNGGGSKNNGGSGDGSRGGNDSSTSSSESTSTSTSEVDTTTTTSTSSTASVTSTISTTSDSNVVTGTPTVSSVAKGADPSTLVRIAQSNLH

SEQ ID NO: 23468 - DNA, 1070 bp, Muscodor strobelii
  misc_feature: SGI EST ID NO. CUFF.55185.0
  misc_feature: Variant of the nucleotide sequence at SEQ ID NO 23466
cgttcttcttaattttctaataccatctttcattcggttcggggcaggtcctcttttgtaatatctattccgaggctggactcccggtttcttcactcgatatccaatatctcgaaaatctgtctcaccacgcacacgatcaacttgctataggctatgttttcgaggaagcatcgaatggttgtgtgcgaggcattataagagggccaaacagaataatgccaccgctcaccaccgagaagcgaaggcctcaagatgttcgacagccaaatcaattactcaatactcgcttagacactctgcagacaaacacaggcttaaacgaggcgggtcacaatggtattgagttcggagaagacagttcgccaaaggcggacagagccgtggtatattttgccctagagagaagacgccatgatggtagcaataacgacgataacggcggcggaaatgggaggaatggaagtaatgatgacaacaatgatgataacaacgacaataacagccgcaacaatggcgggaaccagagaaatggcggcagaccgcaatccactaggaaagatgacaacggccgaagtagaggcagcaatggaggtgacagcaacagaagtaacgacaatggcgggaacagcaacttcagatctgaaagcagtagcaatggtaacggcgacaatggcagcggtagcagtggcggccgaggaggtggccccggaggtggcggcccaggaaatagaggaaacggcggaagcaatggtggagggagcaacggtggaggaaacgggaacaataacaacaacaataataataatgacaacggcaacaacggcaatgacagcaacaatggcggaggcagtaagaataacggtggcagcggcgacggcagtcgtggaggcaatgatagcagtacctcgtcatctgagagtacttcgacgagcacttccgaggttgatacgacaacaacaacgagcactagttcaaccgcgtcggtcacatctactatatcaactacgtcagactcaaatgtcgtcactggcacgccgacggtcagctctgttgcgaaaggagctgac

SEQ ID NO: 23469 - DNA, 669 bp, Muscodor strobelii
  misc_feature: SGI cDNA ID NO. 567986
  misc_feature: Encodes the peptide sequence at SEQ ID NO 23470
atggcgattaaagtatcactactcaccgaacgtgacattgcaggtgccgttactgccatacaagaagcattcgctgaagacccatataatagttgggtgtttgataaatctaagttcgaccctaagcgcaatgcggcatccttaggaatacgctgccgctggggaatgcgcaatggcttgtttcacgtggcccaagaagagggcagcgacgagatccttggcgtagcgtgttggttacggcctcagcctacggatgagcccccaacatggtcggactgggcggaggactggaggttgtggttcaatcaacttggtatgaacatctggtacggccgcggtggcttaaacgtcaagcggtattatatatggaaagcagcacaagcaaaagcgcaaagcgcggtatgggatgactcaagaggatactatttcttgaatatggtcgtagtccccaaagcccaaggccaaggcgtaggccgtctgatgatgaaagaagtaacagacgaagctgacgccttgggcatgaagtgctacctcgagtccagtcgcgacgtaccaaacatgcagatatactcgcgtttcggcttcaagttcgcaaaagagctcgaatgtgacgatgacgggacagccattaagttatatacaatggtcagggatccacagcctaagtaa

SEQ ID NO: 23470 - protein, 222 aa, Muscodor strobelii
  misc_feature: SGI Peptide ID NO. 567986
  misc_feature (146)..(196): Pfam Id: PF00583 Pfam Desc: Acetyltransferase (GNAT) family
  misc_feature (1)..(220): NCBI GI: 256723334 Blast Desc: NECHADRAFT_72697 [Nectria haematococca mpVI 77-13-4]
  misc_feature (1)..(222): NCBI GI: 156058360 Blast Desc: SS1G_03191 [Sclerotinia sclerotiorum 1980] gi|154700979|gb|EDO00718.1| SS1G_03191 [Sclerotinia sclerotiorum 1980]
  misc_feature (1)..(220): NCBI GI: 154309238 Blast Desc: BC1G_07513 [Botryotinia fuckeliana B05.10] gi|150852337|gb|EDN27529.1| BC1G_07513 [Botryotinia fuckeliana B05.10]
  misc_feature (1)..(220): NCBI GI: 255934074 Blast Desc: Pc12g15150 [Penicillium chrysogenum Wisconsin 54-1255] gi|211582937|emb|CAP81142.1| Pc12g15150 [Penicillium chrysogenum Wisconsin 54-1255]
  misc_feature (1)..(222): NCBI GI: 121701599 Blast Desc: acetyltransferase, GNAT family family [Aspergillus clavatus NRRL 1] gi|119397207|gb|EAW07638.1| acetyltransferase, GNAT family family [Aspergillus clavatus NRRL 1]
  misc_feature (1)..(220): NCBI GI: 189198914 Blast Desc: acetyltransferase [Pyrenophora tritici-repentis Pt-1C-BFP] gi|187982893|gb|EDU48381.1| acetyltransferase [Pyrenophora tritici-repentis Pt-1C-BFP]
  misc_feature (1)..(222): NCBI GI: 115491725 Blast Desc: conserved [Aspergillus terreus NIH2624] gi|114197350|gb|EAU39050.1| conserved [Aspergillus terreus NIH2624]
  misc_feature (1)..(220): NCBI GI: 240273906 Blast Desc: acetyltransferase [Ajellomyces capsulatus H143]
  misc_feature (1)..(205): NCBI GI: 70995634 Blast Desc: acetyltransferase, GNAT family family [Aspergillus fumigatus Af293] gi|41581283|emb|CAE47932.1| n-acetyltransferase, [Aspergillus fumigatus] gi|66850207|gb|EAL90534.1| GNAT family
  misc_feature (1)..(205): NCBI GI: 119495545 Blast Desc: acetyltransferase, GNAT family family [Neosartorya fischeri NRRL 181] gi|119412717|gb|EAW22658.1| acetyltransferase, GNAT family family [Neosartorya fischeri NRRL 181]
MAIKVSLLTERDIAGAVTAIQEAFAEDPYNSWVFDKSKFDPKRNAASLGIRCRWGMRNGLFHVAQEEGSDEILGVACWLRPQPTDEPPTWSDWAEDWRLWFNQLGMNIWYGRGGLNVKRYYIWKAAQAKAQSAVWDDSRGYYFLNMVVVPKAQGQGVGRLMMKEVTDEADALGMKCYLESSRDVPNMQIYSRFGFKFAKELECDDDGTAIKLYTMVRDPQPK

SEQ ID NO: 23471 - DNA, 957 bp, Muscodor strobelii
  misc_feature: SGI EST ID NO. CUFF.55225.1
  misc_feature: Variant of the nucleotide sequence at SEQ ID NO 23469
gctgaaagataaattttccacatatgaagacctgagacaagattactttattctacgtaaaatggcgattaaagtatcactactcaccgaacgtgacattgcaggtgccgttactgccatacaagaagcattcgctgaagacccatataatagttgggtgtttgataaatctaagttcgaccctaagcgcaatgcggcatccttaggaatacgctgccgctggggaatgcgcaatggcttgtttcacgtggcccaagaagagggcagcgacgagatccttggcgtagcgtgttggttacggcctcagcctacggatgagcccccaacatggtcggactgggcggaggactggaggttgtggttcaatcaacttggtatgaacatctggtacggccgcggtggcttaaacgtcaagcggtattatatatggaaagcagcacaagcaaaagcgcaaagcgcggtatgggatgactcaagaggatactatttcttgaatattgtgggtgctacctcaccatcacatcagcactacataacccttatggaaacccaacaaacgtcaaacaaacgaaactaactccagccctcaagatggtcgtagtccccaaagcccaaggccaaggcgtaggccgtctgatgatgaaagaagtaacagacgaagctgacgccttgggcatgaagtgctacctcgagtccagtcgcgacgtaccaaacatgcagatatactcgcgtttcggcttcaagttcgcaaaagagctcgaatgtgacgatgacgggacagccattaagttatatacaatggtcagggatccacagcctaagtaatgatatcattcagatctcaaagtcagatagatagatccttgttacttttgcacccattgccatcgactctggttacaatagtcctagatacaaatataatgccactttcaaagccttggatctggtaccaac

SEQ ID NO: 23472 - DNA, 1752 bp, Muscodor strobelii
  misc_feature: SGI cDNA ID NO. 567987
  misc_feature: Reduced expression when VOC is produced
  misc_feature: Encodes the peptide sequence at SEQ ID NO 23473
atgactcgcttcggcgcagcagcagtcactcgactgtctgccgccgaagctgtcgccagagttgctcgtcagcagcatgccgccaccttcgcgacgaaatcgtctgcgaacagacctcatctaccatccgctatcctctcccgcgccttaacgcccgcctcccgccaatttgcacgttatagttccgatgttgctgcccctgctcccaagaagaagcccggccgggtgaggactaccttcaaatggatgtggcgcaccacctacctgtctctaattctcgctgtcggcggtgttatctacgacggctacaccgatcgccatccggacgaccagtttcatcccgatcccgagaagaagactcttgttatccttggaaccggatggggctctgtagcacttctgaagaagctcgacactgccaactacaacgttgtagtaatctctcctcgcaactacttcctgttcactcctctgctgccttcatgtaccaccggaaacatcgagcaccgctccatcatggagcccgtccgccagatccttcgtcacaagaaagccgctgtcaagttctacgaggcagaagctaccaagatcgattacgagaacaaggtcatcaagatctccgacaacagcgatatcaagggcacaatcaacgagaccgaggttccctacgacatgctggtggttggtgtcggtgctgagaacgcgaccttcggcattcccggtgtgcgcgagaacagctgcttcctcaaggagatccgcgatgcccaggctatccgaaccaagatcatggactgtgtcgaaactgccgccttcaaggaccaggacccctcggaaatcgatcgtctgctccacatggtcgttgtcggcggcggtcccaccggtgtcgagttcgccggtgagcttcgcgacttcttcgatgaggatatcaagaaattgatccccgatatctcgccccgtttcaaagttaccctgatcgaagccctgcctactgttttgcccatgttctcgaagcagctcatcgactacaccgagagcactttcaaggaggagcacatcgagatcaagaccaagaccatggtcaagaaggtcactgacaagacggtcgaggccgaggtctcaaaccccgacggcaccaaatccatgctcaccattccctacggtcttctcgtctgggctaccggtaacgcagtccgccccattgtcaaggatctcatgtcgcagatcccggcccagaaggattcacgacgtggtctggctgtgaatgagtacctcgttgtccaaggcgcgcgcgacatctgggccgttggcgactgcgccgtagctggatacgcccctactgcccaggtcgcttcgcaggagggtaacttcttggcccgtctgttcaacaacatggctaagaccgaggccttggaagccagagtgaaggaactcagctctggcctgaacctcaagcctggcaatgtcgccgagaatactcaggagatcgagaacatcgaaaagcagcttcgccgggtcaaggatatcaagcctttccactactctcatcagggcagtttggcgtacattggtagtgagagggccgtcgctgatgtggcctggctcaatggtaatgttgcctccggcggcaagctgacctacttcttctggcgcagcgcctatctgagcatgtgcttcagtacgcgcaaccgtgtattggtggctcttgactgggtcaaggccaaggtctatggacgggacgtttccagagagtaa

SEQ ID NO: 23473 - protein, 583 aa, Muscodor strobelii
  misc_feature: SGI Peptide ID NO. 567987
  misc_feature (284)..(394): Pfam Id: PF00070 Pfam Desc: Pyridine nucleotide-disulphide oxidoreductase
  misc_feature (120)..(443): Pfam Id: PF07992 Pfam Desc: Pyridine nucleotide-disulphide oxidoreductase
  misc_feature (321)..(394): Pfam Id: PF00070 Pfam Desc: Pyridine nucleotide-disulphide oxidoreductase
  misc_feature (284)..(304): Pfam Id: PF00070 Pfam Desc: Pyridine nucleotide-disulphide oxidoreductase
  misc_feature (52)..(583): NCBI GI: 171685906 Blast Desc: protein product [Podospora anserina] gi|170942914|emb|CAP68567.1| protein product [Podospora anserina]
  misc_feature (52)..(583): NCBI GI: 116207468 Blast Desc: CHGG_03027 [Chaetomium globosum CBS 148.51] gi|88183624|gb|EAQ91092.1| CHGG_03027 [Chaetomium globosum CBS 148.51]
  misc_feature (13)..(583): NCBI GI: 46116576 Blast Desc: FG04130.1 [Gibberella zeae PH-1]
  misc_feature (14)..(583): NCBI GI: 256725742 Blast Desc: [Nectria haematococca mpVI 77-13-4]
  misc_feature (29)..(583): NCBI GI: 156058358 Blast Desc: SS1G_03190 [Sclerotinia sclerotiorum 1980] gi|154700978|gb|EDO00717.1| SS1G_03190 [Sclerotinia sclerotiorum 1980]
  misc_feature (1)..(583): NCBI GI: 154309236 Blast Desc: BC1G_07512 [Botryotinia fuckeliana B05.10] gi|150852336|gb|EDN27528.1| BC1G_07512 [Botryotinia fuckeliana B05.10]
  misc_feature (8)..(583): NCBI GI: 85091656 Blast Desc: NCU11397 [Neurospora crassa OR74A] gi|28920404|gb|EAA29772.1| NCU11397 [Neurospora crassa OR74A]
  misc_feature (59)..(583): NCBI GI: 119174138 Blast Desc: CIMG_09051 [Coccidioides immitis RS]
  misc_feature (59)..(583): NCBI GI: 240106707 Blast Desc: external NADH-ubiquinone oxidoreductase 1, mitochondrial precursor, [Coccidioides posadasii C735 delta SOWgp]
  misc_feature (8)..(583): NCBI GI: 121701619 Blast Desc: alternative NADH-dehydrogenase [Aspergillus clavatus NRRL 1] gi|119397217|gb|EAW07648.1| alternative NADH-dehydrogenase [Aspergillus clavatus NRRL 1]
  misc_feature (59)..(581): SWISSPROT Homolog: EC 1.6.5.3 NADH dehydrogenase (ubiquinone)
  misc_feature: Useful for introducing or modulating the production of volatile compounds
MTRFGAAAVTRLSAAEAVARVARQQHAATFATKSSANRPHLPSAILSRALTPASRQFARYSSDVAAPAPKKKPGRVRTTFKWMWRTTYLSLILAVGGVIYDGYTDRHPDDQFHPDPEKKTLVILGTGWGSVALLKKLDTANYNVVVISPRNYFLFTPLLPSCTTGNIEHRSIMEPVRQILRHKKAAVKFYEAEATKIDYENKVIKISDNSDIKGTINETEVPYDMLVVGVGAENATFGIPGVRENSCFLKEIRDAQAIRTKIMDCVETAAFKDQDPSEIDRLLHMVVVGGGPTGVEFAGELRDFFDEDIKKLIPDISPRFKVTLIEALPTVLPMFSKQLIDYTESTFKEEHIEIKTKTMVKKVTDKTVEAEVSNPDGTKSMLTIPYGLLVWATGNAVRPIVKDLMSQIPAQKDSRRGLAVNEYLVVQGARDIWAVGDCAVAGYAPTAQVASQEGNFLARLFNNMAKTEALEARVKELSSGLNLKPGNVAENTQEIENIEKQLRRVKDIKPFHYSHQGSLAYIGSERAVADVAWLNGNVASGGKLTYFFWRSAYLSMCFSTRNRVLVALDWVKAKVYGRDVSRE

SEQ ID NO: 23474 - DNA, 2339 bp, Muscodor strobelii
  misc_feature: SGI EST ID NO. CUFF.55229.0
  misc_feature: Variant of the nucleotide sequence at SEQ ID NO 23472
ggaaaagcacccgtaatccaattttctttgtggtgcacgccgtcattcctcttgctcatcagcattcctttcccttttcttcggtcgcccggtcgtccgactcccagagactctccccattgacctcgcgagagagcctcaatggcgtcgtcttcgagggctatgactcgcttcggcgcagcagcagtcactcgactgtctgccgccgaagctgtcgccagagttgctcgtcagcagcatgccgccaccttcgcgacgaaatcgtctgcgaacagacctcatctaccatccgctatcctctcccgcgccttaacgcccgcctcccgccaatttgcacgttatagttccgatgttgctgcccctgctcccaagaagaagcccggccgggtgaggactaccttcaaatggatgtggcgcaccacctacctgtctctaattctcgctgtcggcggtgttatctacgacggctacaccgatcgccatccggacgaccagtttcatcccgatcccgagaagaagactcttgttatccttggaaccggatggggctctgtagcacttctgaagaagctcgacactgccaactacaacgttgtagtaatctctcctcgcaactacttcctgttcactcctctgctgccttcatgtaccaccggaaacatcgagcaccgctccatcatggagcccgtccgccagatccttcgtcacaagaaagccgctgtcaagttctacgaggcagaagctaccaagatcgattacgagaacaaggtcatcaagatctccgacaacagcgatatcaagggcacaatcaacgagaccgaggttccctacgacatgctggtggttggtgtcggtgctgagaacgcgaccttcggcattcccggtgtgcgcgagaacagctgcttcctcaaggagatccgcgatgcccaggctatccgaaccaagatcatggactgtgtcgaaactgccgccttcaaggaccaggacccctcggaaatcgatcgtctgctccacatggtcgttgtcggcggcggtcccaccggtgtcgagttcgccggtgagcttcgcgacttcttcgatgaggatatcaagaaattgatccccgatatctcgccccgtttcaaagttaccctgatcgaagccctgcctactgttttgcccatgttctcgaagcagctcatcgactacaccgagagcactttcaaggaggagcacatcgagatcaagaccaagaccatggtcaagaaggtcactgacaagacggtcgaggccgaggtctcaaaccccgacggcaccaaatccatgctcaccattccctacggtcttctcgtctgggctaccggtaacgcagtccgccccattgtcaaggatctcatgtcgcagatcccggcccagaaggattcacgacgtggtctggctgtgaatgagtacctcgttgtccaaggcgcgcgcgacatctgggccgttggcgactgcgccgtagctggatacgcccctactgcccaggtcgcttcgcaggagggtaacttcttggcccgtctgttcaacaacatggctaagaccgaggccttggaagccagagtgaaggaactcagctctggcctgaacctcaagcctggcaatgtcgccgagaatactcaggagatcgagaacatcgaaaagcagcttcgccgggtcaaggatatcaagcctttccactactctcatcagggcagtttggcgtacattggtagtgagagggccgtcgctgatgtggcctggctcaatggtaatgttgcctccggcggcaagctgacctacttcttctggcgcagcgcctatctgagcatgtgcttcagtacgcgcaaccgtgtattggtggctcttgactgggtcaaggccaaggtctatggacgggacgtttccagagagtaaagatacttcagtcctccgttatacgaacggttgttcaataggaaaggtatataagtgccaatacccattacgggaaatggaatagagagcgtgtatagatcgacgacaggatcgcgtccaacaacagaaatacgggcacaatgtacacagcaaagaaaaatcgatagaaggacggacgttcaggcgcagttctaaagcggaataataggcgggctttggaaatgcttcatttgggattagttttttaatcttttgttttccctacgtttgtatgaccatcatcatcatcattagacatcgaaacatagaattccatcttgtacttggtataactacatcctgatcgttcctaccgtcatccgttctcagcccttctagctacgatagctctactgccctttctttatttgaaatgcgagtaattg

SEQ ID NO: 23475 - DNA, 4218 bp, Muscodor strobelii
  misc_feature: SGI cDNA ID NO. 567988
  misc_feature: Encodes the peptide sequence at SEQ ID NO 23476
atggcggaaattgttggtctgacaactgggcttattggcgcctgtgatgtcattatcaaggcttcaaaaggattgacggagtttatatcggatatcaaaaatgctccaagagaatggacgaaagtgaaaatcgagctggaaaatatcgaggcaatcatctgcgctgttcaggggtacttaacatcgtctaaagcaacacagcagcctctcctcggatcatctccgatagcacgagctattcagctgtgccagagctatactaccgaattgcacaagaatctcatcaacgggagtacaagagcctccgacagggcccgatgggcgtggaagtctaaaggccgatgccacgagatcttgcaggaacttggtcgttactcgaatatcttccacctcgcgctaagtctcgatgggtgggaattgttcttcagatcatcgactgagacgactgaggcattgatgggagttcgcgacgaccttcagagagtcgtggatatcattaagcctatggagggcatgaagaaacagctggaagagtgggaagaacatcttcgtgccatccatgacaccattgcgttctcgtctctgacctcgacttcatctgatttggacaaggatgacgatgcgatttgtttggaagaactgatgaacttcataacaaatgtgaagctggaatccaaacaccgcgatgtggcaaagatccgccatataaacacggggatgtgggcgatggactgtgaacagtttaaggattggttaacagacaagtcagcggcctgcctttggatgcatggtataccaggctgcggtaaaactgttatgttcagtgcgatcgtcgacttcctgaatgaaatccaaaacggaggtggctcagttatagtcgcagcttatttcacgtatcaggacctgaacctacacagcacagaggctatacttcaagctgtacttcgatccgctggagtggctgcctatggacgaacaggggtaaagaataaactattaaagctgcagaaggaatgtcaaagaccacagaggcgacaaccaagtacgcaggaatgcattcaaattctgaaagaattcgccgtaggtgggatgcctctcgttctatgctttgatgccatcgacgaactcccagataaatgtcaacaacagctcctgaatgttatcggcactttacttgtagtcccccggatcaaaacattgatcatgtcaagatctagcttagatcttggttgtataaagcactcggcaatgacggtctcggccagcgaagccgacttagaattgtatctttacgatgagacagagcaaatctttcgggacattgttgtagtaccgtcttcgctctctctagcaggactccgcaagtcgatcacctctacgatcattcaaaagtccaaaggcatgtttttactggccagtctccagatacagcacctgagatcagctgcttcagtccgggatgtacttgaactcctagatgaactgcctgaaggagtcgatgaacagtattctctatacttctctcgcctcaaatcgcaacggtggagcaagcttggccttctcgctatccagtgggtcagcagtgctgccagacctctgcaagttccagagctgcttgaggctctagctatccgggatggcgacaaagatattgatccgaccggcatgtatccggctgagagagttgttcaagccgctggtggcttactcgttctagacgttgacactaacattatacgcttggttcacgaatccctccaagactatcttgaccgtaaccgcgcacagatcctgggtgccgcccacctgttcatcctcggtacacttgtcgcctatctcaactttcatgcatttagtaatgcggaaggaaaagtgatatctggtagttggttagacatcgagctcttgaaaagtaagtataggatgtttagttacgcctgccaccactggcatcatcattatcagtcgtcgggagactcaggtcttccgctgggtatccaggtagcaaaaaggatatccgaatcctctgtactacttcgcgaaaccacatcgctcagactcggggccgcggccactggattaacgccacttcatgtagcagtcttatgggatgactcatctcttggtattgggattcaaaaccatctgaatcccgctcaactcaaaatacaacatcaaggagtgctgacaccgcttcatctcgcagccaggctcgacgatgtgcagtgtgctggattatggctccacaagaacggaggactcacgagcagagatcatcttgggagaacgccggtgcatactgccgcatcttatggctcgcggtctgtcttgatgttgttattggagaacgcatcagaatcgcatcaggtcgaagatataaaggacctagttgatgacaatttgatgaccccaatgcacacagctttagtgggcgggaacctagaatgcgttacgacacttctcgaatttggtgtagatgttaatgccaagactacttccggacaaacacctttgcaccttgctatacttcactgccctcaggctactcagaccttgaaagattacggagctaatatagaggccgtatccaagaatgggtggtctgctttacattacgcctgtactacgaaaatcgtagacgaagctttcaaaacgtggctgcaccggttggatccaaatcttcgagatttagagggtgcaacggccttgaatgtattgtgcaagtcggagtatatggatccggaggacttgaaatggttgatccggtcaggagccgaccctaatatagcagacacagatggcctgacgcctctgcaccaaaggctgcttcacagagattacgctggagcagaatgcttgttggactacggggcgagggctgactaccaaagcaacgacggcacattaccggttttcattggtgtgcgcgagagggactgccctcgcaaacttctgagcagactgttgaatataccaacgacagactctgaacttcgcgtagttgactcgctcctccatcgagcagtgcgacggcagaaggccgacgaggtctatggtctcctgattgctggggcccgcgtgtactctaagaacactaagggagagactgctcttcacatcgccattttgttggccgcttccaagtctcgacacactatattcggcttgcagaactctaacatcatcagtcttctgctgtacagtgatgcgctgcccaccttgaaatcaaacgaaggtttcacacctgttcatatcgcggtcctaagagactctgtatcgatacttcgccagcttcttgggtcaagaatacctcatatatggggatatggcagctggcagcttcctaatggtgcacatcttttgcgtctcgccgcattttgctcctcgcatgatgtatttaagcagctcctagaagcagcagaatatcctgcagcggagggcacactcgaaaacgtactgatcgatgtagtcgaagagcttattggaaaggagctcaccgagcgccaacagatgctcaacatagcatgtgaggctaggatccaactaggtatcacggaaactctaaagaatgagcctgtccagccagcgctgtttcgcgagggccctttgcagacatgtggcttgcaggattgccatgacggcatgtcttgcgctgatttcagtacgctgtgccagaaggcgatctcactcgccacctacaagtctagagctggatctattggcagtctgatcgctagtagtgtgcatcaatggactcctacgtggagaaagcttttgggcacaaacgatgagtctgagctagcgcacaactaccgcgagaggaccttcgaagcgcacatcgtagaagagacattcattacgaactgtcggcaagatgccacggatgtctggtacgcactccgctggcccgaaaaagtggacgccatcaatgatcccgaccagcagcttgctggaatatcggctccgaaaaattacgtctggaaggatgaagtgtcactcttgtctgtgacggaggcacacatcgctgctagggcggcgcgctcgctcgttccctttgccgccgtcgaccgcgccgttcttaacttccagggccggtcaattgccgggccaacacttaccagaaaggaacttcggtctcacgagaagacacgatcaaagttcatcggctctcgtcgaagaactacgaacgggttctataatgagctaaaccactactaa

SEQ ID NO: 23476 - protein, 1405 aa, Muscodor strobelii
  misc_feature: SGI Peptide ID NO. 567988
  misc_feature (800)..(832): Pfam Id: PF00023 Pfam Desc: Ankyrin repeat
  misc_feature (1033)..(1077): Pfam Id: PF00023 Pfam Desc: Ankyrin repeat
  misc_feature (1)..(1335): NCBI GI: 212538637 Blast Desc: ankyrin repeat-containing protein, [Penicillium marneffei ATCC 18224] gi|210069216|gb|EEA23307.1| ankyrin repeat-containing protein, [Penicillium marneffei ATCC 18224]
  misc_feature (200)..(1100): NCBI GI: 238508580 Blast Desc: Pfs, NACHT and Ankyrin domain protein [Aspergillus flavus NRRL3357] gi|220688371|gb|EED44724.1| Pfs, NACHT and Ankyrin domain protein [Aspergillus flavus NRRL3357]
  misc_feature (5)..(1099): NCBI GI: 115395840 Blast Desc: [Aspergillus terreus NIH2624] gi|114193128|gb|EAU34828.1| [Aspergillus terreus NIH2624]
  misc_feature (223)..(975): NCBI GI: 242804770 Blast Desc: tankyrase, [Talaromyces stipitatus ATCC 10500] gi|218717788|gb|EED17209.1| tankyrase, [Talaromyces stipitatus ATCC 10500]
  misc_feature (190)..(1099): NCBI GI: 145251379 Blast Desc: An15g06750 [Aspergillus niger] gi|134082735|emb|CAK42627.1| protein product [Aspergillus niger]
  misc_feature (7)..(938): NCBI GI: 238840718 Blast Desc: conserved [Microsporum canis CBS 113480]
  misc_feature (213)..(1106): NCBI GI: 169782465 Blast Desc: [Aspergillus oryzae RIB40] gi|83774438|dbj|BAE64562.1| protein product [Aspergillus oryzae]
  misc_feature (214)..(1099): NCBI GI: 212534788 Blast Desc: ankyrin repeat-containing protein, [Penicillium marneffei ATCC 18224] gi|210069949|gb|EEA24039.1| ankyrin repeat-containing protein, [Penicillium marneffei ATCC 18224]
  misc_feature (193)..(978): NCBI GI: 115390338 Blast Desc: conserved [Aspergillus terreus NIH2624] gi|114195070|gb|EAU36770.1| conserved [Aspergillus terreus NIH2624]
  misc_feature (212)..(1047): NCBI GI: 115402559 Blast Desc: conserved [Aspergillus terreus NIH2624] gi|114189202|gb|EAU30902.1| conserved [Aspergillus terreus NIH2624]
MAEIVGLTTGLIGACDVIIKASKGLTEFISDIKNAPREWTKVKIELENIEAIICAVQGYLTSSKATQQPLLGSSPIARAIQLCQSYTTELHKNLINGSTRASDRARWAWKSKGRCHEILQELGRYSNIFHLALSLDGWELFFRSSTETTEALMGVRDDLQRVVDIIKPMEGMKKQLEEWEEHLRAIHDTIAFSSLTSTSSDLDKDDDAICLEELMNFITNVKLESKHRDVAKIRHINTGMWAMDCEQFKDWLTDKSAACLWMHGIPGCGKTVMFSAIVDFLNEIQNGGGSVIVAAYFTYQDLNLHSTEAILQAVLRSAGVAAYGRTGVKNKLLKLQKECQRPQRRQPSTQECIQILKEFAVGGMPLVLCFDAIDELPDKCQQQLLNVIGTLLVVPRIKTLIMSRSSLDLGCIKHSAMTVSASEADLELYLYDETEQIFRDIVVVPSSLSLAGLRKSITSTIIQKSKGMFLLASLQIQHLRSAASVRDVLELLDELPEGVDEQYSLYFSRLKSQRWSKLGLLAIQWVSSAARPLQVPELLEALAIRDGDKDIDPTGMYPAERVVQAAGGLLVLDVDTNIIRLVHESLQDYLDRNRAQILGAAHLFILGTLVAYLNFHAFSNAEGKVISGSWLDIELLKSKYRMFSYACHHWHHHYQSSGDSGLPLGIQVAKRISESSVLLRETTSLRLGAAATGLTPLHVAVLWDDSSLGIGIQNHLNPAQLKIQHQGVLTPLHLAARLDDVQCAGLWLHKNGGLTSRDHLGRTPVHTAASYGSRSVLMLLLENASESHQVEDIKDLVDDNLMTPMHTALVGGNLECVTTLLEFGVDVNAKTTSGQTPLHLAILHCPQATQTLKDYGANIEAVSKNGWSALHYACTTKIVDEAFKTWLHRLDPNLRDLEGATALNVLCKSEYMDPEDLKWLIRSGADPNIADTDGLTPLHQRLLHRDYAGAECLLDYGARADYQSNDGTLPVFIGVRERDCPRKLLSRLLNIPTTDSELRVVDSLLHRAVRRQKADEVYGLLIAGARVYSKNTKGETALHIAILLAASKSRHTIFGLQNSNIISLLLYSDALPTLKSNEGFTPVHIAVLRDSVSILRQLLGSRIPHIWGYGSWQLPNGAHLLRLAAFCSSHDVFKQLLEAAEYPAAEGTLENVLIDVVEELIGKELTERQQMLNIACEARIQLGITETLKNEPVQPALFREGPLQTCGLQDCHDGMSCADFSTLCQKAISLATYKSRAGSIGSLIASSVHQWTPTWRKLLGTNDESELAHNYRERTFEAHIVEETFITNCRQDATDVWYALRWPEKVDAINDPDQQLAGISAPKNYVWKDEVSLLSVTEAHIAARAARSLVPFAAVDRAVLNFQGRSIAGPTLTRKELRSHEKTRSKFIGSRRRTTNGFYNELNHY

SEQ ID NO: 23477 - DNA, 1699 bp, Muscodor strobelii
  misc_feature: SGI EST ID NO. CUFF.55210.0
  misc_feature: Variant of the nucleotide sequence at SEQ ID NO 23475
ttttgacctcggtatatcaagtgaggggaaccgtgagatcaggtctataaggcgactgataaaatattcaccctgcagtggacaaggctatagatgttgtttgtagacactgtagtgttcgcatgattaatgtgcacctggattgaatgccggtcgatgtgctatgcaccagtttagatctaggcagtctggcatttggcgagaaattcatatcttgtctctctttcttttttctccaggcactccaaggggcaatgcaggcgtatgtacagcatgggtagcttcactctgcggttagacaggcattgggggctgtgaacggctcagccgtcatggaccagccaattgtatggaggcaagacagcctgacactcaccaatatgcaccgtaggcagactgctacgtacataggtaactccgcacttcagtctggtggttattagcgaagtcaaggctgacaccgggaaactgagaaaatcgtcctcccatttcccatatctattttgtgttgatcgccgaatgagagttgcttgctcttctgcgtcaagaactttcagccggtcagtcatagtatctacggccgtgaaatagacagcaacagaccagtgtattcttttcttatatggcggaaattgttggtctgacaactgggcttattggcgcctgtgatgtcattatcaaggcttcaaaaggattgacggagtttatatcggatatcaaaaatgctccaagagaatggacgaaagtgaaaatcgagctggaaaatatcgaggcaatcatctgcgctgttcaggggtacttaacatcgtctaaagcaacacagcagcctctcctcggatcatctccgatagcacgagctattcagctgtgccagagctatactaccgaattgcacaagaatctcatcaacgggagtacaagagcctccgacagggcccgatgggcgtggaagtctaaaggccgatgccacgagatcttgcaggaacttggtcgttactcgaatatcttccacctcgcgctaagtctcgatgggtgggaattgttcttcagatcatcgactgagacgactgaggcattgatgggagttcgcgacgaccttcagagagtcgtggatatcattaagcctatggagggcatgaagaaacagctggaagagtgggaagaacatcttcgtgccatccatgacaccattgcgttctcgtctctgacctcgacttcatctgatttggacaaggatgacgatgcgatttgtttggaagaactgatgaacttcataacaaatgtgaagctggaatccaaacaccgcgatgtggcaaagatccgccatataaacacggggatgtgggcgatggactgtgaacagtttaaggattggttaacagacaagtcagcggcctgcctttggatgcatggtataccaggctgcggtaaaactgttatgttcagtgcgatcgtcgacttcctgaatgaaatccaaaacggaggtggctcagttatagtcgcagcttatttcacgtatcaggacctgaacctacacagcacagaggctatacttcaagctgtacttcgatccgctggagtggctgcctatggacgaacaggggtaaagaataaactattaaagctgcagaaggaatgtcaaagaccacagaggcgacaaccaagtacgcaggaatgcattcaaattctgaaagaattc

SEQ ID NO: 23478 - DNA, 4062 bp, Muscodor strobelii
  misc_feature: SGI cDNA ID NO. 567989
  misc_feature: Reduced expression when VOC is produced
  misc_feature: Encodes the peptide sequence at SEQ ID NO 23479
atggcacctccgggcgctccctcctcgtccagaaacgacctcttactcgatctcgatgaccagccgccctacggcggacagcggcccgctctgaacgacgaccagctgatgcgctcttacgacagaacccacgacaccaccaccgacccgtcccgacagtccatctcctacgatgatttcgttggtggcggcgacagcacccagaagtcacatccaagcgtgaagaatcccacgcctggcgctgccacgggcgcgcctaggccgccttacgcagcagaccacgacggccagttcagccagagctcgttacacaattaccagcggtacgccgacgacttcgatgagttccccgacgacgaccaatcctactatcagcacggtggcgctcagatgatatccggcaatgaatccggacgcagagagaatgcgcggaatcgcaatagtgtattagggctgggcggtggctttctgggcaaagcaaagaatatgctgggcatgggtcaaggctactccgagatggatctgcctttaacagacgcaagacacgggcggacagactcggcagggacgacgacaaatcaagccaaagggagcagcaagaaattcgagctgaagaacttcaagtttggatttgggagtggcaagccagatccctccacgctgggacctcgcatcatccatctgaacaatccgccggccaacgcggccaacaaatatgtcgacaaccatgtttcgactgccaaatacaatctcgccaccttcttgcccaagttcttgatcgaacaattctcgaaattcgcaaacgttttcttcttatttacatcagccctgcaacagattcctaacctgtcgcctacgaatccatataccaccattggtcctcttgccgtcgtgttactcatttctgcgatcaaggagcaggtagaagaccacaggagaaaagtggcagatagggcgctcaacaactccaaagcgagggtgttgagaggatcgaactttgaggagacaaaatggatcgacgtggccgttggagatatcgtacgagtacagtctgaggaaccattccccgccgatttggtccttcttgccagttcagagcccgaaggcttgtgctatatcgagacggctaacctcgatggtgagaccaatctcaagattaagcaaggtattccagaaacagctgcgctagtcagcccgtctgagttgagtcgcttgagtggcagagtccgatctgaacaacctaacaacagtctttatacctatgaggcgacgttgacgatgcaagccggtggtggcgagaaagagctgccgttgaacccagaacaactcttactgcgcggagccatcctgaggaatactccttggatccacggtatcgttgtcttcaccggtcacgagacgaagctcatgcgcaatgcgacggccgccccgatcaagcgaaccaaagtcgagcgacaactcaacaaattggttcttgctcttattgccttgctccttattttgagtgttatttgcaccattggcgatttcgtatatcgagctgtggctcttgatactgtagcatacctgtacttggaccctccgggcagcgctggcgacatcgtgagagacatcttcaaagatctcgtcacgtactgggtactattctcggctcttgtgcccatctctctgttcgttacagttgagctggtcaaatactggcacggtattctaatcaatgacgatatggatatttactacgatcaaaccgataccccggcaaattgccgcacatcgagcttggtcgaagaactaggaatggtcggctacgtgttttcagacaagacgggaacattgacttgcaacatgatggagttcaaacagtgctccattggcggcattcaatacgcagaagatattcccgaagacaggagagctacagtcgaggatggcgttgaagttggtatccatgatttcaagcgacttgcagagaatctcaagacgcatcagacgtcggaattgattcataacttccttgctcttctcgcgacatgtcacaccgtcatcccagaacgacaagaagaaaaaggcggcgcgattaagtaccaggccgcatccccagacgaaggcgccctcgtcgagggcgccgcacagatgggctatacattcacggctcgcaaacccagaacggtcatgatcgaggtgggaggggaagaactcacatatgagcttctcggagtttgcgagttcaactctaccagaaaaagaatgtccacgatctaccgctgccctgatggcaaggttcgcttgtattgcaagggtgctgacactgtgattttggaacgccttaatgaggagaacccgcatgtcgaagcaacgctcttgcatctagaagaatatgccgccgaaggtctgcgaaccctctgtctagctatgcgcgagatcccagaacacgaataccaggagtggcgggccatattcgagaaggcgcagactaccgtcagtggtaatcgggcggaagaactagacaaagctgcggaaatcattgagaaagacctatacttgcttggcgccaccgccattgaggatcgacttcaggatggcgttccggagaccattcacacacttcatgaagctaacatcaaggtgtgggttttaaccggagatcgacaggaaacagctatcaatatcggtatgagctcgaaactgctcagcgaagacatgatgcttctgatcgtgaacgaagaaaactccgttgctacgcgtgacaacatccagaagaaactcgatgccatcagaaataacgccgatgggtcgatcgagctggagagcttagctcttgtcatcgatggtaaatctctcggctttgccctagagccagagatggagaaacttctttacgacctagctgttatgtgcaaggctgtcatctgttgtcgtgtctctcctctccagaaagctttggttgtcaagctggtcaagaagtactcggacgacatccttctcgctattggcgatggtgcgaatgacgtttccatgattcaagctgctcatatcggagtgggtatctcgggcgtggagggtcttcaagctgctcggtccgctgatattgccattgcacaattccgtttcctccgcaaattaactctagtccacggtgcctggagttatcatcgtatcagcaagacaatcctcttttccttctacaaaaacatcaccctttacatgacgcaattctggtacgcgttccaaaacgtattctctggtgagattatttacgaatcatggacgctatcgttttacaacgtcttcttcactgtgctaccgccattggtcctgggtattctcgaccagtttgtctctgctcgcctgctcgatcggtatcctcaactttatatctccgggcaaaagaatgaattctttaaactcgggacattttcagcctggatcctcaacgccttctaccattcacttgtcctatatatcttctccgagctcatctggtatggtgatcttatactggtcgatggcaagattgctggtcactgggtctggggcaccgccctctacggcactgttctcgcaactgttctaggcaaggcggctttggtaacgagcaactggaccaagtatcatatcattgctatacccggtagtatggcattttggtttgctttcatcgccatttacgcgcttgtggccccgaaactgaacatttcgaccgagtatcatgcacttgttcctgtgctcttcacaagcccagtgttctggctgcagctgattgcactaccacttctgtgtcttgttcgagatttcacttggaaatacattaagcggatgtactacccaagagcttatcatcatatacaagagatccagaagtacaacatccaagattaccgccccagaatggagcaattccaaaaggcaatcaggaaagtacgtcaagtacagcgtatgcggaagcagcgcggttacgccttctcgcaggcggacgagagtcagacgcgtgtcatcaatgcgtacgatacgacgagggaacgtggaagatatggagagatgccggcttcgagcacgcgctga

SEQ ID NO: 23479 - protein, 1353 aa, Muscodor strobelii
  misc_feature: SGI Peptide ID NO. 567989
  misc_feature (21)..(1350): NCBI GI: 46124731 Blast Desc: FG06743.1 [Gibberella zeae PH-1]
  misc_feature (3)..(1350): NCBI GI: 116207282 Blast Desc: CHGG_02934 [Chaetomium globosum CBS 148.51] gi|88183531|gb|EAQ90999.1| CHGG_02934 [Chaetomium globosum CBS 148.51]
  misc_feature (3)..(1350): NCBI GI: 85087076 Blast Desc: NCU00352 [Neurospora crassa OR74A] gi|28918918|gb|EAA28587.1| NCU00352 [Neurospora crassa OR74A]
  misc_feature (3)..(1353): NCBI GI: 145602111 Blast Desc: MGG_12922 [Magnaporthe grisea 70-15] gi|145010552|gb|EDJ95208.1| MGG_12922 [Magnaporthe grisea 70-15]
  misc_feature (21)..(1350): NCBI GI: 171685806 Blast Desc: protein product [Podospora anserina] gi|170942864|emb|CAP68517.1| protein product [Podospora anserina]
  misc_feature (19)..(1269): NCBI GI: 261360374 Blast Desc: phospholipid-transporting ATPase [Verticillium albo-atrum VaMs.102]
  misc_feature (20)..(1353): NCBI GI: 154303003 Blast Desc: BC1G_09245 [Botryotinia fuckeliana B05.10] gi|150855169|gb|EDN30361.1| BC1G_09245 [Botryotinia fuckeliana B05.10]
  misc_feature (3)..(1350): NCBI GI: 238493681 Blast Desc: phospholipid-transporting ATPase, [Aspergillus flavus NRRL3357] gi|220696571|gb|EED52913.1| phospholipid-transporting ATPase, [Aspergillus flavus NRRL3357]
  misc_feature (3)..(1350): NCBI GI: 169783854 Blast Desc: [Aspergillus oryzae RIB40] gi|83775133|dbj|BAE65256.1| protein product [Aspergillus oryzae]
  misc_feature (3)..(1350): NCBI GI: 119192862 Blast Desc: CIMG_00808 [Coccidioides immitis RS]
  misc_feature (223)..(1351): SWISSPROT Homolog: EC 3.6.3.1 Phospholipid-translocating ATPase
  misc_feature: Useful for introducing or modulating the production of volatile compounds
MAPPGAPSSSRNDLLLDLDDQPPYGGQRPALNDDQLMRSYDRTHDTTTDPSRQSISYDDFVGGGDSTQKSHPSVKNPTPGAATGAPRPPYAADHDGQFSQSSLHNYQRYADDFDEFPDDDQSYYQHGGAQMISGNESGRRENARNRNSVLGLGGGFLGKAKNMLGMGQGYSEMDLPLTDARHGRTDSAGTTTNQAKGSSKKFELKNFKFGFGSGKPDPSTLGPRIIHLNNPPANAANKYVDNHVSTAKYNLATFLPKFLIEQFSKFANVFFLFTSALQQIPNLSPTNPYTTIGPLAVVLLISAIKEQVEDHRRKVADRALNNSKARVLRGSNFEETKWIDVAVGDIVRVQSEEPFPADLVLLASSEPEGLCYIETANLDGETNLKIKQGIPETAALVSPSELSRLSGRVRSEQPNNSLYTYEATLTMQAGGGEKELPLNPEQLLLRGAILRNTPWIHGIVVFTGHETKLMRNATAAPIKRTKVERQLNKLVLALIALLLILSVICTIGDFVYRAVALDTVAYLYLDPPGSAGDIVRDIFKDLVTYWVLFSALVPISLFVTVELVKYWHGILINDDMDIYYDQTDTPANCRTSSLVEELGMVGYVFSDKTGTLTCNMMEFKQCSIGGIQYAEDIPEDRRATVEDGVEVGIHDFKRLAENLKTHQTSELIHNFLALLATCHTVIPERQEEKGGAIKYQAASPDEGALVEGAAQMGYTFTARKPRTVMIEVGGEELTYELLGVCEFNSTRKRMSTIYRCPDGKVRLYCKGADTVILERLNEENPHVEATLLHLEEYAAEGLRTLCLAMREIPEHEYQEWRAIFEKAQTTVSGNRAEELDKAAEIIEKDLYLLGATAIEDRLQDGVPETIHTLHEANIKVWVLTGDRQETAINIGMSSKLLSEDMMLLIVNEENSVATRDNIQKKLDAIRNNADGSIELESLALVIDGKSLGFALEPEMEKLLYDLAVMCKAVICCRVSPLQKALVVKLVKKYSDDILLAIGDGANDVSMIQAAHIGVGISGVEGLQAARSADIAIAQFRFLRKLTLVHGAWSYHRISKTILFSFYKNITLYMTQFWYAFQNVFSGEIIYESWTLSFYNVFFTVLPPLVLGILDQFVSARLLDRYPQLYISGQKNEFFKLGTFSAWILNAFYHSLVLYIFSELIWYGDLILVDGKIAGHWVWGTALYGTVLATVLGKAALVTSNWTKYHIIAIPGSMAFWFAFIAIYALVAPKLNISTEYHALVPVLFTSPVFWLQLIALPLLCLVRDFTWKYIKRMYYPRAYHHIQEIQKYNIQDYRPRMEQFQKAIRKVRQVQRMRKQRGYAFSQADESQTRVINAYDTTRERGRYGEMPASSTR

SEQ ID NO: 23480 - DNA, 4815 bp, Muscodor strobelii
  misc_feature: SGI EST ID NO. CUFF.55241.0
  misc_feature: Variant of the nucleotide sequence at SEQ ID NO 23478
ggggatgggtgatgcacgatccagttgagatgtttccaacagcccgtcactccgacagactgtctcttcgttattcttctttcctacaatcataacgactcaacccctgcccagttggaaattatcgattgacataggtgtaaaacgaagtcgggttgccatttggttagacatagccggccttactacgttgacttgtacttgacgtcgcatgggcccatccccaattaggctcattctctaacacctgcgaccctgtctttgcctgtacccagctcgtattcttgcagacctgagggtccccatccattttcgacgacaacatcgacatctcaacatctcgacatccaacccacacaatccactacctaataccgtgatccatcaactcttgcatcgactcgtcgcacctgaatagctccataccattatcatcctggagcatctccctcatgtcttccattctgctcccttgctaatccgcattcctccacgacatggcacctccgggcgctccctcctcgtccagaaacgacctcttactcgatctcgatgaccagccgccctacggcggacagcggcccgctctgaacgacgaccagctgatgcgctcttacgacagaacccacgacaccaccaccgacccgtcccgacagtccatctcctacgatgatttcgttggtggcggcgacagcacccagaagtcacatccaagcgtgaagaatcccacgcctggcgctgccacgggcgcgcctaggccgccttacgcagcagaccacgacggccagttcagccagagctcgttacacaattaccagcggtacgccgacgacttcgatgagttccccgacgacgaccaatcctactatcagcacggtggcgctcagatgatatccggcaatgaatccggacgcagagagaatgcgcggaatcgcaatagtgtattagggctgggcggtggctttctgggcaaagcaaagaatatgctgggcatgggtcaaggctactccgagatggatctgcctttaacagacgcaagacacgggcggacagactcggcagggacgacgacaaatcaagccaaagggagcagcaagaaattcgagctgaagaacttcaagtttggatttgggagtggcaagccagatccctccacgctgggacctcgcatcatccatctgaacaatccgccggccaacgcggccaacaaatatgtcgacaaccatgtttcgactgccaaatacaatctcgccaccttcttgcccaagttcttgatcgaacaattctcgaaattcgcaaacgttttcttcttatttacatcagccctgcaacagattcctaacctgtcgcctacgaatccatataccaccattggtcctcttgccgtcgtgttactcatttctgcgatcaaggagcaggtagaagaccacaggagaaaagtggcagatagggcgctcaacaactccaaagcgagggtgttgagaggatcgaactttgaggagacaaaatggatcgacgtggccgttggagatatcgtacgagtacagtctgaggaaccattccccgccgatttggtccttcttgccagttcagagcccgaaggcttgtgctatatcgagacggctaacctcgatggtgagaccaatctcaagattaagcaaggtattccagaaacagctgcgctagtcagcccgtctgagttgagtcgcttgagtggcagagtccgatctgaacaacctaacaacagtctttatacctatgaggcgacgttgacgatgcaagccggtggtggcgagaaagagctgccgttgaacccagaacaactcttactgcgcggagccatcctgaggaatactccttggatccacggtatcgttgtcttcaccggtcacgagacgaagctcatgcgcaatgcgacggccgccccgatcaagcgaaccaaagtcgagcgacaactcaacaaattggttcttgctcttattgccttgctccttattttgagtgttatttgcaccattggcgatttcgtatatcgagctgtggctcttgatactgtagcatacctgtacttggaccctccgggcagcgctggcgacatcgtgagagacatcttcaaagatctcgtcacgtactgggtactattctcggctcttgtgcccatctctctgttcgttacagttgagctggtcaaatactggcacggtattctaatcaatgacgatatggatatttactacgatcaaaccgataccccggcaaattgccgcacatcgagcttggtcgaagaactaggaatggtcggctacgtgttttcagacaagacgggaacattgacttgcaacatgatggagttcaaacagtgctccattggcggcattcaatacgcagaagatattcccgaagacaggagagctacagtcgaggatggcgttgaagttggtatccatgatttcaagcgacttgcagagaatctcaagacgcatcagacgtcggaattgattcataacttccttgctcttctcgcgacatgtcacaccgtcatcccagaacgacaagaagaaaaaggcggcgcgattaagtaccaggccgcatccccagacgaaggcgccctcgtcgagggcgccgcacagatgggctatacattcacggctcgcaaacccagaacggtcatgatcgaggtgggaggggaagaactcacatatgagcttctcggagtttgcgagttcaactctaccagaaaaagaatgtccacgatctaccgctgccctgatggcaaggttcgcttgtattgcaagggtgctgacactgtgattttggaacgccttaatgaggagaacccgcatgtcgaagcaacgctcttgcatctagaagaatatgccgccgaaggtctgcgaaccctctgtctagctatgcgcgagatcccagaacacgaataccaggagtggcgggccatattcgagaaggcgcagactaccgtcagtggtaatcgggcggaagaactagacaaagctgcggaaatcattgagaaagacctatacttgcttggcgccaccgccattgaggatcgacttcaggatggcgttccggagaccattcacacacttcatgaagctaacatcaaggtgtgggttttaaccggagatcgacaggaaacagctatcaatatcggtatgagctcgaaactgctcagcgaagacatgatgcttctgatcgtgaacgaagaaaactccgttgctacgcgtgacaacatccagaagaaactcgatgccatcagaaataacgccgatgggtcgatcgagctggagagcttagctcttgtcatcgatggtaaatctctcggctttgccctagagccagagatggagaaacttctttacgacctagctgttatgtgcaaggctgtcatctgttgtcgtgtctctcctctccagaaagctttggttgtcaagctggtcaagaagtactcggacgacatccttctcgctattggcgatggtgcgaatgacgtttccatgattcaagctgctcatatcggagtgggtatctcgggcgtggagggtcttcaagctgctcggtccgctgatattgccattgcacaattccgtttcctccgcaaattaactctagtccacggtgcctggagttatcatcgtatcagcaagacaatcctcttttccttctacaaaaacatcaccctttacatgacgcaattctggtacgcgttccaaaacgtattctctggtgagattatttacgaatcatggacgctatcgttttacaacgtcttcttcactgtgctaccgccattggtcctgggtattctcgaccagtttgtctctgctcgcctgctcgatcggtatcctcaactttatatctccgggcaaaagaatgaattctttaaactcgggacattttcagcctggatcctcaacgccttctaccattcacttgtcctatatatcttctccgagctcatctggtatggtgatcttatactggtcgatggcaagattgctggtcactgggtctggggcaccgccctctacggcactgttctcgcaactgttctaggcaaggcggctttggtaacgagcaactggaccaagtatcatatcattgctatacccggtagtatggcattttggtttgctttcatcgccatttacgcgcttgtggccccgaaactgaacatttcgaccgagtatcatgcacttgttcctgtgctcttcacaagcccagtgttctggctgcagctgattgcactaccacttctgtgtcttgttcgagatttcacttggaaatacattaagcggatgtactacccaagagcttatcatcatatacaagagatccagaagtacaacatccaagattaccgccccagaatggagcaattccaaaaggcaatcaggaaagtacgtcaagtacagcgtatgcggaagcagcgcggttacgccttctcgcaggcggacgagagtcagacgcgtgtcatcaatgcgtacgatacgacgagggaacgtggaagatatggagagatgccggcttcgagcacgcgctgagaggtaggggaattgtacaatgttttatgtattggagtcttgattgcatccgattgtatgaattaggcaggccgtggtgagcgacggcatagtctgggtgtttaaaaattcatgtttatgtttttttcttcgaggcatgcttgtttctcgatgcgcattaacgtctggcgtgagcaattcttgattctgtagggagcgtgtggtgaatatattatcttccagcatgatgaaatccctacgcgtagcaatccgaagg

SEQ ID NO: 23481 - DNA, 1050 bp, Muscodor strobelii
  misc_feature: SGI cDNA ID NO. 567990
  misc_feature: Reduced expression when VOC is produced
  misc_feature: Encodes the peptide sequence at SEQ ID NO 23482
atgccgttagatggtcctatcgatgatgccggaaaggtggacgccctggtccctaatgacccgcgggtcgaacacaaatactccacgataggagacatcacataccactacatgctggcaaagccccagggaaagccagttgctactatttttctcattcatggctggccagatctgggtatgggatggcgcaatcaagtgccttttctcgtatcgctaggcctgcaggtagtcgtacccgacatgttgggatatgggcggacatctgcgccagactctcacgaggagtatgctatgaagaagatgacggcacacatagcgcacatcatcagagaggtgaccagtgaacccataattctcggcggtcacgattggggtagcatggttgtctggagactcggacaatactatcccgacctcattcgctgtatcttctctatctgcgtgccgcatatgcccatgagccctgaaaagcaaacactagaggagctcgtggagaaactgcccaacttcaagtaccagcttcaactcgcgggaggcgaggcagagcaaatcgtcgccaaggacgagaagcgcctgcgcaatttcctcaatggcatgtttggcggaacaacaccagagggcggtgtcgtattcacgactgatagaggtgtggttgaggagaatattgactccattcgccccagcccaatggtgtctaaggatatcattgatttctacgtccaagaatactctcgacattctccagcactccacggcccctgcaattggtaccgaacgcggtggacaaacgcaaacgacgaagcggagctcgcaaaggaaccttttaaattccccatgccggccatgttaatcatggcggagaacgactcggctctaccgccgtggatggctaagggacaagagcagtactttgcggctggtttgaagctcgagttgcttaaggggagctcgcattgggctatggctcagaaacccgtcgaggttaatcagttcattgggcaattcgtgaagagtgttttgggggacgaggttaaggctgcgttgtaa

SEQ ID NO: 23482 - protein, 349 aa, Muscodor strobelii
  misc_feature: SGI Peptide ID NO. 567990
  misc_feature (75)..(335): Pfam Id: PF00561 Pfam Desc: alpha/beta hydrolase fold
  misc_feature (75)..(147): Pfam Id: PF00561 Pfam Desc: alpha/beta hydrolase fold
  misc_feature (14)..(341): NCBI GI: 85119261 Blast Desc: NCU02924 [Neurospora crassa OR74A] gi|28927417|gb|EAA36370.1| [Neurospora crassa OR74A]
  misc_feature (14)..(349): NCBI GI: 46124733 Blast Desc: FG06744.1 [Gibberella zeae PH-1]
  misc_feature (14)..(349): NCBI GI: 256732747 Blast Desc: NECHADRAFT_38604 [Nectria haematococca mpVI 77-13-4]
  misc_feature (12)..(343): NCBI GI: 256725244 Blast Desc: NECHADRAFT_98121 [Nectria haematococca mpVI 77-13-4]
  misc_feature (13)..(342): NCBI GI: 156033153 Blast Desc: SS1G_13652 [Sclerotinia sclerotiorum 1980] gi|154699055|gb|EDN98793.1| SS1G_13652 [Sclerotinia sclerotiorum 1980]
  misc_feature (19)..(333): NCBI GI: 169621151 Blast Desc: SNOG_13782 [Phaeosphaeria nodorum SN15] gi|160704189|gb|EAT78806.2| SNOG_13782 [Phaeosphaeria nodorum SN15]
  misc_feature (16)..(341): NCBI GI: 85087068 Blast Desc: NCU00350 [Neurospora crassa OR74A] gi|28918916|gb|EAA28585.1| [Neurospora crassa OR74A]
  misc_feature (20)..(349): NCBI GI: 189206748 Blast Desc: epoxide hydrolase [Pyrenophora tritici-repentis Pt-1C-BFP] gi|187975801|gb|EDU42427.1| epoxide hydrolase [Pyrenophora tritici-repentis Pt-1C-BFP]
  misc_feature (13)..(344): NCBI GI: 154315681 Blast Desc: epoxide hydrolase [Botryotinia fuckeliana B05.10] gi|150847353|gb|EDN22546.1| epoxide hydrolase [Botryotinia fuckeliana B05.10]
  misc_feature (10)..(341): NCBI GI: 240107012 Blast Desc: alpha/beta hydrolase fold family protein [Coccidioides posadasii C735 delta SOWgp]
  misc_feature (18)..(339): SWISSPROT Homolog: EC 3.3.2.10 Soluble epoxide hydrolase
  misc_feature: Useful for introducing or modulating the production of volatile compounds
MPLDGPIDDAGKVDALVPNDPRVEHKYSTIGDITYHYMLAKPQGKPVATIFLIHGWPDLGMGWRNQVPFLVSLGLQVVVPDMLGYGRTSAPDSHEEYAMKKMTAHIAHIIREVTSEPIILGGHDWGSMVVWRLGQYYPDLIRCIFSICVPHMPMSPEKQTLEELVEKLPNFKYQLQLAGGEAEQIVAKDEKRLRNFLNGMFGGTTPEGGVVFTTDRGVVEENIDSIRPSPMVSKDIIDFYVQEYSRHSPALHGPCNWYRTRWTNANDEAELAKEPFKFPMPAMLIMAENDSALPPWMAKGQEQYFAAGLKLELLKGSSHWAMAQKPVEVNQFIGQFVKSVLGDEVKAAL

SEQ ID NO: 23483 - DNA, 1382 bp, Muscodor strobelii
  misc_feature: SGI EST ID NO. CUFF.55624.2
  misc_feature: Variant of the nucleotide sequence at SEQ ID NO 23481
cgcatgcaagtcggcacatctatcgagcagaaagtcctgatataaatttaactaattctcccaccatcttgacatttcgctcattgagtattattcagtattccaagggcatctgacgtgcttcactatctattatattcacgatgccgttagatggtcctatcgatgatgccggaaaggtggacgccctggtccctaatgacccgcgggtcgaacacaaatactccacgataggagacatcacataccactacatgctggcaaagccccagggaaagccagttgctactatttttctcattcatggctggccagatctgggtatgggatggcgcaatcaagtgccttttctcgtatcgctaggcctgcaggtagtcgtacccgacatgttgggatatgggcggacatctgcgccagactctcacgaggagtatgctatgaagaagatgacggcacacatagcgcacatcatcagagaggtgaccagtgaacccataattctcggcggtcacgattggggtagcatggttgtctggagactcggacaatactatcccgacctcattcgctgtatcttctctatctgcgtgccgcatatgcccatgagccctgaaaagcaaacactagaggagctcgtggagaaactgcccaacttcaagtaccagcttcaactcgcgggaggcgaggcagagcaaatcgtcgccaaggacgagaagcgcctgcgcaatttcctcaatggcatgtttggcggaacaacaccagagggcggtgtcgtattcacgactgatagaggtgtggttgaggagaatattgactccattcgccccagcccaatggtgtctaaggatatcattgatttctacgtccaagaatactctcgacattctccagcactccacggcccctgcaattggtaccgaacgcggtggacaaacgcaaacgacgaagcggagctcgcaaaggaaccttttaaattccccatgccggccatgttaatcatggcggagaacgactcggctctaccgccgtggatggctaagggacaagagcagtactttgcggctggtttgaagctcgagttgcttaaggggagctcgcattgggctatggctcagaaacccgtcgaggttaatcagttcattgggcaattcgtgaagagtgttttgggggacgaggttaaggctgcgttgtaaatgtgtgcgctagtttacgagtataatgaaaaatgttgatgaatgaactaaatttgagggcaaatgtgtggccaatattgcgcgaacttcatgaaccactattgtatatgagaggagggtcgaaggcgcacgcatttcgaataaggactaaaacactatgaaacaatatgaattcgaggacgataatga

SEQ ID NO: 23484 - DNA, 903 bp, Muscodor strobelii
  misc_feature: SGI cDNA ID NO. 567991
  misc_feature: Reduced expression when VOC is produced
  misc_feature: Encodes the peptide sequence at SEQ ID NO 23485
atgtccactaatgttggctccccgccgagccgcgatgatgccaacccaaacaaggccgatgataaactcgacccccgggccgattctggttccatcgagaaccagcagaaacgcaaggcctcgtcacccggtcttgcccacgaccatgcgtcacctccttctccgaagcggtccaggacccaggatcaagcgcacgaccctcccagccgagtctcgcgcatcgacaggcgcgagcaagcacgtcaggaggagaagaagcgcgggaagcggctgtttggcggtttgatgaataccctgagccaagctggcgctcgtccaggtgcccagtctagaaggcgtccagacgttgaacgtcgacagcaggcacaccaagctcaacaggcaaagaccacccagcaacgcgccgaagaagaacgcttacgcagcaagaagcttgccaaactagaagccgtgcgcaaggttgagcagcttactttccaagagcaagcgatgaaaaccaaccatgccgatctgctctccaaggctggttatctaagaacccaaacgagaccaacaatatattacctgccctgggaactcgcccgatcgcagcgagatcggctcgaagaccagaagcgagatgccgaggatatcatcgataaagaactctaccagtttgcggagcggaaaaagcaacgcctgctcgatctaggaatgggcccagatgccgctccagcagaagaagaaaaggagccagtgggtgagcccagagatgaaaaccctcctgacaaacctccacaacctgtacctactaatccttccccttccccttccccatctactaataaggccggtctcgcgaaggacgccgatagagcggaagacgtcatgatcgaggaggacgaggacactgtaatttactag

SEQ ID NO: 23485 - protein, 300 aa, Muscodor strobelii
  misc_feature: SGI Peptide ID NO. 567991
  misc_feature (80)..(209): Pfam Id: PF04696 Pfam Desc: pinin/SDK/memA/ protein conserved region
  misc_feature (34)..(300): NCBI GI: 145602127 Blast Desc: MGG_05174 [Magnaporthe grisea 70-15] gi|145010563|gb|EDJ95219.1| MGG_05174 [Magnaporthe grisea 70-15]
  misc_feature (80)..(300): NCBI GI: 261360368 Blast Desc: [Verticillium albo-atrum VaMs.102]
  misc_feature (69)..(300): NCBI GI: 154315683 Blast Desc: BC1G_04414 [Botryotinia fuckeliana B05.10] gi|150847354|gb|EDN22547.1| BC1G_04414 [Botryotinia fuckeliana B05.10]
  misc_feature (40)..(231): NCBI GI: 46124735 Blast Desc: FG06745.1 [Gibberella zeae PH-1]
  misc_feature (67)..(300): NCBI GI: 121716986 Blast Desc: pinin/SDK/memA domain protein [Aspergillus clavatus NRRL 1] gi|119404128|gb|EAW14545.1| pinin/SDK/memA domain protein [Aspergillus clavatus NRRL 1]
  misc_feature (83)..(300): NCBI GI: 116207276 Blast Desc: CHGG_02931 [Chaetomium globosum CBS 148.51] gi|88183528|gb|EAQ90996.1| CHGG_02931 [Chaetomium globosum CBS 148.51]
  misc_feature (76)..(300): NCBI GI: 240107011 Blast Desc: pinin/SDK/memA/ protein conserved region containing protein [Coccidioides posadasii C735 delta SOWgp]
  misc_feature (8)..(300): NCBI GI: 159130081 Blast Desc: nuclear protein SDK3, [Aspergillus fumigatus A1163]
  misc_feature (48)..(300): NCBI GI: 71002694 Blast Desc: nuclear protein SDK3 [Aspergillus fumigatus Af293] gi|66853666|gb|EAL93990.1| nuclear protein SDK3, [Aspergillus fumigatus Af293]
  misc_feature (73)..(300): NCBI GI: 119482263 Blast Desc: pinin/SDK/memA domain protein [Neosartorya fischeri NRRL 181] gi|119409314|gb|EAW19263.1| pinin/SDK/memA domain protein [Neosartorya fischeri NRRL 181]
  misc_feature: Useful for introducing or modulating the production of volatile compounds
MSTNVGSPPSRDDANPNKADDKLDPRADSGSIENQQKRKASSPGLAHDHASPPSPKRSRTQDQAHDPPSRVSRIDRREQARQEEKKRGKRLFGGLMNTLSQAGARPGAQSRRRPDVERRQQAHQAQQAKTTQQRAEEERLRSKKLAKLEAVRKVEQLTFQEQAMKTNHADLLSKAGYLRTQTRPTIYYLPWELARSQRDRLEDQKRDAEDIIDKELYQFAERKKQRLLDLGMGPDAAPAEEEKEPVGEPRDENPPDKPPQPVPTNPSPSPSPSTNKAGLAKDADRAEDVMIEEDEDTVIY

SEQ ID NO: 23486 - DNA, 1463 bp, Muscodor strobelii
  misc_feature: SGI EST ID NO. CUFF.55238.1
  misc_feature: Variant of the nucleotide sequence at SEQ ID NO 23484
ttgcgacagctcttgggaccatcagacacccgacaagttgcatcgtcatccaccaccttcacatctgtcttccagcctcccttttcgccgatcacgtcaatcgcgcagagcttcaatgctctgttaacaagtagtcagacacgagtaaaggcgtcgcctgtttcctgtatatcgcgtgggatgtgctgttgatgatggactgaatttccgacctgacttatcttccccagtgggaatctggtcgcattgtcttcacgcattctgattaaccattctgtctatgttgttatgcagcattagtctacctcgcagctcaattcttgttcagcctactactatttcatcgacgctatctatccatcacaatgtccactaatgttggctccccgccgagccgcgatgatgccaacccaaacaaggccgatgataaactcgacccccgggccgattctggttccatcgagaaccagcagaaacgcaaggcctcgtcacccggtcttgcccacgaccatgcgtcacctccttctccgaagcggtccaggacccaggatcaagcgcacgaccctcccagccgagtctcgcgcatcgacaggcgcgagcaagcacgtcaggaggagaagaagcgcgggaagcggctgtttggcggtttgatgaataccctgagccaagctggcgctcgtccaggtgcccagtctagaaggcgtccagacgttgaacgtcgacagcaggcacaccaagctcaacaggcaaagaccacccagcaacgcgccgaagaagaacgcttacgcagcaagaagcttgccaaactagaagccgtgcgcaaggttgagcagcttactttccaagagcaagcgatgaaaaccaaccatgccgatctgctctccaaggctggttatctaagaacccaaacgagaccaacaatatattacctgccctgggaactcgcccgatcgcagcgagatcggctcgaagaccagaagcgagatgccgaggatatcatcgataaagaactctaccagtttgcggagcggaaaaagcaacgcctgctcgatctaggaatgggcccagatgccgctccagcagaagaagaaaaggagccagtgggtgagcccagagatgaaaaccctcctgacaaacctccacaacctgtacctactaatccttccccttccccttccccatctactaataaggccggtctcgcgaaggacgccgatagagcggaagacgtcatgatcgaggaggacgaggacactgtaatttactagtagcatttggtagttcaaccggtttcgacatggcgttggaggcgatctcagccgggccaactgagactttgatggcagtagttcggcattttggaacgaaatggcggacatgagtagataccccaaccgcgagcacctagttttgcatcctggagtgtgatataattgtcttaaacttgagtcacgaattcttcc

SEQ ID NO: 23487 - DNA, 330 bp, Muscodor strobelii
  misc_feature: SGI cDNA ID NO. 567992
  misc_feature: Encodes the peptide sequence at SEQ ID NO 23488
atgtcgcgccatcatcccgatctagtaatgtgccgcaagcaatccggcatagcgatcggccgtctctgcgacaaatgcgacggcaagtgtcccgtctgcgactcctacgtccgccccacgaccctcgtccgcatctgcgacgagtgcagcttcggcaactaccaaaacaagtgcgtcgtctgcggcggtgagggcatatccgatgccttctactgcttcgagtgcacgcggctcgagaaagaccgcgatggatgccccaagattattaacctcggtagttcgaggacggacttgttctatcaaaagaaaacaaatcggacgggcttctag

SEQ ID NO: 23488 - protein, 109 aa, Muscodor strobelii
  misc_feature: SGI Peptide ID NO. 567992
  misc_feature (1)..(106): Pfam Id: PF03660 Pfam Desc: PHF5-like protein
  misc_feature (1)..(109): NCBI GI: 116207274 Blast Desc: conserved [Chaetomium globosum CBS 148.51] gi|88183527|gb|EAQ90995.1| conserved [Chaetomium globosum CBS 148.51]
  misc_feature (1)..(107): NCBI GI: 164429022 Blast Desc: pre-mRNA splicing factor ini1 [Neurospora crassa OR74A] gi|157072376|gb|EAA28583.2| pre-mRNA splicing factor ini1 [Neurospora crassa OR74A]
  misc_feature (1)..(108): NCBI GI: 39940134 Blast Desc: conserved [Magnaporthe grisea 70-15] gi|145010564|gb|EDJ95220.1| conserved [Magnaporthe grisea 70-15]
  misc_feature (1)..(107): NCBI GI: 256733199 Blast Desc: [Nectria haematococca mpVI 77-13-4]
  misc_feature (1)..(108): NCBI GI: 154276174 Blast Desc: pre-mRNA splicing factor ini1 [Ajellomyces capsulatus NAm1] gi|261200477|ref|XP_002626639.1| pre-mRNA splicing factor ini1 [Ajellomyces dermatitidis SLH14081] pre-mRNA splicing factor
  misc_feature (1)..(108): NCBI GI: 261360367 Blast Desc: pre-mRNA-splicing factor ini1 [Verticillium albo-atrum VaMs.102]
  misc_feature (1)..(107): NCBI GI: 156033149 Blast Desc: conserved [Sclerotinia sclerotiorum 1980] gi|154699053|gb|EDN98791.1| conserved [Sclerotinia sclerotiorum 1980]
  misc_feature (1)..(107): NCBI GI: 258566900 Blast Desc: pre-mRNA splicing factor ini1 [Uncinocarpus reesii 1704] gi|237905640|gb|EEP80041.1| pre-mRNA splicing factor ini1 [Uncinocarpus reesii 1704]
  misc_feature (1)..(107): NCBI GI: 189206744 Blast Desc: pre-mRNA splicing factor ini1 [Pyrenophora tritici-repentis Pt-1C-BFP] gi|187975799|gb|EDU42425.1| pre-mRNA splicing factor ini1 [Pyrenophora tritici-repentis Pt-1C-BFP]
  misc_feature (1)..(107): NCBI GI: 121716990 Blast Desc: Pre-mRNA splicing factor ini1, [Aspergillus clavatus NRRL 1] gi|255956377|ref|XP_002568941.1| Pc21g19500 [Penicillium chrysogenum Wisconsin 54-1255] gi|119404129|gb|EAW14546.1| factor
MSRHHPDLVMCRKQSGIAIGRLCDKCDGKCPVCDSYVRPTTLVRICDECSFGNYQNKCVVCGGEGISDAFYCFECTRLEKDRDGCPKIINLGSSRTDLFYQKKTNRTGF

SEQ ID NO: 23489 - DNA, 2845 bp, Muscodor strobelii
  misc_feature: SGI EST ID NO. CUFF.55359.0
  misc_feature: Variant of the nucleotide sequence at SEQ ID NO 23487
ggttgcggtactgcctagagaaccgaggagcctctccaacgtctagtggcaaggctgaggaatcaaaaacaccgtccgtggtccatatcgaaatccaatttcgaatttcgaccacactatcttcgttgctgctccttcacttctttcccgaccagcagcccgcaaacgagacgactactcgagacagagatttacgcccatctgtagtcctcgccaaacaccaaaaagcgagctcttgacccagagcttcataatctcaacgaccgcatccccctcatcctcccaccacaaccgcagccatgtcgcgccatcatcccgatctagtaatgtgccgcaagcaatccggcatagcgatcggccgtctctgcgacaaatgcgacggcaagtgtcccgtctgcgactcctacgtccgccccacgaccctcgtccgcatctgcgacgagtgcagcttcggcaactaccaaaacaagtgcgtcgtctgcggcggtgagggcatatccgatgccttctactgcttcgagtgcacgcggctcgagaaagaccgcgatggatgccccaagattattaacctcggtagttcgaggacggacttgttctatcaaaagaaaacaaatcggacgggcttctagcccttgctttgcccgggactgggctgttgatgacgcggagaggggtgtggcaggtctgcgggtgggagttaacagatcaaggggccatgttgctatggtcgtgtaatatttcgctgcattcaagccggcgttctgtgcatttcggagaggatgattatcattcttggtgtttagaattataggggaaataaaaactatggggttttcgaagcccaagacacaaaacgccataccatgctacattcagtcattcataatatacaggatgctattaaaatgcgcagctctgtaatgctgtttcgtcgtccgcgttcagccactagatatagctgaccttgactcccattccagccgtctgcttgattttgttcatcgtagacgccataatccgctgtaggcgttcccggagatccctccggctgaacaacaccacgatactgacaataaaggccattagcctcatcagtagcattgggttcgtcctgagcgatgagctcagctgctcgatgacattacgcagattcttgatgatcactgcagcccgcgctccgaagcccggagctgccaccgccttcttcgcctttggagtcgagggaggtgactgggctgttttggccaaggccgagccattcctcgtcggctgcgtcttgcttggggacgagggctgtggcgatgcgtcgatgccgtagtccacttcactcccatttcgtttggctcgctcctcctctaggcggcgcctttccctggcctcgttctcggcccttagcctcctggcttcttcgatgtcttttctcaactgctcctcttgcctcttctcttcttcccgttccctccgctcggcctcatgctgctcgtcctgaaggctttgtagagcctgtaggaatgcctctcgcctctcatcgtcgagcactgagctgacgctaataaattccctcgcatagtcccactcgttgttgcgtagcaacacgtgaagcgtatagagttccaagatcttgaccctagcattgagatctcttggcgtggctgctccgctggccggccctatggactctgaccgtcgagatcttgacgagtgacggtgcgagcgggctgcttctagttgccttgagatatctagatttggtgtgtttgaagcagcaagatagttttccagtcgcttttggtttaaaacctgagaccgggcatgggatagcaagagcgtggctctgaagcagaacattagcagtgaaactccatccgaactgcagcataagtagagttcgggagtgccggtagcaggaaagcacatgggcatgattcccagagacaaggatagactcacaaattaataaccacatcggaatccacgtcgccttcaacgccgtggtagccgaattgcactacctcttcccacacgtcaccgttccgcaccttgttacataggccgcgccattcttgcgcaccgaaagtctccttcccttgatctacatctagctccagaatagcattcagaatagtcagatacagagaccagaccttaatcctggtggagcgagaagctcgaatgacgggagcgggctctgtcgctccgtttgcgtcggcggattcggttgcgggcgtgatgagaggcaggacggtcgacaaggcctcgggcaagcgacgcgtgaggaacaactgcgacgcctgccgatacgtctttgaaatctgcgagggcgctacgcggccactcgtagaggacgccagggacgagatggagccggagaggtgcgatccgaaggtgtctggtgaggtcgggctcaaggttgccgagaaggagccgttgaacgccatcgggtctagaagaggcagagacggaggaggaggaggagggatgagggatgaggtgcgtgacgggctcggctcacaatgacatcaagctcagaccagattgagcaagtcaatgggtgaagcacggagtgtagaggaaatgggaaaggcagaggtcgaagacagcggtcaattgacggacatgcaggaacacgttgaattgcattggcgtcggtgtttccatagagacatgtggaaccttaaaatggtcgacctggcggtatgcagcgagagccgaaagctttagctaccgctactgctatttgcgaccgagtccactagcacatgcgtggatgcgatgcgagtttgtcagatgaggtagctcccgaacgcgaacgctgccctggaaaagacgaactggaagctttttt

SEQ ID NO: 23490 - DNA, 348 bp, Muscodor strobelii
  misc_feature: SGI cDNA ID NO. 567993
  misc_feature: Encodes the peptide sequence at SEQ ID NO 23491
atgtcgcgccatcatcccgatctagtaatgtgccgcaagcaatccggcatagcgatcggccgtctctgcgacaaatgcgacggcaagtgtcccgtctgcgactcctacgtccgccccacgaccctcgtccgcatctgcgacgagtgcagcttcggcaactaccaaaacaagtgcgtcgtctgcggcggtgagggcatatccgatgccttctactgcttcgagtgcacgcggctcgagaaagaccgcgatggatgccccaagattattaacctcggtagttcgaggacggacgtacatgtgcctttgcagttgttctatcaaaagaaaacaaatcggacgggcttctag

SEQ ID NO: 23491 - protein, 115 aa, Muscodor strobelii
  misc_feature: SGI Peptide ID NO. 567993
  misc_feature (1)..(111): Pfam Id: PF03660 Pfam Desc: PHF5-like protein
  misc_feature (1)..(99): Pfam Id: PF03660 Pfam Desc: PHF5-like protein
  misc_feature (1)..(115): NCBI GI: 116207274 Blast Desc: conserved [Chaetomium globosum CBS 148.51] gi|88183527|gb|EAQ90995.1| conserved [Chaetomium globosum CBS 148.51]
  misc_feature (1)..(113): NCBI GI: 164429022 Blast Desc: pre-mRNA splicing factor ini1 [Neurospora crassa OR74A] gi|157072376|gb|EAA28583.2| pre-mRNA splicing factor ini1 [Neurospora crassa OR74A]
  misc_feature (1)..(114): NCBI GI: 39940134 Blast Desc: conserved [Magnaporthe grisea 70-15] gi|145010564|gb|EDJ95220.1| conserved [Magnaporthe grisea 70-15]
  misc_feature (1)..(113): NCBI GI: 256733199 Blast Desc: [Nectria haematococca mpVI 77-13-4]
  misc_feature (1)..(114): NCBI GI: 154276174 Blast Desc: pre-mRNA splicing factor ini1 [Ajellomyces capsulatus NAm1] gi|261200477|ref|XP_002626639.1| pre-mRNA splicing factor ini1 [Ajellomyces dermatitidis SLH14081] pre-mRNA splicing factor
  misc_feature (1)..(113): NCBI GI: 156033149 Blast Desc: conserved [Sclerotinia sclerotiorum 1980] gi|154699053|gb|EDN98791.1| conserved [Sclerotinia sclerotiorum 1980]
  misc_feature (1)..(114): NCBI GI: 261360367 Blast Desc: pre-mRNA-splicing factor ini1 [Verticillium albo-atrum VaMs.102]
  misc_feature (1)..(113): NCBI GI: 258566900 Blast Desc: pre-mRNA splicing factor ini1 [Uncinocarpus reesii 1704] gi|237905640|gb|EEP80041.1| pre-mRNA splicing factor ini1 [Uncinocarpus reesii 1704]
  misc_feature (1)..(113): NCBI GI: 189206744 Blast Desc: pre-mRNA splicing factor ini1 [Pyrenophora tritici-repentis Pt-1C-BFP] gi|187975799|gb|EDU42425.1| pre-mRNA splicing factor ini1 [Pyrenophora tritici-repentis Pt-1C-BFP]
  misc_feature (1)..(113): NCBI GI: 121716990 Blast Desc: Pre-mRNA splicing factor ini1, [Aspergillus clavatus NRRL 1] gi|255956377|ref|XP_002568941.1| Pc21g19500 [Penicillium chrysogenum Wisconsin 54-1255] gi|119404129|gb|EAW14546.1| factor
MSRHHPDLVMCRKQSGIAIGRLCDKCDGKCPVCDSYVRPTTLVRICDECSFGNYQNKCVVCGGEGISDAFYCFECTRLEKDRDGCPKIINLGSSRTDVHVPLQLFYQKKTNRTGF

SEQ ID NO: 23492 - DNA, 2845 bp, Muscodor strobelii; identical to SEQ ID NO: 23489
  misc_feature: SGI EST ID NO. CUFF.55359.0
  misc_feature: Variant of the nucleotide sequence at SEQ ID NO 23490

SEQ ID NO: 23493 - DNA, 1374 bp, Muscodor strobelii
  misc_feature: SGI cDNA ID NO. 567994
  misc_feature: Reduced expression when VOC is produced
  misc_feature: Encodes the peptide sequence at SEQ ID NO 23494
atggcgttcaacggctccttctcggcaaccttgagcccgacctcaccagacaccttcggatcgcacctctccggctccatctcgtccctggcgtcctctacgagtggccgcgtagcgccctcgcagatttcaaagacgtatcggcaggcgtcgcagttgttcctcacgcgtcgcttgcccgaggccttgtcgaccgtcctgcctctcatcacgcccgcaaccgaatccgccgacgcaaacggagcgacagagcccgctcccgtcattcgagcttctcgctccaccaggattaaggtctggtctctgtatctgactattctgaatgctattctggagctagatgtagatcaagggaaggagactttcggtgcgcaagaatggcgcggcctatgtaacaaggtgcggaacggtgacgtgtgggaagaggtagtgcaattcggctaccacggcgttgaaggcgacgtggattccgatgtggttattaatttagccacgctcttgctatcccatgcccggtctcaggttttaaaccaaaagcgactggaaaactatcttgctgcttcaaacacaccaaatctagatatctcaaggcaactagaagcagcccgctcgcaccgtcactcgtcaagatctcgacggtcagagtccatagggccggccagcggagcagccacgccaagagatctcaatgctagggtcaagatcttggaactctatacgcttcacgtgttgctacgcaacaacgagtgggactatgcgagggaatttattagcgtcagctcagtgctcgacgatgagaggcgagaggcattcctacaggctctacaaagccttcaggacgagcagcatgaggccgagcggagggaacgggaagaagagaagaggcaagaggagcagttgagaaaagacatcgaagaagccaggaggctaagggccgagaacgaggccagggaaaggcgccgcctagaggaggagcgagccaaacgaaatgggagtgaagtggactacggcatcgacgcatcgccacagccctcgtccccaagcaagacgcagccgacgaggaatggctcggccttggccaaaacagcccagtcacctccctcgactccaaaggcgaagaaggcggtggcagctccgggcttcggagcgcgggctgcagtgatcatcaagaatctgcgtaatgtcatcgagcagctgagctcatcgctcaggacgaacccaatgctactgatgaggctaatggcctttattgtcagtatcgtggtgttgttcagccggagggatctccgggaacgcctacagcggattatggcgtctacgatgaacaaaatcaagcagacggctggaatgggagtcaaggtcagctatatctag

SEQ ID NO: 23494 - protein, 457 aa, Muscodor strobelii
  misc_feature: SGI Peptide ID NO. 567994
  misc_feature (1)..(457): NCBI GI: 261360366 Blast Desc: peroxin 26 [Verticillium albo-atrum VaMs.102]
  misc_feature (40)..(457): NCBI GI: 256732746 Blast Desc: NECHADRAFT_68548 [Nectria haematococca mpVI 77-13-4]
  misc_feature (1)..(453): NCBI GI: 46124739 Blast Desc: FG06747.1 [Gibberella zeae PH-1]
  misc_feature (41)..(457): NCBI GI: 85087056 Blast Desc: NCU00347 [Neurospora crassa OR74A] gi|28918913|gb|EAA28582.1| [Neurospora crassa OR74A]
  misc_feature (1)..(457): NCBI GI: 145602131 Blast Desc: MGG_05171 [Magnaporthe grisea 70-15] gi|145010566|gb|EDJ95222.1| MGG_05171 [Magnaporthe grisea 70-15]
  misc_feature (33)..(330): NCBI GI: 116207272 Blast Desc: CHGG_02929 [Chaetomium globosum CBS 148.51] gi|88183526|gb|EAQ90994.1| CHGG_02929 [Chaetomium globosum CBS 148.51]
  misc_feature (1)..(457): NCBI GI: 154290931 Blast Desc: BC1G_15529 [Botryotinia fuckeliana B05.10] gi|150847165|gb|EDN22358.1| BC1G_15529 [Botryotinia fuckeliana B05.10]
  misc_feature (45)..(453): NCBI GI: 156033195 Blast Desc: SS1G_13673 [Sclerotinia sclerotiorum 1980] gi|154699076|gb|EDN98814.1| SS1G_13673 [Sclerotinia sclerotiorum 1980]
  misc_feature (41)..(457): NCBI GI: 189207408 Blast Desc: conserved [Pyrenophora tritici-repentis Pt-1C-BFP] gi|187976131|gb|EDU42757.1| conserved [Pyrenophora tritici-repentis Pt-1C-BFP]
  misc_feature (40)..(457): NCBI GI: 71002702 Blast Desc: conserved [Aspergillus fumigatus Af293] gi|66853670|gb|EAL93994.1| conserved [Aspergillus fumigatus Af293] gi|159130085|gb|EDP55199.1| conserved [Aspergillus A1163]
  misc_feature: Useful for introducing or modulating the production of volatile compounds
MAFNGSFSATLSPTSPDTFGSHLSGSISSLASSTSGRVAPSQISKTYRQASQLFLTRRLPEALSTVLPLITPATESADANGATEPAPVIRASRSTRIKVWSLYLTILNAILELDVDQGKETFGAQEWRGLCNKVRNGDVWEEVVQFGYHGVEGDVDSDVVINLATLLLSHARSQVLNQKRLENYLAASNTPNLDISRQLEAARSHRHSSRSRRSESIGPASGAATPRDLNARVKILELYTLHVLLRNNEWDYAREFISVSSVLDDERREAFLQALQSLQDEQHEAERREREEEKRQEEQLRKDIEEARRLRAENEARERRRLEEERAKRNGSEVDYGIDASPQPSSPSKTQPTRNGSALAKTAQSPPSTPKAKKAVAAPGFGARAAVIIKNLRNVIEQLSSSLRTNPMLLMRLMAFIVSIVVLFSRRDLRERLQRIMASTMNKIKQTAGMGVKVSYI

SEQ ID NO: 23495 - DNA, 2859 bp, Muscodor strobelii
  misc_feature: SGI EST ID NO. CUFF.55360.1
  misc_feature: Variant of the nucleotide sequence at SEQ ID NO 23493
aaaaaagcttccagttcgtcttttccagggcagcgttcgcgttcgggagctacctcatctgacaaactcgcatcgcatccacgcatgtgctagtggactcggtcgcaaatagcagtagcggtagctaaagctttcggctctcgctgcataccgccaggtcgaccattttaaggttccacatgtctctatggaaacaccgacgccaatgcaattcaacgtgttcctgcatgtccgtcaattgaccgctgtcttcgacctctgcctttcccatttcctctacactccgtgcttcacccattgacttgctcaatctggtctgagcttgatgtcattgtgagccgagcccgtcacgcacctcatccctcatccctcctcctcctcctccgtctctgcctcttctagacccgatggcgttcaacggctccttctcggcaaccttgagcccgacctcaccagacaccttcggatcgcacctctccggctccatctcgtccctggcgtcctctacgagtggccgcgtagcgccctcgcagatttcaaagacgtatcggcaggcgtcgcagttgttcctcacgcgtcgcttgcccgaggccttgtcgaccgtcctgcctctcatcacgcccgcaaccgaatccgccgacgcaaacggagcgacagagcccgctcccgtcattcgagcttctcgctccaccaggattaaggtctggtctctgtatctgactattctgaatgctattctggagctagatgtagatcaagggaaggagactttcggtgcgcaagaatggcgcggcctatgtaacaaggtgcggaacggtgacgtgtgggaagaggtagtgcaattcggctaccacggcgttgaaggcgacgtggattccgatgtggttattaatttagccacgctcttgctatcccatgcccggtctcaggttttaaaccaaaagcgactggaaaactatcttgctgcttcaaacacaccaaatctagatatctcaaggcaactagaagcagcccgctcgcaccgtcactcgtcaagatctcgacggtcagagtccatagggccggccagcggagcagccacgccaagagatctcaatgctagggtcaagatcttggaactctatacgcttcacgtgttgctacgcaacaacgagtgggactatgcgagggaatttattagcgtcagctcagtgctcgacgatgagaggcgagaggcattcctacaggctctacaaagccttcaggacgagcagcatgaggccgagcggagggaacgggaagaagagaagaggcaagaggagcagttgagaaaagacatcgaagaagccaggaggctaagggccgagaacgaggccagggaaaggcgccgcctagaggaggagcgagccaaacgaaatgggagtgaagtggactacggcatcgacgcatcgccacagccctcgtccccaagcaagacgcagccgacgaggaatggctcggccttggccaaaacagcccagtcacctccctcgactccaaaggcgaagaaggcggtggcagctccgggcttcggagcgcgggctgcagtgatcatcaagaatctgcgtaatgtcatcgagcagctgagctcatcgctcaggacgaacccaatgctactgatgaggctaatggcctttattgtcagtatcgtggtgttgttcagccggagggatctccgggaacgcctacagcggattatggcgtctacgatgaacaaaatcaagcagacggctggaatgggagtcaaggtcagctatatctagtggctgaacgcggacgacgaaacagcattacagagctgcgcattttaatagcatcctgtatattatgaatgactgaatgtagcatggtatggcgttttgtgtcttgggcttcgaaaaccccatagtttttatttcccctataattctaaacaccaagaatgataatcatcctctccgaaatgcacagaacgccggcttgaatgcagcgaaatattacacgaccatagcaacatggccccttgatctgttaactcccacccgcagacctgccacacccctctccgcgtcatcaacagcccagtcccgggcaaagcaagggctagaagcccgtccgatttgttttcttttgatagaacaactgcaaaggcacatctgttagtatccgattctctataaaataagacacgcaatcggggtagagcgagacgtacgtccgtcctcgaactaccgaggttaataatcttggggcatccatcgcggtctttctcgagccgcgtgcactcgaagcagtagaaggcatcggatatgccctcaccgccgcagacgacgcacttgttttggtagttgccgaagctgcactcgtcgcagatgcggacgagggtcgtggggcggacgtaggagtcgcagacgggacacttgccgtcgcatttgtcgcagagacggccgatcgctatgccggattgcttgcggcacattactagatcgctgggtggacgggttagtacgttgttggagagtgtgtgtggaggaggggaggcttacggatgatggcgcgacatggctgcggttgtggtgggaggatgagggggatgcggtcgttgagattatgaagctctgggtcaagagctcgctttttggtgtttggcgaggactacagatgggcgtaaatctctgtctcgagtagtcgtctcgtttgcgggctgctggtcgggaaagaagtgaaggagcagcaacgaagatagtgtggtcgaaattcgaaattggatttcgatatggaccacggacggtgtttttgattcctcagccttgccactagacgttggagaggctcctcggttctctaggcagtaccgcaacc

SEQ ID NO: 23496 - DNA, 489 bp, Muscodor strobelii
  misc_feature: SGI cDNA ID NO. 567995
  misc_feature: Encodes the peptide sequence at SEQ ID NO 23497
atgaatctcgacgagcccatcgtcccgccgtttcctatgtctgactatggcacggggagcttgggtacgattgcagcattgacagggattcataagcgcgccacggagggtggctcttggatctgtcgaaccagtctttcgcagtatgacatcttccttctttctcttggtacgtaccccgtggagattcagaatgagttacggcgcaagcacgacagccagttcttcgcacttcggcacagcgactcggttgatgaggttagtagatgcgcacttcgtagcatccggaggctacatcctagactcttcaccgatgatgtgatgcaaagcgcatatagcgtaggatttggtggtactgtaagatggcctaaggaagcgattgcgatcgagggcctgagaattggccacgtacgtgcagcgaggcccaatggcttcgactccccatcatgggaaggttgggagatagacgagacgttgttggatggatag

SEQ ID NO: 23497 - protein, 162 aa, Muscodor strobelii
  misc_feature: SGI Peptide ID NO. 567995
  misc_feature (1)..(160): NCBI GI: 261360213 Blast Desc: CAIB/BAIF family enzyme [Verticillium albo-atrum VaMs.102]
  misc_feature (1)..(162): NCBI GI: 156052138 Blast Desc: SS1G_07477 [Sclerotinia sclerotiorum 1980] gi|154705254|gb|EDO04993.1| SS1G_07477 [Sclerotinia sclerotiorum 1980]
  misc_feature (1)..(162): NCBI GI: 154312888 Blast Desc: BC1G_05145 [Botryotinia fuckeliana B05.10] gi|150849847|gb|EDN25040.1| BC1G_05145 [Botryotinia fuckeliana B05.10]
  misc_feature (1)..(160): NCBI GI: 169617163 Blast Desc: SNOG_11758 [Phaeosphaeria nodorum SN15] gi|160703351|gb|EAT80802.2| SNOG_11758 [Phaeosphaeria nodorum SN15]
  misc_feature (1)..(160): NCBI GI: 189188142 Blast Desc: alpha-methylacyl-CoA racemase [Pyrenophora tritici-repentis Pt-1C-BFP] gi|187972016|gb|EDU39515.1| alpha-methylacyl-CoA racemase [Pyrenophora tritici-repentis
  misc_feature (1)..(162): NCBI GI: 116192089 Blast Desc: CHGG_05762 [Chaetomium globosum CBS 148.51] gi|88181675|gb|EAQ89143.1| CHGG_05762 [Chaetomium globosum CBS 148.51]
  misc_feature (4)..(157): NCBI GI: 171686744 Blast Desc: protein product [Podospora anserina] gi|170943333|emb|CAP68986.1| protein product [Podospora anserina]
  misc_feature (4)..(162): NCBI GI: 85078399 Blast Desc: NCU00052 [Neurospora crassa OR74A] gi|28917213|gb|EAA26927.1| [Neurospora crassa OR74A]
  misc_feature (1)..(157): NCBI GI: 212527980 Blast Desc: CAIB/BAIF family enzyme [Penicillium marneffei ATCC 18224] gi|210073545|gb|EEA27632.1| CAIB/BAIF family enzyme [Penicillium marneffei ATCC 18224]
  misc_feature (1)..(151): NCBI GI: 119193845 Blast Desc: CIMG_01297 [Coccidioides immitis RS]
MNLDEPIVPPFPMSDYGTGSLGTIAALTGIHKRATEGGSWICRTSLSQYDIFLLSLGTYPVEIQNELRRKHDSQFFALRHSDSVDEVSRCALRSIRRLHPRLFTDDVMQSAYSVGFGGTVRWPKEAIAIEGLRIGHVRAARPNGFDSPSWEGWEIDETLLDG

SEQ ID NO: 23498 - DNA, 1888 bp, Muscodor strobelii
  misc_feature: SGI EST ID NO. CUFF.55259.0
  misc_feature: Variant of the nucleotide sequence at SEQ ID NO 23496
ccaagttcctagtgggtgacaaagtgacatacgcggatctcatgttcatgccttattttaagtccattggcggagaaagattaaaatagaccttgaacgagtaacctgctttctgctatccgcatatatcacgactctcgatggtattgacaagtgtaatcctaagattcgattacggctacctggttagttgagcctctagtcgcccttggtcttggctactgaacatcagtgtagataccgacatatataatgcgcaatcgattctctaccgacgattatctgccggtctctataagtcacgtgatccgggagaatactatcatattcatggatcactggaagccagtacgacccttgccatgataggactgcctccttttcagcctgggctgacagactatcggcaatgtgtggaaacaatagaaggggcagtgaagaaattttccaatgatgaactggagacaaagaatcagcgttaccaacaggcgggtattgctgtttttacggaagacgaattcaagaagaccagtcatggccaagcaatgacatcatatcctccctttaccgttcggcctctcgagtcaattacaccaccaattcagttggtaaaggccgccaaagatagctcagcacttcagtgtcttcagggaattcgtgtcatcgagttatgtcgcattatcgccggtccaacgattggtagatcactggcagcgtatggggcgtctgtgttgaaagtcacatcgcctcagctcccggacgttccattcttccagcttgacgttaatgctggaaaacatacgacatctctccatctaaaggatccgacggatagggctacgtttgaagctttactcgaaaccgccgacgtgatcattgatggttatcgaccgaatgcaatcgcaggcttgggatattcacctgaaactctggccgcgcgagccgctgagcgtggccgcggtatagtttacatcacagaagactgctttggaggtgctggcgtacctggagccgaatgggctggccgccctggatggcagcaaatcgcagactgtgtgacgggcgtagcctgggagcaggggcgctttatgaatctcgacgagcccatcgtcccgccgtttcctatgtctgactatggcacggggagcttgggtacgattgcagcattgacagggattcataagcgcgccacggagggtggctcttggatctgtcgaaccagtctttcgcagtatgacatcttccttctttctcttggtacgtaccccgtggagattcagaatgagttacggcgcaagcacgacagccagttcttcgcacttcggcacagcgactcggttgatgaggttagtagatgcgcacttcgtagcatccggaggctacatcctagactcttcaccgatgatgtgatgcaaagcgcatatagcgtaggatttggtggtactgtaagatggcctaaggaagcgattgcgatcgagggcctgagaattggccacgtacgtgcagcgaggcccaatggcttcgactccccatcatgggaaggttgggagatagacgagacgttgttggatggatagttcaaacacttcgtcactggttgctcttgccgaatctcatccgtacgggaattgaggtcatctgacgtccgcagctagttgtttcttggggttccacgacatagtgagcacgtcctgtgtggcacatacctaagtatggtttttgggttgtgctgctacagactcggcagatcttgcgggccagcttgtgtgcgtccgcaccttggaacacgatggtgccgctgaccttcgtttcggcatccagcatatgtttagtaacacgcatcttctagagcaatggacacatctatgcgtgttttagccacacttgt

SEQ ID NO: 23499 - DNA, 1215 bp, Muscodor strobelii
  misc_feature: SGI cDNA ID NO. 567996
  misc_feature: Encodes the peptide sequence at SEQ ID NO 23500
atgataggactgcctccttttcagcctgggctgacagactatcggcaatgtgtggaaacaatagaaggggcagtgaagaaattttccaatgatgaactggagacaaagaatcagcgttaccaacaggcgggtattgctgtttttacggaagacgaattcaagaagaccagtcatggccaagcaatgacatcatatcctccctttaccgttcggcctctcgagtcaattacaccaccaattcagttggtaaaggccgccaaagatagctcagcacttcagtgtcttcagggaattcgtgtcatcgagttatgtcgcattatcgccggtccaacgattggtagatcactggcagcgtatggggcgtctgtgttgaaagtcacatcgcctcagctcccggacgttccattcttccagcttgacgttaatgctggaaaacatacgacatctctccatctaaaggatccgacggatagggctacgtttgaagctttactcgaaaccgccgacgtgatcattgatggttatcgaccgaatgcaatcgcaggcttgggatattcacctgaaactctggccgcgcgagccgctgagcgtggccgcggtatagtttacatcacagaagactgctttggaggtgctggcgtacctggagccgaatgggctggccgccctggatggcagcaaatcgcagactgtgtgacgggcgtagcctgggagcaggggcgctttatgaatctcgacgagcccatcgtcccgccgtttcctatgtctgactatggcacggggagcttgggtacgattgcagcattgacagggattcataagcgcgccacggagggtggctcttggatctgtcgaaccagtctttcgcagtatgacatcttccttctttctcttggtacgtaccccgtggagattcagaatgagttacggcgcaagcacgacagccagttcttcgcacttcggcacagcgactcggttgatgaggttagtagatgcgcacttcgtagcatccggaggctacatcctagactcttcaccgatgatgtgatgcaaagcgcatatagcgtaggatttggtggtactgtaagatggcctaaggaagcgattgcgatcgagggcctgagaattggccacgtacgtgcagcgaggcccaatggcttcgactccccatcatgggaaggttgggagatagacgagacgttgttggatggatag

SEQ ID NO: 23500 - protein, 404 aa, Muscodor strobelii
  misc_feature: SGI Peptide ID NO. 567996
  misc_feature (148)..(191): Pfam Id: PF02515 Pfam Desc: CoA-transferase family III
  misc_feature (1)..(396): NCBI GI: 261360213 Blast Desc: CAIB/BAIF family enzyme [Verticillium albo-atrum VaMs.102]
  misc_feature (1)..(404): NCBI GI: 154312888 Blast Desc: BC1G_05145 [Botryotinia fuckeliana B05.10] gi|150849847|gb|EDN25040.1| BC1G_05145 [Botryotinia fuckeliana B05.10]
  misc_feature (1)..(404): NCBI GI: 156052138 Blast Desc: SS1G_07477 [Sclerotinia sclerotiorum 1980] gi|154705254|gb|EDO04993.1| SS1G_07477 [Sclerotinia sclerotiorum 1980]
  misc_feature (1)..(399): NCBI GI: 171686744 Blast Desc: protein product [Podospora anserina] gi|170943333|emb|CAP68986.1| protein product [Podospora anserina]
  misc_feature (1)..(404): NCBI GI: 85078399 Blast Desc: NCU00052 [Neurospora crassa OR74A] gi|28917213|gb|EAA26927.1| [Neurospora crassa OR74A]
  misc_feature (1)..(402): NCBI GI: 169617163 Blast Desc: SNOG_11758 [Phaeosphaeria nodorum SN15] gi|160703351|gb|EAT80802.2| SNOG_11758 [Phaeosphaeria nodorum SN15]
  misc_feature (1)..(402): NCBI GI: 189188142 Blast Desc: alpha-methylacyl-CoA racemase [Pyrenophora tritici-repentis Pt-1C-BFP] gi|187972016|gb|EDU39515.1| alpha-methylacyl-CoA racemase [Pyrenophora tritici-repentis
  misc_feature (1)..(404): NCBI GI: 116192089 Blast Desc: CHGG_05762 [Chaetomium globosum CBS 148.51] gi|88181675|gb|EAQ89143.1| CHGG_05762 [Chaetomium globosum CBS 148.51]
  misc_feature (1)..(399): NCBI GI: 212527980 Blast Desc: CAIB/BAIF family enzyme [Penicillium marneffei ATCC 18224] gi|210073545|gb|EEA27632.1| CAIB/BAIF family enzyme [Penicillium marneffei ATCC 18224]
  misc_feature (1)..(392): NCBI GI: 199430850 Blast Desc: DEHA2C14894p [Debaryomyces hansenii]
MIGLPPFQPGLTDYRQCVETIEGAVKKFSNDELETKNQRYQQAGIAVFTEDEFKKTSHGQAMTSYPPFTVRPLESITPPIQLVKAAKDSSALQCLQGIRVIELCRIIAGPTIGRSLAAYGASVLKVTSPQLPDVPFFQLDVNAGKHTTSLHLKDPTDRATFEALLETADVIIDGYRPNAIAGLGYSPETLAARAAERGRGIVYITEDCFGGAGVPGAEWAGRPGWQQIADCVTGVAWEQGRFMNLDEPIVPPFPMSDYGTGSLGTIAALTGIHKRATEGGSWICRTSLSQYDIFLLSLGTYPVEIQNELRRKHDSQFFALRHSDSVDEVSRCALRSIRRLHPRLFTDDVMQSAYSVGFGGTVRWPKEAIAIEGLRIGHVRAARPNGFDSPSWEGWEIDETLLDG

SEQ ID NO: 23501 - DNA, 1888 bp, Muscodor strobelii; identical to SEQ ID NO: 23498
  misc_feature: SGI EST ID NO. CUFF.55259.0
  misc_feature: Variant of the nucleotide sequence at SEQ ID NO 23499

SEQ ID NO: 23502 - DNA, 1098 bp, Muscodor strobelii
  misc_feature: SGI cDNA ID NO. 567997
  misc_feature: Encodes the peptide sequence at SEQ ID NO 23503
atgcctgtggacactcaggaagcgccttgtaacggaacgcacccctgtaatacatgtgtcaagagacaacttgaatgtcactatactccggccgggttggaccattctggctcaccagagggtatcggctcacctactaagcggcggcatgtcgacagctcgcccaatgtcatcaagcttgaagacactgcccagactacgggaagacgaggttcgacattgacgccgtggaaccacgtgcccggaccaagagagatggcattggaaagagcggccgttatagagccaattcagcagaagcaagtcgaaatgaccggtcaacttctcggcactgctgaacgagattttgacagccggtccagactaagtaatgcaagtgctgctgttgatgaggcagatgcatttcccccagaacgaatgctacaggactcgaccggaagactcctttacgttggcgattctgctagcctgacatatttgcagtggatacggatgatcgtcgagagtatatccggtccttccgactttacgaaagatcctcgtagacacatgatcatggaaaataggatctcgctaccttcagagctgagaccaacgggtgtgttacccgatcaacggacagctgcgatcttaatcgactcgttctttacaaatacggcaggttttgtcgaagtctttgaccagagaaacttcatgaaagttgtagaagaaacctacagagatccgctcactgccaatccgtctcttctatgcctaatgtttctggtattcgccgttggtctggtgatggctgcccctttccccggaagtgacgaagcggcagtcattgacagacttcgttctgacagtactagtcgtgcagaagtgtttttccggaatgccaagagtctcgctgaccccgtctccggtttcgaagacgctgatttctggtctgtacaagccctgctcctgatgtctttgtacatgctggcagtgtcaaagcggaacgcatcttatgcatattatggtatgctcaaaattccaagcctaaatgaatttcatcttctgagctatcaccatttcataatccacctcctatcgtggttggatgagctctaa

SEQ ID NO: 23503 - protein, 365 aa, Muscodor strobelii
  misc_feature: SGI Peptide ID NO. 567997
  misc_feature (10)..(337): NCBI GI: 171686746 Blast Desc: protein product [Podospora anserina] gi|170943334|emb|CAP68987.1| protein product [Podospora anserina]
  misc_feature (10)..(337): NCBI GI: 212527984 Blast Desc: conserved [Penicillium marneffei ATCC 18224] gi|210073547|gb|EEA27634.1| conserved [Penicillium marneffei ATCC 18224]
  misc_feature (6)..(337): NCBI GI: 119193847 Blast Desc: CIMG_01298 [Coccidioides immitis RS]
  misc_feature (6)..(337): NCBI GI: 240105550 Blast Desc: Fungal specific transcription factor, [Coccidioides posadasii C735 delta SOWgp]
  misc_feature (10)..(337): NCBI GI: 242785244 Blast Desc: conserved [Talaromyces stipitatus ATCC 10500] gi|218720702|gb|EED20121.1| conserved [Talaromyces stipitatus ATCC 10500]
  misc_feature (130)..(337): NCBI GI: 169617165 Blast Desc: SNOG_11759 [Phaeosphaeria nodorum SN15] gi|160703352|gb|EAT80803.2| SNOG_11759 [Phaeosphaeria nodorum SN15]
  misc_feature (123)..(337): NCBI GI: 116192093 Blast Desc: CHGG_05764 [Chaetomium globosum CBS 148.51] gi|88181677|gb|EAQ89145.1| CHGG_05764 [Chaetomium globosum CBS 148.51]
  misc_feature (15)..(226): NCBI GI: 261360212 Blast Desc: fungal specific transcription factor domain-containing protein [Verticillium albo-atrum VaMs.102]
  misc_feature (204)..(337): NCBI GI: 164428788 Blast Desc: NCU00054 [Neurospora crassa OR74A] gi|157072281|gb|EAA26569.2| [Neurospora crassa OR74A]
  misc_feature (140)..(334): NCBI GI: 256732797 Blast Desc: NECHADRAFT_79358 [Nectria haematococca mpVI 77-13-4]
MPVDTQEAPCNGTHPCNTCVKRQLECHYTPAGLDHSGSPEGIGSPTKRRHVDSSPNVIKLEDTAQTTGRRGSTLTPWNHVPGPREMALERAAVIEPIQQKQVEMTGQLLGTAERDFDSRSRLSNASAAVDEADAFPPERMLQDSTGRLLYVGDSASLTYLQWIRMIVESISGPSDFTKDPRRHMIMENRISLPSELRPTGVLPDQRTAAILIDSFFTNTAGFVEVFDQRNFMKVVEETYRDPLTANPSLLCLMFLVFAVGLVMAAPFPGSDEAAVIDRLRSDSTSRAEVFFRNAKSLADPVSGFEDADFWSVQALLLMSLYMLAVSKRNASYAYYGMLKIPSLNEFHLLSYHHFIIHLLSWLDEL

SEQ ID NO: 23504 - DNA, 3393 bp, Muscodor strobelii
  misc_feature: SGI EST ID NO. CUFF.55312.0
  misc_feature: Variant of the nucleotide sequence at SEQ ID NO 23502
ctgcgacccaatcatgacagttcgccggttcccaatgcgcatctctctggctcatcaattcctctgcaatagcaatcatgaaggggaactcaaacacggtcgagaccggggtctgcctgcttcgtccgccacccctcgaactgttcccgaagctttgcccttgcatactctcgccgccttgtctgctctgattcttgcctacctcccacttccgatactttcggctgcttccagcacccttctattcttctcatagaacttgtcgggtactatagttgtcagatcactagtgccgtgcggcgattagttgctcctctctagtccttggtcaaatatactctaccgccatcttatgaccagacgcactgctgttgctgccacttacaccttaaggccccgctatcgaagccgcatgcaggccgataactgtactgggccgggaacacaatcttacttctcacgagatccatcttcatcgacgtctttcaatttttgccctccgtctagtcccgataaggctgaaagctcattcttgctccgcatccgagaccgagggaccctcagtcagccgtcatcccggcgccgcctccgaacacctactgccctcgacactgtcccacttgagtctcgtcatcccccggctcctcaacggatggcggatgtgacctgactttccaaccgtgatgacacgacctaaggttgacccagataaaaggcagcgcaccgctcaagcctgtgactcgtgtaaacgtaggaaacaaaagtgtaacggaacgcacccctgtaatacatgtgtcaagagacaacttgaatgtcactatactccggccgggttggaccattctggctcaccagagggtatcggctcacctactaagcggcggcatgtcgacagctcgcccaatgtcatcaagcttgaagacactgcccagactacgggaagacgaggttcgacattgacgccgtggaaccacgtgcccggaccaagagagatggcattggaaagagcggccgttatagagccaattcagcagaagcaagtcgaaatgaccggtcaacttctcggcactgctgaacgagattttgacagccggtccagactaagtaatgcaagtgctgctgttgatgaggcagatgcatttcccccagaacgaatgctacaggactcgaccggaagactcctttacgttggcgattctgctagcctgacatatttgcagtggatacggatgatcgtcgagagtatatccggtccttccgactttacgaaagatcctcgtagacacatgatcatggaaaataggatctcgctaccttcagagctgagaccaacgggtgtgttacccgatcaacggacagctgcgatcttaatcgactcgttctttacaaatacggcaggttttgtcgaagtctttgaccagagaaacttcatgaaagttgtagaagaaacctacagagatccgctcactgccaatccgtctcttctatgcctaatgtttctggtattcgccgttggtctggtgatggctgcccctttccccggaagtgacgaagcggcagtcattgacagacttcgttctgacagtactagtcgtgcagaagtgtttttccggaatgccaagagtctcgctgaccccgtctccggtttcgaagacgctgatttctggtctgtacaagccctgctcctgatgtctttgtacatgctggcagtgtcaaagcggaacgcatcttatgcatattatggtatggctgtacggtctgcattcgcgctcggactgcatcgtgacgaaagtatggtcatatttactgaggagaatcgtgacgagcgcaagaaactctggaagactttatttgtactcgatcgcttcttggcagcgtgcctaggacgacctaccgcaatatcagaggaagattgctccgagatacggtccccgcggcctgcatcgagctcactattaagcacttccacctactcaatacatctcgcagctctagatgctgctgtcaaaagctgtcgaatcatcggtagaactctcaaagggatttactccaaaagaaagatcgctacggcagtcgctcaagacatagcgaatcacctagaagcctggggcaaagaactccctttttctctacattggagacggctccagaacaatccactcgatccagcgcaaggcatcgcaatcttacatactaatctcctccattgccattcagttatgctattgacccggccattctttctctacctgctgaacaaagctcgaatgagcaccagcggaagcataaaaaaatcgagtgtcaatccacgtattgaaaacttcgcccaaacatgcctcgaagcctcacagcatacgttggtgctcactcgaatcgccttagatgggaagtacttaccgcaatgcaatccctttgtaatacattgcgtctttgcagctgcattgatagtgctaagcaacgagtttgcttcgctgtataacaatcctgacgcacgtagctcgatcggcagtgcaactctgatccttaggttctgcgcgcatacagatgcccaagccgatagggtctcttacatagtcgagagcttcgataaagcgaacgagagccggggagcaaatgccagaaggcttcactttcctgggcgcaaaactccgaccctacacacgctctcacaaaatattcatcttgatccaatttgccagttcttcaattcagggcggagcgaccatcctctcgtgtcgagtttccatgatgatcaagctttggcctcactgtcgctacctcctatagcgtcgattcctgcattgatgtctaccaccgcgcaacaaccaagcccagaaggcagttcgtcgatgagtagtggaatgggaacaacaaccagcttaggacaaacaatgggcgagtccgaatttgatctcaataacatgtggagcgagtggcagcaacctgcgccttctacttcaatgcacccttccgcatcatttgtagcctacagcaccgggcagcttactggtcccagtgtcatgtaccatacctcagattttcggtgactggattcactcgaacgagatttattgggtgaccacaatttacgaagtataggcttcgcttttactatttacgtcttatagcgtggatttcagctcggccttccagatgggcaggtagtcggggacactggcgtttagatcctcaagacattgtgcctcacctgcgatgattttcggctgcagtttggatatatagtaccatgtacaggctattcctcagtctctatgcttgcttgttgcataagtcatatcgccgttccccagcgaacacggcgacacaacatgggttatttgtcttcgtcaaattttttaaaggtataaacacttaaatctaaagctatccctg

SEQ ID NO: 23505 - DNA, 696 bp, Muscodor strobelii
  misc_feature: SGI cDNA ID NO. 567998
  misc_feature: Encodes the peptide sequence at SEQ ID NO 23506
atgtcggaaatgcagactctcatcgtctactcgatgggcccatcgcccaatccttggaagatagcaatcatcttggaggagcttggtctgccgtggaagtttgaatcacttcagatgactgacttgaaaaagaagccatacacagatcttaatccaaatggtcgcgtaccaaccttagtcgatccaaacaccgatatggtcatctgggagtctggcgcaattgtcgattatctaattgaacaatacgacaaagacgccaagctacattacacggatatgaagcaaaaatcggcaacccgcagctggcagtacttccaagtcagtggacagggcccttacctcggacaactcggctggttttcgaaccaccatagcgaaaagattccttccgccattgagagatactacaacgagacgaagcgcatccttggtgtcatcgatagtcatctcgagaagaacggaaccaagttcctagtgggtgacaaagtgacatacgcggatctcatgttcatgccttattttaagtccatgtatgttggcgagggtgcattgatggcgaaagatctcgacaccaaacagtgggttcattatactggctggatgaaacgcctgcacgagcgacctgctactgccaaggtcgcaaaagactacgacgatctttggaccgccattttctctgcaccaggagcgcattaa

SEQ ID NO: 23506 - protein, 231 aa, Muscodor strobelii
  misc_feature: SGI Peptide ID NO. 567998
  misc_feature (112)..(208): Pfam Id: PF00043 Pfam Desc: Glutathione S-transferase, C-terminal domain
  misc_feature (5)..(80): Pfam Id: PF02798 Pfam Desc: Glutathione S-transferase, N-terminal domain
  misc_feature (138)..(208): Pfam Id: PF00043 Pfam Desc: Glutathione S-transferase, C-terminal domain
  misc_feature (4)..(218): NCBI GI: 119467490 Blast Desc: glutathione-s-transferase theta, gst [Neosartorya fischeri NRRL 181] gi|119405703|gb|EAW15654.1| glutathione-s-transferase theta, gst [Neosartorya fischeri NRRL
  misc_feature (5)..(216): NCBI GI: 156063600 Blast Desc: SS1G_01918 [Sclerotinia sclerotiorum 1980] gi|154697252|gb|EDN96990.1| SS1G_01918 [Sclerotinia sclerotiorum 1980]
  misc_feature (4)..(216): NCBI GI: 145236749 Blast Desc: An06g02010 [Aspergillus niger] gi|134075483|emb|CAK48044.1| protein product [Aspergillus niger]
  misc_feature (4)..(216): NCBI GI: 256721835 Blast Desc: NECHADRAFT_54515 [Nectria haematococca mpVI 77-13-4]
  misc_feature (4)..(218): NCBI GI: 255941120 Blast Desc: Pc16g10190 [Penicillium chrysogenum Wisconsin 54-1255] gi|211585952|emb|CAP93689.1| Pc16g10190 [Penicillium chrysogenum Wisconsin 54-1255]
  misc_feature (4)..(219): NCBI GI: 255936911 Blast Desc: Pc13g10620 [Penicillium chrysogenum Wisconsin 54-1255] gi|211584102|emb|CAP92131.1| Pc13g10620 [Penicillium chrysogenum Wisconsin 54-1255]
  misc_feature (4)..(173): NCBI GI: 154282777 Blast Desc: HCAG_02355 [Ajellomyces capsulatus NAm1] gi|150410364|gb|EDN05752.1| HCAG_02355 [Ajellomyces capsulatus NAm1]
  misc_feature (1)..(213): NCBI GI: 261355862 Blast Desc: glutathione S-transferase II [Verticillium albo-atrum VaMs.102]
  misc_feature (7)..(173): NCBI GI: 67525595 Blast Desc: AN3255.2 [Aspergillus nidulans FGSC A4] gi|40743974|gb|EAA63156.1| AN3255.2 [Aspergillus nidulans FGSC A4] gi|259485780|tpe|CBF83091.1| TPA: glutathione transferase 1
  misc_feature (4)..(216): NCBI GI: 256734881 Blast Desc: NECHADRAFT_90504 [Nectria haematococca mpVI 77-13-4]
  misc_feature (4)..(210): SWISSPROT Homolog: EC 2.5.1.18 Glutathione transferase
MSEMQTLIVYSMGPSPNPWKIAIILEELGLPWKFESLQMTDLKKKPYTDLNPNGRVPTLVDPNTDMVIWESGAIVDYLIEQYDKDAKLHYTDMKQKSATRSWQYFQVSGQGPYLGQLGWFSNHHSEKIPSAIERYYNETKRILGVIDSHLEKNGTKFLVGDKVTYADLMFMPYFKSMYVGEGALMAKDLDTKQWVHYTGWMKRLHERPATAKVAKDYDDLWTAIFSAPGAH

SEQ ID NO: 23507 - DNA, 927 bp, Muscodor strobelii
  misc_feature: SGI cDNA ID NO. 567999
  misc_feature: Reduced expression when VOC is produced
  misc_feature: Encodes the peptide sequence at SEQ ID NO 23508
atgtcatcggccactcaaatcaagttgcaggaatggcatgtgacggagccatatctcaacctacactgctctcttggcgaaggtccatactacgaggcggcctccaacagccttcgatttgttgacatcaagaataagcgcctgcattccgtaaacctcgatgagggcccgaagtcggtaacgacaacacagctagatacgcctgtaactgtgaccgctgatatcgagggcgtggatccgcaagagcgcatcctcatcggtgcaaagtacgggctcgcagtattagatcgtaaaacgggcaaatacgaatacatcgctcgttttaatgagacggataatgagaggctgagaagcaatgatggcgccgccgatccgcatggtagattttggcttggtgcaatgactgatattgggttggatcttcaagcagaaggccatgtctatttattcagcgagggtgcagccggccagtctatgcggactccgctaacgattcccaacggcattgcttggtcaccagacaatacaatcatgtatttcacgcactcgacatcgcgaacggtatttgcattcgattactcaagcgttgacgggagcttgtccaacgagcgtattttctatcagcacgagggtcctggcgagcctgatggcttccgtgtagacactgaaggcaatctatggcatgcagtgtacggggagtcgcgtgtgctcaaaatctctcctgcaggcgagctcatcggccagatcaatttaccaacgcagaacatcacatgtacgcagtttgttggcactgagctcttcatcaccactgcagccatggacaacggagagagttcagataaggctgtagagcttggtggcgcattgttcagggtcgatgtgggcgtaaagggcgtagaactctttaaatacaagctacgcagttag

SEQ ID NO: 23508 - protein, 308 aa, Muscodor strobelii
  misc_feature: SGI Peptide ID NO. 567999
  misc_feature (18)..(272): Pfam Id: PF08450 Pfam Desc: SMP-30/Gluconolaconase/LRE-like region
  misc_feature (4)..(306): NCBI GI: 116207232 Blast Desc: CHGG_02909 [Chaetomium globosum CBS 148.51] gi|88183506|gb|EAQ90974.1| CHGG_02909 [Chaetomium globosum CBS 148.51]
  misc_feature (9)..(306): NCBI GI: 261354060 Blast Desc: regucalcin [Verticillium albo-atrum VaMs.102]
  misc_feature (9)..(306): NCBI GI: 39940450 Blast Desc: MGG_05015 [Magnaporthe grisea 70-15] gi|145010741|gb|EDJ95397.1| MGG_05015 [Magnaporthe grisea 70-15]
  misc_feature (4)..(306): NCBI GI: 85086970 Blast Desc: NCU00326 [Neurospora crassa OR74A] gi|28918892|gb|EAA28561.1| conserved [Neurospora crassa OR74A]
  misc_feature (7)..(306): NCBI GI: 256732842 Blast Desc: NECHADRAFT_60456 [Nectria haematococca mpVI 77-13-4]
  misc_feature (9)..(306): NCBI GI: 46124543 Blast Desc: FG06649.1 [Gibberella zeae PH-1]
  misc_feature (9)..(306): NCBI GI: 154320179 Blast Desc: BC1G_02070 [Botryotinia fuckeliana B05.10] gi|150854809|gb|EDN30001.1| BC1G_02070 [Botryotinia fuckeliana B05.10]
  misc_feature (9)..(306): NCBI GI: 156065533 Blast Desc: SS1G_00777 [Sclerotinia sclerotiorum 1980] gi|154691636|gb|EDN91374.1| SS1G_00777 [Sclerotinia sclerotiorum 1980]
  misc_feature (9)..(298): NCBI GI: 115397845 Blast Desc: conserved [Aspergillus terreus NIH2624] gi|114192705|gb|EAU34405.1| conserved [Aspergillus terreus NIH2624]
  misc_feature (8)..(307): NCBI GI: 255942693 Blast Desc: Pc18g02740 [Penicillium chrysogenum Wisconsin 54-1255] gi|211586848|emb|CAP94498.1| Pc18g02740 [Penicillium chrysogenum Wisconsin 54-1255]
  misc_feature: Useful for introducing or modulating the production of volatile compounds
MSSATQIKLQEWHVTEPYLNLHCSLGEGPYYEAASNSLRFVDIKNKRLHSVNLDEGPKSVTTTQLDTPVTVTADIEGVDPQERILIGAKYGLAVLDRKTGKYEYIARFNETDNERLRSNDGAADPHGRFWLGAMTDIGLDLQAEGHVYLFSEGAAGQSMRTPLTIPNGIAWSPDNTIMYFTHSTSRTVFAFDYSSVDGSLSNERIFYQHEGPGEPDGFRVDTEGNLWHAVYGESRVLKISPAGELIGQINLPTQNITCTQFVGTELFITTAAMDNGESSDKAVELGGALFRVDVGVKGVELFKYKLRS

SEQ ID NO: 23509 - DNA, 2630 bp, Muscodor strobelii
  misc_feature: SGI EST ID NO. CUFF.55356.1
  misc_feature: Variant of the nucleotide sequence at SEQ ID NO 23507
aagtctccctgatacccagccggccaattgctagtgacaacgatgaggtaaatatacattgttgatcactctgaatggacaggaaacctaggtaggtacttcgagtaccatgcaacacggattgcgatatcagtgaaattgtggcaactctctaaatatcttgaaagcccgcataccgtcgagcaaacggggctctcgctcatacaccgacattgcaatacataggctagaagaggaccgtgcagaaatgcccgcttcctgcatgaacgttttctgggatctttttcacgatgcagatgatgagtgttccgagcctttttctagcaagtagcggtcactgtttatgctcgtatacaggattcagatgcgcagcggtgagcggaagttgatcaccctctacacttaggtagatccgtctcgaattctcctcgatgagataacccggttcgaagagagttaatacaatccaacttgcctcgcgaaggtggaaaaaatgccgaaggcaatgtgttcgtcatattgcagcttccaatatactgtggtaaaagttgtaggcgaagttgcgtgccgtcgtcgtacgccgtcgatattacaccgtaaaccgcatgtgtcggcgggatatttgcaatagatggccacgacgacgcatttattcggcaaacaaatgtagttatcaggtaacctggaggcaaggccattctttcgaaagctgaaaagacagccttgcgtttccgggcccgcgatcggctattagcacgttatcagcacgtgcgacgccgttccccgttgcttctgaattctcaggacggaaaaacagacgatgacaatgcgagtcattttatgccggcatttcgcgacggcgcctcacagccgagccgcacgctgtcggtagaggagccgccgtcgcgtatgcagctcggaagcagtatttcggagaaagttgaatctacggttatgaggcccgcatctccgatgagatatactattcattgagctccctgcgtccattccctcaatctcaaaaaaagagagtatataaccaagctcttcagaaaacggtgtccagcaatgttcgtgaaatattgtcctatgaaactcaattcgaggtggcgcttgtcaaaacctgcagaatatccgcaaaccagaagggtcccactgaacccctcctccgtcattagaagccagtgccagagcagacttgctcagtgttcacaaattcatatttgaacgtggaacatctcttgtaatcgttaatcacgcccgacactcgccatgtcatcggccactcaaatcaagttgcaggaatggcatgtgacggagccatatctcaacctacactgctctcttggcgaaggtccatactacgaggcggcctccaacagccttcgatttgttgacatcaagaataagcgcctgcattccgtaaacctcgatgagggcccgaagtcggtaacgacaacacagctagatacgcctgtaactgtgaccgctgatatcgagggcgtggatccgcaagagcgcatcctcatcggtgcaaagtacgggctcgcagtattagatcgtaaaacgggcaaatacgaatacatcgctcgttttaatgagacggataatgagaggctgagaagcaatgatggcgccgccgatccgcatggtagattttggcttggtgcaatgactgatattgggttggatcttcaagcagaaggccatgtctatttattcagcgagggtgcagccggccagtctatgcggactccgctaacgattcccaacggcattgcttggtcaccagacaatacaatcatgtatttcacgcactcgacatcgcgaacggtatttgcattcgattactcaagcgttgacgggagcttgtccaacgagcgtattttctatcagcacgagggtcctggcgagcctgatggcttccgtgtagacactgaaggcaatctatggcatgcagtgtacggggagtcgcgtgtgctcaaaatctctcctgcaggcgagctcatcggccagatcaatttaccaacgcagaacatcacatgtacgcagtttgttggcactgagctcttcatcaccactgcagccatggacaacggagagagttcagataaggctgtagagcttggtggcgcattgttcagggtcgatgtgggcgtaaagggcgtagaactctttaaatacaagctacgcagttagagcagagggtgcattacagcgaccggcaacactgtacaatatagtttgcgacctttcgcgcattttattcaaccatgtttctcccaagaggtcaggcagcatgaagaacaggtacagtatgcatagctaactactacgagagctatgctattctccatgtctacggtatcttaatgtgtttcgttttttgtttcaccctggaccagcatacacgcttgcaagatcgccccctcaagaagtgtcagccctgcttagtccagatgacatgacagcctcggtgtttcttttgcttctcaaatgttgctagatatatataactcatagtagtgtatgtgtgtgtatgtagaatggtctatgtgaccagtcagagcgatcagtcgctttagctaacgcagccattgaccctttaatttcaacagcatattgagcct

SEQ ID NO: 23510 - DNA, 1005 bp, Muscodor strobelii
  misc_feature: SGI cDNA ID NO. 568000
  misc_feature: Encodes the peptide sequence at SEQ ID NO 23511
atgattaatcaaccaagtcctggtttgcaagaagatctttatcgtactcctgctggctcaggagctcacgcacgaccaaccccaaattattaccatgataccggcctgcataatgcaaatattcgtgtgaaccacccattccagaacctcccgccaggtgatgcgaggtggtatcccggttacgagcatggtcaacaacatggctccggtccagtcaggagcttacccttcggcgagggacaggctgctgtgcatattcagccagctcatggggaagagttcattgttccggtcgatactcaccagggatcaagacaagcagacgaaaagcgccaacgaaatgctggtgcatcggcaaggtttcgcaagaggaaaaaggagcgggagactctggaaaaggtcgagcatcagagaatggagaacgagaaccgcgaactcgagcggcggaaccaatttctagaaatgagactccgggaggagtcgagtgaaagagagagggttacggtggatcgcaaccggctacgtgacattgtttctcgaacaccgtccattagcgagctggcatatatccaggaacaaccgagtccagacttatcgaggagtggtggtacgatcacggagagagatgcgcgtggatcggcgacacaaccgtcgcctggctatggtggtggccctgatctcacgacaggagaaagacccgcgcaacggcgaaggacagaacctggaccgattgacttaccgattactcccttcgccgtgacaacccttccttcgatccccgcatcgggatacagtctgtcggtgtcgcaacctggaacccctctggccggccatcaccagtcacgcctaccccctctcagactcgaccgtgcgacagttccacctccaaacccagcatcgagcatgtccacaccggtacacacgtatccccagatcaagccagagcaatatgagactggttgggtctctggaactcgcggcccccaagaaactgggtcacgctag

SEQ ID NO: 23511 - protein, 334 aa, Muscodor strobelii
  misc_feature: SGI Peptide ID NO. 568000
  misc_feature (51)..(200): NCBI GI: 171685782 Blast Desc: protein product [Podospora anserina] gi|170942852|emb|CAP68505.1| protein product [Podospora anserina]
  misc_feature (53)..(291): NCBI GI: 116207238 Blast Desc: CHGG_02912 [Chaetomium globosum CBS 148.51] gi|88183509|gb|EAQ90977.1| CHGG_02912 [Chaetomium globosum CBS 148.51]
  misc_feature (40)..(323): NCBI GI: 256733302 Blast Desc: NECHADRAFT_92972 [Nectria haematococca mpVI 77-13-4]
  misc_feature (6)..(323): NCBI GI: 46124547 Blast Desc: FG06651.1 [Gibberella zeae PH-1]
  misc_feature (74)..(305): NCBI GI: 154320193 Blast Desc: BC1G_02077 [Botryotinia fuckeliana B05.10] gi|150854816|gb|EDN30008.1| BC1G_02077 [Botryotinia fuckeliana B05.10]
  misc_feature (81)..(188): NCBI GI: 85086983 Blast Desc: NCU00329 [Neurospora crassa OR74A] gi|28918895|gb|EAA28564.1| [Neurospora crassa OR74A]
  misc_feature (37)..(287): NCBI GI: 261354058 Blast Desc: conserved [Verticillium albo-atrum VaMs.102]
  misc_feature (116)..(305): NCBI GI: 156065541 Blast Desc: SS1G_00781 [Sclerotinia sclerotiorum 1980] gi|154691640|gb|EDN91378.1| SS1G_00781 [Sclerotinia sclerotiorum 1980]
  misc_feature (86)..(153): NCBI GI: 169596522 Blast Desc: SNOG_01026 [Phaeosphaeria nodorum SN15] gi|160701331|gb|EAT92521.2| SNOG_01026 [Phaeosphaeria nodorum SN15]
  misc_feature (96)..(178): NCBI GI: 189202098 Blast Desc: PTRG_07053 [Pyrenophora tritici-repentis Pt-1C-BFP] gi|187984484|gb|EDU49972.1| PTRG_07053 [Pyrenophora tritici-repentis Pt-1C-BFP]
MINQPSPGLQEDLYRTPAGSGAHARPTPNYYHDTGLHNANIRVNHPFQNLPPGDARWYPGYEHGQQHGSGPVRSLPFGEGQAAVHIQPAHGEEFIVPVDTHQGSRQADEKRQRNAGASARFRKRKKERETLEKVEHQRMENENRELERRNQFLEMRLREESSERERVTVDRNRLRDIVSRTPSISELAYIQEQPSPDLSRSGGTITERDARGSATQPSPGYGGGPDLTTGERPAQRRRTEPGPIDLPITPFAVTTLPSIPASGYSLSVSQPGTPLAGHHQSRLPPLRLDRATVPPPNPASSMSTPVHTYPQIKPEQYETGWVSGTRGPQETGSR

SEQ ID NO: 23512 - DNA, 3954 bp, Muscodor strobelii
  misc_feature: SGI EST ID NO. CUFF.55300.0
  misc_feature: Variant of the nucleotide sequence at SEQ ID NO 23510
cttaattcttcaatggtgccaaagttctaagccctgtcattatccaggcccatcgcaggcttgaacaaggggtcccttgaccttcctgcaccccagccgccagcccaagttctgcgagacccatgctctctaagtccaccggtttagtagcatcgacaagctttctacgataagaataggtttatgaacttgggtatgatgccaagcaaataatgatagaagacaaagcagcttcgctcgacattacttggggtagttttgtttcatttggtcattggccgccataccgtactgtcatcttcttacatatctttcttctacgacagaccctccagagccagtatctgagggagcatctctattacgtcttcaacaacgttccgtgcctgttactagaagaccttccggccgatttgagcctcttaaatccctaataacacttctttctcagtggctcagacagactgcgttgcaccaaatcattgtcactgcttgttttctttgcctctcttggacatatctcaagggtatttcttgggggctctgaagaggtctaggaaactttgcttctttgtgggctgcccttagccattcgttgtttagggctttcgcttgggactgtagctgtttggtttaggttgcatcatcgtccattggctaccattccacctaccggtagatcagcgactcctggtcggccgtgcaaggccagctgtggtcgattcgccgcctacctgaaggcactatttcatattccttcgctttcttgctctcaatcttcagcagtataccgccaattggtatccatcgatatcgtaccggcttgaatcgtttttcccgaatgcttgctcgaagctagtatccctgtccagcagcattcaagattgacatacactcagagacaccgactaggcttatcatataattccggcttaagtatttgccttaagatcccgaactgctttgtttggtgatctgcaccaaacctcgcgtggagattgaaaacgctgaacttagtctacatttattggagcagactcttcaaattctgacgccgtggcgatccaggatctcattatctctcagactacccgtcaatctcaccatcagcattgcaacgattacgaggttctgataaaccagccaagccgccagcatcgtcccgaacacgtcggtcagggaggggaccggacagggagtggaggggtgaagacagatatctgcgaatatcagcttattggtcttcgaaaaggtcaatgtctaagtccccagagcccaccgcaggttggggaactggtttcgatgtcgctgaggggcgacaatatcccgtctacgtctccccaggcatctacaccatcttcgtcagtacacggggaactcgctgaaacgtaccagacatctatcggtgggagtgggcatcgcgcaacggaaaacagactgcctagaaatttgggggttcacaatatcttgaatccaactgaccatgcctctcgtggccctggacggatcgaaggaagtgctttcagcccaaacaccccaagcgccgcatcaagtccgagttctcatgccccatcgccattcgtgtttcaaggacaaggtatgattagagctgggcagacaactcccccgagcgaatacccgccccagacgacaccgttgtctgcggaacgtgtttctcctggtactactcgtcctctacctatggtagcttccgtgaggcgcaccctgactcctcggtcccctcggatgaacattactgttcgtggcgtggcttatgaaggctacccatacgccacccaagctcaacagttcgcaacagggcctcgagatagtggaagaatagtctcactggatgctggagcatcggtacgcgcagagcaagcacacagtggaaggggatcaccgttggtaccacaactcagcagagttaatgatcaggcaggtcgaactccgcccaatattgttccatcaacgaccacgacgcgctcaatctcccaatcgatgattaatcaaccaagtcctggtttgcaagaagatctttatcgtactcctgctggctcaggagctcacgcacgaccaaccccaaattattaccatgataccggcctgcataatgcaaatattcgtgtgaaccacccattccagaacctcccgccaggtgatgcgaggtggtatcccggttacgagcatggtcaacaacatggctccggtccagtcaggagcttacccttcggcgagggacaggctgctgtgcatattcagccagctcatggggaagagttcattgttccggtcgatactcaccagggatcaagacaagcagacgaaaagcgccaacgaaatgctggtgcatcggcaaggtttcgcaagaggaaaaaggagcgggagactctggaaaaggtcgagcatcagagaatggagaacgagaaccgcgaactcgagcggcggaaccaatttctagaaatgagactccgggaggagtcgagtgaaagagagagggttacggtggatcgcaaccggctacgtgacattgtttctcgaacaccgtccattagcgagctggcatatatccaggaacaaccgagtccagacttatcgaggagtggtggtacgatcacggagagagatgcgcgtggatcggcgacacaaccgtcgcctggctatggtggtggccctgatctcacgacaggagaaagacccgcgcaacggcgaaggacagaacctggaccgattgacttaccgattactcccttcgccgtgacaacccttccttcgatccccgcatcgggatacagtctgtcggtgtcgcaacctggaacccctctggccggccatcaccagtcacgcctaccccctctcagactcgaccgtgcgacagttccacctccaaacccagcatcgagcatgtccacaccggtacacacgtatccccagatcaagccagagcaatatgagactggttgggtctctggaactcgcggcccccaagaaactgggtcacgctagacactgacagctactggagaatatcaatcgcttttcaagatcactaacggccatctgcattcgctctatatatacgcgttctaatatactgtgccctattcatttacagcaggctgaagcaaggtactactttatagtacctaccaagggcatgatcattttcatcagtgcgtctcttatgtttatttggggggaaaatgggatcattctagaattggatcacatcattcgggcaaccgacacattggacagcgagacgggaagttgggggcggcaaaattctgcttgttgcttaaattggatttctgagattgatattggaagtttcaggggaccatggcgtccacaatattcactcgttgcgatgcgggagttgagaaagatacttgagtggagcgactgagtcattgcatgtccgccttatttgcggctacgcggcgtctggtgtttttaatatactctactggggtttgtttttactgctcgtcgttattgtatcccatttacctcagattgtgaaattcatcgacagattgcagattatgttttctattgtgtcaactcgctatttctgtcttccatcgcccatatatacacatatcctcccagacatcagaccacagttcttgtttgcaactttatcctgataccctcgcgtttcgtgtggtggacatacagttagatagacggaaggaagaacgacaatggaggaaaaaggatgagaatcgctcgctaaatattatactaggaacttccatagtctataagaatagtcatccagaacaataaatttgacaaaagaagagaatgtgacactgaatgttgcatacgtcggaggacttacgaagactcgctggctttctaaatggtgtcacgaaacacaagcaggcaatacgcatctcgtatcttgtgatgcaactccttctcgagtcctagagagtaaggtag

SEQ ID NO: 23513 - DNA, 636 bp, Muscodor strobelii
  misc_feature: SGI cDNA ID NO. 568001
  misc_feature: Encodes the peptide sequence at SEQ ID NO 23514
atgcagctcaccaaggctctccttgctgctgctatcctgctcgggtctacgacccttgcagctccagtggcagctccagttgatgataccatgatcgtcgaccgtgatcgctaccatcaccatcatcacaatgaccaccaccatcatgacaataacgacggtcaccgctgggacgtccgtaatgagggccgtaatgaagatgatgagaaatacagacatcatcataacgaccatcatcaccatcacgatgaccacaatggcaaccattacgacgtacgcgatgaaggtggccgcgatgatgagaaatatagacaccaccataatgatcatcatcaccaccactataatgataataacggtcatcactgggaagaccgtaacgatcacaaggatgatgacgatcggaacagacatcatgatgatgataggaagcataagcatcatggagacaactatcacgaaaagagaggcgaggactacggaaaggaaggtgaggatcgtgggaaagggggtgagtggggcggaaaaggggagcataaggatggatatggaaaaggtggtgagggttatggtagaggaggtcatggtggtcgtggtgggcacggcaagggcggatatggcgaaggcaaggaatga

SEQ ID NO: 23514 - protein, 211 aa, Muscodor strobelii
  misc_feature: SGI Peptide ID NO. 568001
MQLTKALLAAAILLGSTTLAAPVAAPVDDTMIVDRDRYHHHHHNDHHHHDNNDGHRWDVRNEGRNEDDEKYRHHHNDHHHHHDDHNGNHYDVRDEGGRDDEKYRHHHNDHHHHHYNDNNGHHWEDRNDHKDDDDRNRHHDDDRKHKHHGDNYHEKRGEDYGKEGEDRGKGGEWGGKGEHKDGYGKGGEGYGRGGHGGRGGHGKGGYGEGKE

SEQ ID NO: 23515 - DNA, 3588 bp, Muscodor strobelii
  misc_feature: SGI cDNA ID NO. 568002
  misc_feature: Encodes the peptide sequence at SEQ ID NO 23516
atgagtaatccggccaaagctgcgcaatacttggccaagctagaagacgcccgatgcgatggcagatgggacgaagtgccagagctggtgcgcaaggtccggaagcatgccactgatcgagcctgcatcaccgcgactgccgagaccgaatatgctatcgtcaaatcatcccagaagcaaacgaacgcgacgagaacagccaccgccgccgcccccaacaatgagccggacttagcaactttggctccaaggctgcttgaggccatcgacagcgggagcagccccaccgaagacaagtaccaagcgcaagtctgtctcggctggttgcactggaccgctgcagaatacgacttggccttggcccgactgcccacggattctcctgcccagacagaggcctcatcagaatggacccgcgtctgtgcactcaaagctgcgtatttgaaagccaactgcctttctcgaagcgacagaacgagcgaggccatagaaattttcacggccgccaccacatccatgtcgcatgttttgaatgtccagaaggggcgcaagcagctgcggttctgggcagagctgctcctgacagagtactgcatggtgcaagcccaggctctcgagcaaggcattaggagtctcgaagatgacaatgtactggttcccttccgcacgtgggccaagttttgggaaacggccaagatgcaaggtgttcctctggtaggcggacatggctttcgtggcgctgtgccccggagaatggtttggaatgagtactacaacaccatatctagcattttgcagcaagacatcaccccgcctgcaggatacagcaatcaagctacaactgggtcttctgcgcgcaaccagcttcggacggaactgaagggcgtcgagagcgcttacgaggggctcctgctaagcgaaacaacctttccgcgagccgacgaggagagagaagaagtcgaggctttcgtctcgactgtgatgaggaattggtccgttctggtcggtcgggactggttcgaacaggacttgggaccaggaggaaaagacagcctgagtcgcggtgtgcttgatatcctgtaccgcgccgcgaccaagactttccactctactgcgatattacgattcctcttcaccgttcatctggctgttgctgaattcgatttggcatttcgtgcgcttgactcatacctcgaaatcgttaagaaggctaaagctcgcgtcgacaaaactggtcatcctgaaccaagtcttgacgacgatgcgaccgtgctggagacagtctcgcaagctatcattgctctatgcaaatacggtttcacggaggcagccgagaaggcgcgggatctagggctagagttggagcagatgctccagaagctgccaccgccattaccggatacgggagataaaatctcaacggtagacgaggagaatggaaacggcgtcatacttcatcctagagtgcctgctcaagtatacgcttttacatggcaagcaattggattatcaaatgcgcaatggtctcgagtaagtagtgacgccccttcgaggactgaactccaggccaaggcgatccgatgtcttcagaaatcgttgtccccagagaccggcaaccccacggatgtcagatctcttttcactttgggtcttcttctggcggagcagagagaactgacggcagcaatcgatatcgtgaaggccgcattgatttctagcaaaagatcgccggagcagaaacttgagactggtccatactggcgcgagagatctctcattcctttgtggcatcttcttgctttgctgcttagtgcaagacaggattacgttctggcagcccgagcttgtgaaggtgcatttgagcaattcgatgaccctgaggtgttatttgggccgcaacacctgcaaggggcatttcgaagcgaacatctgaacgaagccgaagttcagcccgaaaaaacgcggtctcacggcttagtcgatgagatggacgatctcgaaaaagaaagtattattgaagtaaagatgacgcagcttgtgcttctggagctgctcgaaggcccagaagttgcagtcaatgccagccatgaattactcgttctatttacaagactgttcggatctgtgcaagcgaaaactcctcagacgaactcaaaattagcacctgatgttccgagaagctcggcgggtaccttgcgcagtattcggggcagcatttttggcgataagacggaaaagggactcggccacccaacaaggagaagcactctggatagcgaaaagtctgcttcaatcccagagagaccccgaacaactcaaagtatcgcaactgcttccacagctgctcctgctatacagatcaccagggataacagcgatttgagcgcctcccagcgatcatcaaggcctacgagtgttcgagggcgccacgaggagagccgcaagaatagtttgaagaagcgagacggtagtacacagcagcgacgggccttgtcccgagactcgtccgttgtggatggtgaagcatatttcacgccatctgaggacggatttattgacgatcaaccaagcaacttgggctggggctcaaaaggcaggagttttcaacggtttgatccgtcgggttcactggggcaacgtgccgcggccaattctagaggtcttgttctagattctttgtcttgccctagtcccttgccagtaattacctttacttccgatcaagtgcgccgtcaacgacagactttattagtcaaagtgtggttgatgatcgcttcgttttaccggcgatcaaaactgtatagtgatgcgaagggtgcgatcaatgaggctagaacactggttcaaggcttagagatcgagatttccagagacaccagccgctctgtgacttccatgcacccaggatggggtggtcgaaactgtctggaagagctactgggtgacgtgtttgctgagtcgggtcttcttgctgctgatgaagggacaccatatgtcgcacggtcccaatatgaggaggctttaatgcattatccagaccatgtcgccgccaccgttggcctatccaacatacttttagacatttacagcgaagttctgttgccccctcctgcggttcctcatatagcttgggaatcgacactgggcgagaccgcgagtcaggacaccaaaatcaccaacccagccgcaagagtttccacaattcccgctttaccaaccacacccctgggactggggtcagagacacagggttctgatgaatcaagagttagcagcagcctttcgtctactcatcgaccatcggatatctcggtcacgaacgagcttccagctccatataagacaaaatcgttgcctctagtagatcggctggctgctcgagacagagcatatggactcctgtctggtctaactaagcttggcactggttggaatcactcggacgcctggtttgcattagcaagagcgcatgaagaaagtgggcaaccagacaaggcgaaagaagcgctgtggtggtgtgtcgaactggaagaaggcatgggtatccgcaaatggagctcagccggggtaaacggttatgttctctga

SEQ ID NO: 23516 - protein, 1195 aa, Muscodor strobelii
  misc_feature: SGI Peptide ID NO. 568002
  misc_feature (6)..(1195): NCBI GI: 256732835 Blast Desc: NECHADRAFT_79440 [Nectria haematococca mpVI 77-13-4]
  misc_feature (6)..(1195): NCBI GI: 171686742 Blast Desc: protein product [Podospora anserina] gi|170943332|emb|CAP68985.1| protein product [Podospora anserina]
  misc_feature (6)..(1195): NCBI GI: 46124565 Blast Desc: FG06660.1 [Gibberella zeae PH-1]
  misc_feature (5)..(1195): NCBI GI: 145614308 Blast Desc: MGG_08820 [Magnaporthe grisea 70-15] gi|145021248|gb|EDK05377.1| MGG_08820 [Magnaporthe grisea 70-15]
  misc_feature (6)..(1195): NCBI GI: 116192105 Blast Desc: CHGG_05770 [Chaetomium globosum CBS 148.51] gi|88181683|gb|EAQ89151.1| CHGG_05770 [Chaetomium globosum CBS 148.51]
  misc_feature (6)..(1195): NCBI GI: 154323117 Blast Desc: BC1G_00901 [Botryotinia fuckeliana B05.10] gi|150848235|gb|EDN23428.1| BC1G_00901 [Botryotinia fuckeliana B05.10]
  misc_feature (5)..(1195): NCBI GI: 156064503 Blast Desc: SS1G_00259 [Sclerotinia sclerotiorum 1980] gi|154691121|gb|EDN90859.1| SS1G_00259 [Sclerotinia sclerotiorum 1980]
  misc_feature (1)..(694): NCBI GI: 261354064 Blast Desc: conserved [Verticillium albo-atrum VaMs.102]
  misc_feature (6)..(1195): NCBI GI: 189190386 Blast Desc: conserved [Pyrenophora tritici-repentis Pt-1C-BFP] gi|187973138|gb|EDU40637.1| conserved [Pyrenophora tritici-repentis Pt-1C-BFP]
  misc_feature (6)..(1195): NCBI GI: 226280570 Blast Desc: conserved [Paracoccidioides brasiliensis Pb01]
MSNPAKAAQYLAKLEDARCDGRWDEVPELVRKVRKHATDRACITATAETEYAIVKSSQKQTNATRTATAAAPNNEPDLATLAPRLLEAIDSGSSPTEDKYQAQVCLGWLHWTAAEYDLALARLPTDSPAQTEASSEWTRVCALKAAYLKANCLSRSDRTSEAIEIFTAATTSMSHVLNVQKGRKQLRFWAELLLTEYCMVQAQALEQGIRSLEDDNVLVPFRTWAKFWETAKMQGVPLVGGHGFRGAVPRRMVWNEYYNTISSILQQDITPPAGYSNQATTGSSARNQLRTELKGVESAYEGLLLSETTFPRADEEREEVEAFVSTVMRNWSVLVGRDWFEQDLGPGGKDSLSRGVLDILYRAATKTFHSTAILRFLFTVHLAVAEFDLAFRALDSYLEIVKKAKARVDKTGHPEPSLDDDATVLETVSQAIIALCKYGFTEAAEKARDLGLELEQMLQKLPPPLPDTGDKISTVDEENGNGVILHPRVPAQVYAFTWQAIGLSNAQWSRVSSDAPSRTELQAKAIRCLQKSLSPETGNPTDVRSLFTLGLLLAEQRELTAAIDIVKAALISSKRSPEQKLETGPYWRERSLIPLWHLLALLLSARQDYVLAARACEGAFEQFDDPEVLFGPQHLQGAFRSEHLNEAEVQPEKTRSHGLVDEMDDLEKESIIEVKMTQLVLLELLEGPEVAVNASHELLVLFTRLFGSVQAKTPQTNSKLAPDVPRSSAGTLRSIRGSIFGDKTEKGLGHPTRRSTLDSEKSASIPERPRTTQSIATASTAAPAIQITRDNSDLSASQRSSRPTSVRGRHEESRKNSLKKRDGSTQQRRALSRDSSVVDGEAYFTPSEDGFIDDQPSNLGWGSKGRSFQRFDPSGSLGQRAAANSRGLVLDSLSCPSPLPVITFTSDQVRRQRQTLLVKVWLMIASFYRRSKLYSDAKGAINEARTLVQGLEIEISRDTSRSVTSMHPGWGGRNCLEELLGDVFAESGLLAADEGTPYVARSQYEEALMHYPDHVAATVGLSNILLDIYSEVLLPPPAVPHIAWESTLGETASQDTKITNPAARVSTIPALPTTPLGLGSETQGSDESRVSSSLSSTHRPSDISVTNELPAPYKTKSLPLVDRLAARDRAYGLLSGLTKLGTGWNHSDAWFALARAHEESGQPDKAKEALWWCVELEEGMGIRKWSSAGVNGYVL

SEQ ID NO: 23517 - DNA, 4183 bp, Muscodor strobelii
  misc_feature: SGI EST ID NO. CUFF.55422.0
  misc_feature: Variant of the nucleotide sequence at SEQ ID NO 23515
gtgcaattaatggcttccacctccaacccacctcaagctactcctgcgggtagttgctcttactatgggcgtttgtagcaaagcgacctaatttaatcccctcgagtacttcgtcgagaagtacctcacttcgaccccgatcgtcattcccgagtgtttcgtttgtatcgcgttccctccatacgttgattgcattgcattgcattgcgcgcgaaatgatttcactagctgcgatacccttccattgatatagaccgactgcggcgtcacagactacagggcgctctcactcggtcggtgcgactcgccaggatgagtaatccggccaaagctgcgcaatacttggccaagctagaagacgcccgatgcgatggcagatgggacgaagtgccagagctggtgcgcaaggtccggaagcatgccactgatcgagcctgtaaacactcttgccccagctcctcctccagccaaacccgactgactcttcccatcaaggcatcaccgcgactgccgagaccgaatatgctatcgtcaaatcatcccagaagcaaacgaacgcgacgagaacagccaccgccgccgcccccaacaatgagccggacttagcaactttggctccaaggctgcttgaggccatcgacagcgggagcagccccaccgaagacaagtaccaagcgcaagtctgtctcggctggttgcactggaccgctgcagaatacgacttggccttggcccgactgcccacggattctcctgcccagacagaggcctcatcagaatggacccgcgtctgtgcactcaaagctgcgtatttgaaagccaactgcctttctcgaagcgacagaacgagcgaggccatagaaattttcacggccgccaccacatccatgtcgcatgttttgaatgtccagaaggggcgcaagcagctgcggttctgggcagagctgctcctgacagagtactgcatggtgcaagcccaggctctcgagcaaggcattaggagtctcgaagatgacaatgtactggttcccttccgcacgtgggccaagttttgggaaacggccaagatgcaaggtgttcctctggtaggcggacatggctttcgtggcgctgtgccccggagaatggtttggaatgagtactacaacaccatatctagcattttgcagcaagacatcaccccgcctgcaggatacagcaatcaagctacaactgggtcttctgcgcgcaaccagcttcggacggaactgaagggcgtcgagagcgcttacgaggggctcctgctaagcgaaacaacctttccgcgagccgacgaggagagagaagaagtcgaggctttcgtctcgactgtgatgaggaattggtccgttctggtcggtcgggactggttcgaacaggacttgggaccaggaggaaaagacagcctgagtcgcggtgtgcttgatatcctgtaccgcgccgcgaccaagactttccactctactgcgatattacgattcctcttcaccgttcatctggctgttgctgaattcgatttggcatttcgtgcgcttgactcatacctcgaaatcgttaagaaggctaaagctcgcgtcgacaaaactggtcatcctgaaccaagtcttgacgacgatgcgaccgtgctggagacagtctcgcaagctatcattgctctatgcaaatacggtttcacggaggcagccgagaaggcgcgggatctagggctagagttggagcagatgctccagaagctgccaccgccattaccggatacgggagataaaatctcaacggtagacgaggagaatggaaacggcgtcatacttcatcctagagtgcctgctcaagtatacgcttttacatggcaagcaattggattatcaaatgcgcaatggtctcgagtaagtagtgacgccccttcgaggactgaactccaggccaaggcgatccgatgtcttcagaaatcgttgtccccagagaccggcaaccccacggatgtcagatctcttttcactttgggtcttcttctggcggagcagagagaactgacggcagcaatcgatatcgtgaaggccgcattgatttctagcaaaagatcgccggagcagaaacttgagactggtccatactggcgcgagagatctctcattcctttgtggcatcttcttgctttgctgcttagtgcaagacaggattacgttctggcagcccgagcttgtgaaggtgcatttgagcaattcgatgaccctgaggtgttatttgggccgcaacacctgcaaggggcatttcgaagcgaacatctgaacgaagccgaagttcagcccgaaaaaacgcggtctcacggcttagtcgatgagatggacgatctcgaaaaagaaagtattattgaagtaaagatgacgcagcttgtgcttctggagctgctcgaaggcccagaagttgcagtcaatgccagccatgaattactcgttctatttacaagactgttcggatctgtgcaagcgaaaactcctcagacgaactcaaaattagcacctgatgttccgagaagctcggcgggtaccttgcgcagtattcggggcagcatttttggcgataagacggaaaagggactcggccacccaacaaggagaagcactctggatagcgaaaagtctgcttcaatcccagagagaccccgaacaactcaaagtatcgcaactgcttccacagctgctcctgctatacagatcaccagggataacagcgatttgagcgcctcccagcgatcatcaaggcctacgagtgttcgagggcgccacgaggagagccgcaagaatagtttgaagaagcgagacggtagtacacagcagcgacgggccttgtcccgagactcgtccgttgtggatggtgaagcatatttcacgccatctgaggacggatttattgacgatcaaccaagcaacttgggctggggctcaaaaggcaggagttttcaacggtttgatccgtcgggttcactggggcaacgtgccgcggccaattctagaggtcttgttctagattctttgtcttgccctagtcccttgccagtaattacctttacttccgatcaagtgcgccgtcaacgacagactttattagtcaaagtgtggttgatgatcgcttcgttttaccggcgatcaaaactgtatagtgatgcgaagggtgcgatcaatgaggctagaacactggttcaaggcttagagatcgagatttccagagacaccagccgctctgtgacttccatgcacccaggatggggtggtcgaaactgtctggaagagctactgggtgacgtgtttgctgagtcgggtcttcttgctgctgatgaagggacaccatatgtcgcacggtcccaatatgaggaggctttaatgcattatccagaccatgtcgccgccaccgttggcctatccaacatacttttagacatttacagcgaagttctgttgccccctcctgcggttcctcatatagcttgggaatcgacactgggcgagaccgcgagtcaggacaccaaaatcaccaacccagccgcaagagtttccacaattcccgctttaccaaccacacccctgggactggggtcagagacacagggttctgatgaatcaagagttagcagcagcctttcgtctactcatcgaccatcggatatctcggtcacgaacgagcttccagctccatataagacaaaatcgttgcctctagtagatcggctggctgctcgagacagagcatatggactcctgtctggtctaactaagcttggcactggttggaatcactcggacgcctggtttgcattagcaagagcgcatgaagaaagtgggcaaccagacaaggcgaaagaagcgctgtggtggtgtgtcgaactggaagaaggcatgggtatccgcaaatggagctcagccggggtaaacggttatgttctctgacccgacagatgatatgaatacgttgtggtgggcacactcatctcttggtccgaactcacttttattcttgccattaaggattgcagtcagaaatacctctgctgatgtctcatcagcacgacattatacatgctcaggccatctagtgatcatttgaagcctttggaagtacacagcatgtcccgtgtcttccatcgaacatagtagtaatacacttaattcac

SEQ ID NO: 23518 - DNA, 2379 bp, Muscodor strobelii
  misc_feature: SGI cDNA ID NO. 568003
  misc_feature: Reduced expression when VOC is produced
  misc_feature: Encodes the peptide sequence at SEQ ID NO 23519
atggctccttcacatgcctctgccatgttgccgccagagctccagaccgtctgccgcagactggcggcaacaaaggccgaacaactaccagctatactaccaatcctactcagggatatatcccgatgccgagagtccctttcgagacctctggaagccaatgcttcatcacatacagccgacattgctgtgctcgtgcataagctcaaaactcacgttagttctcttctcaacggaagagtcagccacggtcacttcgtcggagctgctctggcaaaagccgtagtagaaagcggtggattggaatctctgcgaggttctggaccttgggttaacagtctgatcgccatcttgcagaagaaaggccctgccgtcacgaaagagttgtgcgtggtgacactcacaaaaatttacactttaatgcatcatcacccgactctagtacgcgaatttgcgacaccaactttgcctgtatttgcgacagcttgtattcaagtgctgaagccacccgcgactagcaaagcaggaaaggctccttatagcttggttgaaactatctttgacgcgctttccactttgcttccactctaccccactactctacgcagtgttgcaggaaaagtcagggctgagacccgaccctatctggctcctacaagctcagacaatgtgataacgccagtatctttgcagaaagctagtcggcggttagcagtacggctacccatgactgctgcgaaaggaggagactcaactgaatggacaaagcatgtcgaagagctggtcgagacgtttcacaagactgcagatcaggttttccgcgctgttcaggaaagctgggagtcgtcaagcagctataggtcaaaaccagtcgacgtcaattccgaacttgagggaggcggcattaatcccgagcagttaccgccgtggagcggcgtagaagctggaagtgagcgtattatcggattgctaaacttcatcggggactatcttcgcaaccacacccgcgtgagcgtcacaattcctatcactgccatagtagatatcacgtcccggatatcatccatcaagccgccgccgcccggaaatgcgagatatgactctgggcaagtaaactctgccattggtagagaggaaaaggacgagttatggactaggttcccctatatccagatggctgcgatgagattgcatatttcgatgatcaagagactgggaaccagctatatccccttggtccaagaaacactcgatcaactcctacggatatttgagtccacctaccggatacctgaggcccgtgaactcgcgtacttgttaacacgagaattactgcatctgagcgggccaacactccccaagccagctgtcgataatctcagacttctgataaagtgctgctgccgtgatcttcagggtgcagccgggtatctaaaaaagccgcggccgcagggatccgactcgacccagaacggacagaactctaagtctatctctcaaagtgctgatgcttttctgcccggaaatgtaaaagttgactcaatatccatctcgctcagcgctgcccacattaaggcagctggagacttattagctaccctcttcagccggttgccccagcagcatattccttcttcattgcgatctcatatggtcaagatcgccatcctcagtcggaaccaaaacgcccaggtagcaagtgttctgcacccagcgcaagatcgaaacgggcggacgccccaagtcgccttaccctatttaatccaacagttcccccacgatgagaaagtcgagattctacgcttcagtttcaggcccttagccaccggcacaccgtccgactttatgcagggtgacgataatatggacatcgaggaagacgaggaagacggcaataacagcatgacaaacaacactggctcatttggccaaacgttcaacggccaattctcaagctcattcgcatctccagcaccagccgtagcactgagaccatctattcccattaccgagccaatcactcagactccattcctagcgcaaccctcagaaacaattacccactcatcaaagacagtcatgatgcaaacctcgccacccccatccaattcgctgaagcgcaggaatgaggacgcgatggaagacacaggggtctcgaagcgagtcgaactcgacactgtacatatatcgacatctggccctgtacgagacggcgacgcttcgatcagcactactgtcaccacggtccaggctcctgcagtactgccaagtcaggcaaagccagatgcccaaaacgaggacgaggatagtgatgacgagagcatacatttgaacatggagatggactctgattcagatgacggagaagacgaggagtag

SEQ ID NO: 23519 - protein, 792 aa, Muscodor strobelii
  misc_feature: SGI Peptide ID NO. 568003
  misc_feature (8)..(610): NCBI GI: 85075684 Blast Desc: NCU00059 [Neurospora crassa OR74A] gi|28916817|gb|EAA26566.1| [Neurospora crassa OR74A]
  misc_feature (11)..(605): NCBI GI: 46124567 Blast Desc: FG06661.1 [Gibberella zeae PH-1]
  misc_feature (7)..(612): NCBI GI: 256733294 Blast Desc: NECHADRAFT_92964 [Nectria haematococca mpVI 77-13-4]
  misc_feature (13)..(605): NCBI GI: 39953334 Blast Desc: MGG_08821 [Magnaporthe grisea 70-15] gi|145021247|gb|EDK05376.1| MGG_08821 [Magnaporthe grisea 70-15]
  misc_feature (9)..(605): NCBI GI: 261354065 Blast Desc: conserved [Verticillium albo-atrum VaMs.102]
  misc_feature (11)..(601): NCBI GI: 116192107 Blast Desc: CHGG_05771 [Chaetomium globosum CBS 148.51] gi|88181684|gb|EAQ89152.1| CHGG_05771 [Chaetomium globosum CBS 148.51]
  misc_feature (10)..(656): NCBI GI: 154323115 Blast Desc: BC1G_00900 [Botryotinia fuckeliana B05.10] gi|150848234|gb|EDN23427.1| BC1G_00900 [Botryotinia fuckeliana B05.10]
  misc_feature (11)..(601): NCBI GI: 171686740 Blast Desc: protein product [Podospora anserina] gi|170943331|emb|CAP68984.1| protein product [Podospora anserina]
  misc_feature (14)..(631): NCBI GI: 156064505 Blast Desc: SS1G_00260 [Sclerotinia sclerotiorum 1980] gi|154691122|gb|EDN90860.1| SS1G_00260 [Sclerotinia sclerotiorum 1980]
  misc_feature (14)..(598): NCBI GI: 189190384 Blast Desc: conserved [Pyrenophora tritici-repentis Pt-1C-BFP] gi|187973137|gb|EDU40636.1| conserved [Pyrenophora tritici-repentis Pt-1C-BFP]
  misc_feature: Useful for introducing or modulating the production of volatile compounds
MAPSHASAMLPPELQTVCRRLAATKAEQLPAILPILLRDISRCRESLSRPLEANASSHTADIAVLVHKLKTHVSSLLNGRVSHGHFVGAALAKAVVESGGLESLRGSGPWVNSLIAILQKKGPAVTKELCVVTLTKIYTLMHHHPTLVREFATPTLPVFATACIQVLKPPATSKAGKAPYSLVETIFDALSTLLPLYPTTLRSVAGKVRAETRPYLAPTSSDNVITPVSLQKASRRLAVRLPMTAAKGGDSTEWTKHVEELVETFHKTADQVFRAVQESWESSSSYRSKPVDVNSELEGGGINPEQLPPWSGVEAGSERIIGLLNFIGDYLRNHTRVSVTIPITAIVDITSRISSIKPPPPGNARYDSGQVNSAIGREEKDELWTRFPYIQMAAMRLHISMIKRLGTSYIPLVQETLDQLLRIFESTYRIPEARELAYLLTRELLHLSGPTLPKPAVDNLRLLIKCCCRDLQGAAGYLKKPRPQGSDSTQNGQNSKSISQSADAFLPGNVKVDSISISLSAAHIKAAGDLLATLFSRLPQQHIPSSLRSHMVKIAILSRNQNAQVASVLHPAQDRNGRTPQVALPYLIQQFPHDEKVEILRFSFRPLATGTPSDFMQGDDNMDIEEDEEDGNNSMTNNTGSFGQTFNGQFSSSFASPAPAVALRPSIPITEPITQTPFLAQPSETITHSSKTVMMQTSPPPSNSLKRRNEDAMEDTGVSKRVELDTVHISTSGPVRDGDASISTTVTTVQAPAVLPSQAKPDAQNEDEDSDDESIHLNMEMDSDSDDGEDEE

SEQ ID NO: 23520 - DNA, 4428 bp, Muscodor strobelii
  misc_feature: SGI EST ID NO. CUFF.55324.0
  misc_feature: Variant of the nucleotide sequence at SEQ ID NO 23518
attctcacaacccgaggtttatctagtcttaaagagataggcttggccttgagaaaggttggatctcaactaatcagtacggataacgctacttggagtcttcattcctttaggggataaatcctgagcttgcaattaatttgtctttcctgtgcctcgtcctcctacttatatactctacctagccactattgaaatccttaacgagacccaaggagcttatcccccaacactcatggcctcgtattgtattcatccagcaagtctaaaccttcaccacatattctaacgagacatttcaatggctccttcacatgcctctgccatgttgccgccagagctccagaccgtctgccgcagactggcggcaacaaaggccgaacaactaccagctatactaccaatcctactcagggatatatcccgatgccgagagtccctttcgagacctctggaagccaatgcttcatcacatacagccgacattgctgtgctcgtgcataagctcaaaactcacgttagttctcttctcaacggaagagtcagccacggtcacttcgtcggagctgctctggcaaaagccgtagtagaaagcggtggattggaatctctgcgaggttctggaccttgggttaacagtctgatcgccatcttgcagaagaaaggccctgccgtcacgaaagagttgtgcgtggtgacactcacaaaaatttacactttaatgcatcatcacccgactctagtacgcgaatttgcgacaccaactttgcctgtatttgcgacagcttgtattcaagtgctgaagccacccgcgactagcaaagcaggaaaggctccttatagcttggttgaaactatctttgacgcgctttccactttgcttccactctaccccactactctacgcagtgttgcaggaaaagtcagggctgagacccgaccctatctggctcctacaagctcagacaatgtgataacgccagtatctttgcagaaagctagtcggcggttagcagtacggctacccatgactgctgcgaaaggaggagactcaactgaatggacaaagcatgtcgaagagctggtcgagacgtttcacaagactgcagatcaggttttccgcgctgttcaggaaagctgggagtcgtcaagcagctataggtcaaaaccagtcgacgtcaattccgaacttgagggaggcggcattaatcccgagcagttaccgccgtggagcggcgtagaagctggaagtgagcgtattatcggattgctaaacttcatcggggactatcttcgcaaccacacccgcgtgagcgtcacaattcctatcactgccatagtagatatcacgtcccggatatcatccatcaagccgccgccgcccggaaatgcgagatatgactctgggcaagtaaactctgccattggtagagaggaaaaggacgagttatggactaggttcccctatatccagatggctgcgatgagattgcatatttcgatgatcaagagactgggaaccagctatatccccttggtccaagaaacactcgatcaactcctacggatatttgagtccacctaccggatacctgaggcccgtgaactcgcgtacttgttaacacgagaattactgcatctgagcgggccaacactccccaagccagctgtcgataatctcagacttctgataaagtgctgctgccgtgatcttcagggtgcagccgggtatctaaaaaagccgcggccgcagggatccgactcgacccagaacggacagaactctaagtctatctctcaaagtgctgatgcttttctgcccggaaatgtaaaagttgactcaatatccatctcgctcagcgctgcccacattaaggcagctggagacttattagctaccctcttcagccggttgccccagcagcatattccttcttcattgcgatctcatatggtcaagatcgccatcctcagtcggaaccaaaacgcccaggtagcaagtgttctgcacccagcgcaagatcgaaacgggcggacgccccaagtcgccttaccctatttaatccaacagttcccccacgatgagaaagtcgagattctacgcttcagtttcaggcccttagccaccggcacaccgtccgactttatgcagggtgacgataatatggacatcgaggaagacgaggaagacggcaataacagcatgacaaacaacactggctcatttggccaaacgttcaacggccaattctcaagctcattcgcatctccagcaccagccgtagcactgagaccatctattcccattaccgagccaatcactcagactccattcctagcgcaaccctcagaaacaattacccactcatcaaagacagtcatgatgcaaacctcgccacccccatccaattcgctgaagcgcaggaatgaggacgcgatggaagacacaggggtctcgaagcgagtcgaactcgacactgtacatatatcgacatctggccctgtacgagacggcgacgcttcgatcagcactactgtcaccacggtccaggctcctgcagtactgccaagtcaggcaaagccagatgcccaaaacgaggacgaggatagtgatgacgagagcatacatttgaacatggagatggactctgattcagatgacggagaagacgaggagtaggatattgctgtagattagagttaacttaagaaaaatggccatttcaaacccctcggttcaaatgcacagatcatgttgcttgtgtacgcgtcaaataatgagcgacaatcgatgacataaagcatgagaatcaacgatgttaactatcacagaactgggtataaccatcatcaccaacgcaatatacccctaagagcttcctaacctacagagttcagacaagaactatctatctcgccaagccctatccacaacgacatggccccaacagaacacatatgatctgggggctttttaaaatgcaataccaaactccgaccagctcagtcatttgacagcagatccatgatgctatgcaaatgccggtggcacattcctgtatccttcgtttcgtctctgcttaaacgttggacctctcgtacacttcacaatcagaatgacaacacttgccaacgccccttttagatgcaaatgatgtggtactttccagtaggaagaccaataccgtagaacgcctttatatgatgaagcaaaaatataagcaggatagtgatatggcctaatccagcagccacgcacgacgtttctcttcctttctggcccggcgcttttctttgaactgcttcagctcggctttagagggtttcttgccagagcgctcggctttgagactacgtccgtcgtgggcgttggcggcggcgtcgacgtcgaagaacgagttcatctgtcttcgtgacttggcctcgtcgttgtggcggtcgggattctggtcggcgccttgccagccgcccgtgaagcggttgaaagtgccgacggcagcgtaagcagtggcagggtccatgacgccagtgtccgtttcctgattttcgctatcttgcttggcgtaccaggcatttgggtcgtagtctccgtggatcgcaggattgtaaccaccagctgggggacgttcattcagcggagggacggctgtggcaggaggagtctcgagttgcgcattcgtgtcggcggcggctttggtcgcgggctggagacggggattctcccaggtagactgatttgtgaagcggttgtggaagtagtaggcctggttggtggcgtcccagtgatattcccatccatcgtcttctgcagcaggcttcgagtccgggacaggctcgctggggagcggaggagccgcggcaacgggagaggcttctccatcttcgctacgactgtcttctgaggtggcgtcggaattgctgctcacggcatcttcagcggtctgctgcttgccatcggttgatatcttaagggcggttgcgtcatggtctgtaatagcgtcctgtgcaggcgacttgggactttgagtagtggtagtagtagtagcaggcaggggagactgcggggacttggggagctgaggagactcagccgcaggtgttaaagacatgtttgatagagggggaatgttttgcccttttgcccttgtggctggatgatataattatatcgtaaagaagagtgtctaaggaaatgctagtgtggaatcagagtggtcgtcgagccaggtatttgacatgctggcgacggcggtcacggcggggagcgtgttgtgtgggtgtgcaggtgacgtgcagacgcagtggtgcaggctgtcggcgttgaggtgagcacgtctgagacacaacgaggcaagcgaagcaatcgtcaaaaccgaggactagtcgccgttggttggcaccgtccctgacgcacttccctggctcccc

SEQ ID NO: 23521 - DNA, 1179 bp, Muscodor strobelii
  misc_feature: SGI cDNA ID NO. 568004
  misc_feature: Reduced expression when VOC is produced
  misc_feature: Encodes the peptide sequence at SEQ ID NO 23522
atgatcaagagactgggaaccagctatatccccttggtccaagaaacactcgatcaactcctacggatatttgagtccacctaccggatacctgaggcccgtgaactcgcgtacttgttaacacgagaattactgcatctgagcgggccaacactccccaagccagctgtcgataatctcagacttctgataaagtgctgctgccgtgatcttcagggtgcagccgggtatctaaaaaagccgcggccgcagggatccgactcgacccagaacggacagaactctaagtctatctctcaaagtgctgatgcttttctgcccggaaatgtaaaagttgactcaatatccatctcgctcagcgctgcccacattaaggcagctggagacttattagctaccctcttcagccggttgccccagcagcatattccttcttcattgcgatctcatatggtcaagatcgccatcctcagtcggaaccaaaacgcccaggtagcaagtgttctgcacccagcgcaagatcgaaacgggcggacgccccaagtcgccttaccctatttaatccaacagttcccccacgatgagaaagtcgagattctacgcttcagtttcaggcccttagccaccggcacaccgtccgactttatgcagggtgacgataatatggacatcgaggaagacgaggaagacggcaataacagcatgacaaacaacactggctcatttggccaaacgttcaacggccaattctcaagctcattcgcatctccagcaccagccgtagcactgagaccatctattcccattaccgagccaatcactcagactccattcctagcgcaaccctcagaaacaattacccactcatcaaagacagtcatgatgcaaacctcgccacccccatccaattcgctgaagcgcaggaatgaggacgcgatggaagacacaggggtctcgaagcgagtcgaactcgacactgtacatatatcgacatctggccctgtacgagacggcgacgcttcgatcagcactactgtcaccacggtccaggctcctgcagtactgccaagtcaggcaaagccagatgcccaaaacgaggacgaggatagtgatgacgagagcatacatttgaacatggagatggactctgattcagatgacggagaagacgaggagtag

SEQ ID NO: 23522 - protein, 392 aa, Muscodor strobelii
  misc_feature: SGI Peptide ID NO. 568004
  misc_feature (1)..(205): NCBI GI: 46124567 Blast Desc: FG06661.1 [Gibberella zeae PH-1]
  misc_feature (1)..(212): NCBI GI: 256733294 Blast Desc: NECHADRAFT_92964 [Nectria haematococca mpVI 77-13-4]
  misc_feature (1)..(205): NCBI GI: 261354065 Blast Desc: conserved [Verticillium albo-atrum VaMs.102]
  misc_feature (1)..(210): NCBI GI: 85075684 Blast Desc: NCU00059 [Neurospora crassa OR74A] gi|28916817|gb|EAA26566.1| [Neurospora crassa OR74A]
  misc_feature (6)..(205): NCBI GI: 39953334 Blast Desc: MGG_08821 [Magnaporthe grisea 70-15] gi|145021247|gb|EDK05376.1| MGG_08821 [Magnaporthe grisea 70-15]
  misc_feature (1)..(256): NCBI GI: 154323115 Blast Desc: BC1G_00900 [Botryotinia fuckeliana B05.10] gi|150848234|gb|EDN23427.1| BC1G_00900 [Botryotinia fuckeliana B05.10]
  misc_feature (1)..(230): NCBI GI: 156064505 Blast Desc: SS1G_00260 [Sclerotinia sclerotiorum 1980] gi|154691122|gb|EDN90860.1| SS1G_00260 [Sclerotinia sclerotiorum 1980]
  misc_feature (2)..(201): NCBI GI: 171686740 Blast Desc: protein product [Podospora anserina] gi|170943331|emb|CAP68984.1| protein product [Podospora anserina]
  misc_feature (1)..(201): NCBI GI: 116192107 Blast Desc: CHGG_05771 [Chaetomium globosum CBS 148.51] gi|88181684|gb|EAQ89152.1| CHGG_05771 [Chaetomium globosum CBS 148.51]
  misc_feature (1)..(225): NCBI GI: 226280571 Blast Desc: conserved [Paracoccidioides brasiliensis Pb01]
  misc_feature: Useful for introducing or modulating the production of volatile compounds
MIKRLGTSYIPLVQETLDQLLRIFESTYRIPEARELAYLLTRELLHLSGPTLPKPAVDNLRLLIKCCCRDLQGAAGYLKKPRPQGSDSTQNGQNSKSISQSADAFLPGNVKVDSISISLSAAHIKAAGDLLATLFSRLPQQHIPSSLRSHMVKIAILSRNQNAQVASVLHPAQDRNGRTPQVALPYLIQQFPHDEKVEILRFSFRPLATGTPSDFMQGDDNMDIEEDEEDGNNSMTNNTGSFGQTFNGQFSSSFASPAPAVALRPSIPITEPITQTPFLAQPSETITHSSKTVMMQTSPPPSNSLKRRNEDAMEDTGVSKRVELDTVHISTSGPVRDGDASISTTVTTVQAPAVLPSQAKPDAQNEDEDSDDESIHLNMEMDSDSDDGEDEE

SEQ ID NO: 23523 - DNA, 4428 bp, Muscodor strobelii; identical to SEQ ID NO: 23520
  misc_feature: SGI EST ID NO. CUFF.55324.0
  misc_feature: Variant of the nucleotide sequence at SEQ ID NO 23521

SEQ ID NO: 23524 - DNA, 870 bp, Muscodor strobelii
  misc_feature: SGI cDNA ID NO. 568005
  misc_feature: Encodes the peptide sequence at SEQ ID NO 23525
atgtctttaacacctgcggctgagtctcctcagctccccaagtccccgcagtctcccctgcctgctactactactaccactactcaaagtcccaagtcgcctgcacaggacgctattacagaccatgacgcaaccgcccttaagatatcaaccgatggcaagcagcagaccgctgaagatgccgtgagcagcaattccgacgccacctcagaagacagtcgtagcgaagatggagaagcctctcccgttgccgcggctcctccgctccccagcgagcctgtcccggactcgaagcctgctgcagaagacgatggatgggaatatcactgggacgccaccaaccaggcctactacttccacaaccgcttcacaaatcagtctacctgggagaatccccgtctccagcccgcgaccaaagccgccgccgacacgaatgcgcaactcgagactcctcctgccacagccgtccctccgctgaatgaacgtcccccagctggtggttacaatcctgcgatccacggagactacgacccaaatgcctggtacgccaagcaagatagcgaaaatcaggaaacggacactggcgtcatggaccctgccactgcttacgctgccgtcggcactttcaaccgcttcacgggcggctggcaaggcgccgaccagaatcccgaccgccacaacgacgaggccaagtcacgaagacagatgaactcgttcttcgacgtcgacgccgccgccaacgcccacgacggacgtagtctcaaagccgagcgctctggcaagaaaccctctaaagccgagctgaagcagttcaaagaaaagcgccgggccagaaaggaagagaaacgtcgtgcgtggctgctggattag

SEQ ID NO: 23525 - protein, 289 aa, Muscodor strobelii
  misc_feature: SGI Peptide ID NO. 568005
  misc_feature (102)..(132): Pfam Id: PF00397 Pfam Desc: WW domain
  misc_feature (65)..(289): NCBI GI: 256732834 Blast Desc: NECHADRAFT_79438 [Nectria haematococca mpVI 77-13-4]
  misc_feature (38)..(289): NCBI GI: 261354066 Blast Desc: WW domain-containing protein [Verticillium albo-atrum VaMs.102]
  misc_feature (64)..(289): NCBI GI: 39953342 Blast Desc: MGG_08822 [Magnaporthe grisea 70-15] gi|145021246|gb|EDK05375.1| MGG_08822 [Magnaporthe grisea 70-15]
  misc_feature (86)..(289): NCBI GI: 46124569 Blast Desc: FG06662.1 [Gibberella zeae PH-1]
  misc_feature (86)..(289): NCBI GI: 116192109 Blast Desc: CHGG_05772 [Chaetomium globosum CBS 148.51] gi|88181685|gb|EAQ89153.1| CHGG_05772 [Chaetomium globosum CBS 148.51]
  misc_feature (103)..(289): NCBI GI: 85075688 Blast Desc: NCU00060 [Neurospora crassa OR74A] gi|28916818|gb|EAA26567.1| [Neurospora crassa OR74A]
  misc_feature (28)..(289): NCBI GI: 169780830 Blast Desc: [Aspergillus oryzae RIB40] gi|238504972|ref|XP_002383715.1| WW domain protein [Aspergillus flavus NRRL3357] gi|83773619|dbj|BAE63746.1| protein product WW
  misc_feature (75)..(289): NCBI GI: 121712972 Blast Desc: WW domain protein [Aspergillus clavatus NRRL 1] gi|119402250|gb|EAW12671.1| WW domain protein [Aspergillus clavatus NRRL 1]
  misc_feature (101)..(289): NCBI GI: 255949178 Blast Desc: Pc22g14320 [Penicillium chrysogenum Wisconsin 54-1255] gi|211592373|emb|CAP98720.1| Pc22g14320 [Penicillium chrysogenum Wisconsin 54-1255]
  misc_feature (82)..(289): NCBI GI: 238844253 Blast Desc: WW domain-containing protein [Microsporum canis CBS 113480]
MSLTPAAESPQLPKSPQSPLPATTTTTTQSPKSPAQDAITDHDATALKISTDGKQQTAEDAVSSNSDATSEDSRSEDGEASPVAAAPPLPSEPVPDSKPAAEDDGWEYHWDATNQAYYFHNRFTNQSTWENPRLQPATKAAADTNAQLETPPATAVPPLNERPPAGGYNPAIHGDYDPNAWYAKQDSENQETDTGVMDPATAYAAVGTFNRFTGGWQGADQNPDRHNDEAKSRRQMNSFFDVDAAANAHDGRSLKAERSGKKPSKAELKQFKEKRRARKEEKRRAWLLD

SEQ ID NO: 23526 - DNA, 1272 bp, Muscodor strobelii
  misc_feature: SGI cDNA ID NO. 568006
  misc_feature: Encodes the peptide sequence at SEQ ID NO 23527
atgctcgactccaaggactccaagatgagcttctcggtggttctgactcaagatactccattgtgttgttatctttctacatgcacatatattcttatttccatcccaggaactcttctatctaaggcgataaggccaaattgggctttgggcttcggatgtctgatatgggctgttgcggctgctagcatagctggcactcataacttcgcgtctatcattgttagtcgcctgtttattggtgtaggagaagctatatttggacaggctgtagtacttcactactcgttatggtataaaaaggacgagatcggcgtccgccttgcacttttcatcggtgctggcgtactagctggagcatttgggggtcttatcgcctatggagtctcgttcatccaatcttctcttgatacatggcgtatcctttttttgatcgaaggcttgccctctatactgcttggtatctgtgtcgttctattcttgccctcacgacctgaaacctccaaattcctcacagaggctgagcgagagcttgagctccgacggcttcgctctcaaaatctcgatgagcgcgataatggcattgattggaatggcgttagacgtgcttttactgattggaaatcatatgttatcactttcgtatactcctgtatgcagctcacgctttcgagtttgtccggattttttccaactatcatcagctcactcggatacaaaaacgccgacgcccagctgtatactgtaccgccctatgctgtcgggtttgtcgcaatggtcattgtcacctacttttctgatcgcgctcgcttacgagcgccgttcatcatactggtattttccatcaatgcaatagggtggatactgctactgtccgtcgtcaataatcaacacgttcgatactttgcttgctttctcattgttattggcggttatataaacatcccgctaattcaaagctgggtgtccaataatacaggatctcaaagccagcgagccgtacacctcggattcttgaactcactcgccaactgggccgcactcacgtcccccttcatattccccacaagccaaaaaccaacttggcacttaggcttcggattaaatcttgcgttcagtattgcaggtatcatagttgtattctctatgttcctctactacaagcatgagaacagacgcagagataaaattgaaggaaagccagttccaggccagtttgtcaaccaggcagagctgcacgatcttgcaccgggattcagatacacgccttga

SEQ ID NO: 23527 - protein, 423 aa, Muscodor strobelii
  misc_feature: SGI Peptide ID NO. 568006
  misc_feature (9)..(351): Pfam Id: PF07690 Pfam Desc: Major Facilitator Superfamily
  misc_feature (29)..(351): Pfam Id: PF07690 Pfam Desc: Major Facilitator Superfamily
  misc_feature (1)..(423): NCBI GI: 58261750 Blast Desc: CNM02030 [Cryptococcus neoformans var. neoformans JEC21] gi|134118517|ref|XP_772032.1| CNBM1900 [Cryptococcus neoformans var. neoformans B-3501A] gi|50254638|gb|EAL17385.1|
  misc_feature (1)..(421): NCBI GI: 58267130 Blast Desc: CNE00260 [Cryptococcus neoformans var. neoformans JEC21] gi|58267132|ref|XP_570722.1| CNE00260 [Cryptococcus neoformans var. neoformans JEC21] gi|57226955|gb|AAW43414.1| var.
  misc_feature (1)..(421): NCBI GI: 58267134 Blast Desc: CNE00260 [Cryptococcus neoformans var. neoformans JEC21] gi|57226957|gb|AAW43416.1| CNE00260 [Cryptococcus neoformans var. neoformans JEC21]
  misc_feature (1)..(418): NCBI GI: 134111527 Blast Desc: CNBE0180 [Cryptococcus neoformans var. neoformans B-3501A] gi|50257958|gb|EAL20652.1| CNBE0180 [Cryptococcus neoformans var. neoformans B-3501A]
  misc_feature (29)..(423): NCBI GI: 169851239 Blast Desc: CC1G_07697 [Coprinopsis cinerea okayama7#130] gi|116506576|gb|EAU89471.1| CC1G_07697 [Coprinopsis cinerea okayama7#130]
  misc_feature (29)..(423): NCBI GI: 170099704 Blast Desc: [Laccaria bicolor S238N-H82] gi|164643749|gb|EDR08000.1| [Laccaria bicolor S238N-H82]
  misc_feature (30)..(420): NCBI GI: 258571121 Blast Desc: conserved [Uncinocarpus reesii 1704] gi|237904634|gb|EEP79035.1| conserved [Uncinocarpus reesii 1704]
  misc_feature (30)..(423): NCBI GI: 238839361 Blast Desc: conserved [Microsporum canis CBS 113480]
  misc_feature (69)..(423): NCBI GI: 238579483 Blast Desc: MPER_11850 [Moniliophthora perniciosa FA553] gi|215450944|gb|EEB90002.1| MPER_11850 [Moniliophthora perniciosa FA553]
  misc_feature (30)..(421): NCBI GI: 240109523 Blast Desc: Major Facilitator Superfamily protein [Coccidioides posadasii C735 delta SOWgp]
MLDSKDSKMSFSVVLTQDTPLCCYLSTCTYILISIPGTLLSKAIRPNWALGFGCLIWAVAAASIAGTHNFASIIVSRLFIGVGEAIFGQAVVLHYSLWYKKDEIGVRLALFIGAGVLAGAFGGLIAYGVSFIQSSLDTWRILFLIEGLPSILLGICVVLFLPSRPETSKFLTEAERELELRRLRSQNLDERDNGIDWNGVRRAFTDWKSYVITFVYSCMQLTLSSLSGFFPTIISSLGYKNADAQLYTVPPYAVGFVAMVIVTYFSDRARLRAPFIILVFSINAIGWILLLSVVNNQHVRYFACFLIVIGGYINIPLIQSWVSNNTGSQSQRAVHLGFLNSLANWAALTSPFIFPTSQKPTWHLGFGLNLAFSIAGIIVVFSMFLYYKHENRRRDKIEGKPVPGQFVNQAELHDLAPGFRYTP

SEQ ID NO: 23528 - DNA, 657 bp, Muscodor strobelii
  misc_feature: SGI EST ID NO. CUFF.55341.0
  misc_feature: Variant of the nucleotide sequence at SEQ ID NO 23526
tacttcactactcgttatggtataaaaaggacgagatcggcgtccgccttgcacttttcatcggtgctggcgtactagctggagcatttgggggtcttatcgcctatggagtctcgttcatccaatcttctcttgatacatggcgtatcctttttttgatcgaaggcttgccctctatactgcttggtatctgtgtcgttctattcttgccctcacgacctgaaacctccaaattcctcacagaggctgagcgagagcttgagctccgacggcttcgctctcaaaatctcgatgagcgcgataatggcattgattggaatggcgttagacgtgcttttactgattggaaatcatatgttatcactttcgtatactcctgtatgcagctcacgctttcgagtttgtccggattttttccaactatcatcagctcactcggatacaaaaacgccgacgcccagctgtatactgtaccgccctatgctgtcgggtttgtcgcaatggtcattgtcacctacttttctgatcgcgctcgcttacgagcgccgttcatcatactggtattttccatcaatgcaatagggtggatactgctactgtccgtcgtcaataatcaacacgttcgatactttgcttgctttctcattgttattggcg

SEQ ID NO: 23529 - DNA, 1092 bp, Muscodor strobelii
  misc_feature: SGI cDNA ID NO. 568007
  misc_feature: Elevated expression when VOC is produced
  misc_feature: Encodes the peptide sequence at SEQ ID NO 23530
atgaaatgggtgttcgagaacaggggagccaccaaggttaaattaaaagatctggataaatacaataaacacatcttgcgcaaggtgccgaaagactggaaagactgtcgtcctgccaccgtacggatcaaccgcatcaacccgatcatccttctgagcttaggccgcgacgaaaaaatacttctgcttaaatacctatctaggaagacaatcgaagtagaggtccttgagtgtgtcgtcgaacgaaaaattccccgcaggtctagaaatgggccaatgcctgcagtctataaatatacctcgaaagaaaaggaggtcaagattgacttggcgatcatcatgatctgttcaatagctttcaaaagacctaacaacccattcggactacttataggcgagctcatcggcctgtcagaccccagtaccctccaacggctggcgagatatccctggttgcttccgactcgatgcgccggaataaaagagatggcgcacgcggcggcacgcgtgatcacccagcgccgtcctctcattacgaacacacacggcgatgttctatacggtagcctctcgctctactacctcatgccacctattatcgccacgcaactagatggcctatgggatagtggcagcccagaagcaaatattcccaatgcattactacaaggtctcatgtatctagccaaacactgggatgaaggcgacgataagggcatacagatcggcctagtactcgccgggataagacactgcttcaacactatgcaagagaagaaaagcaagaaatgggataaaagaacgctgggactcaaagtgttggtctcgggacttgcgggcgggtttaacccggcaggcccggcgttcgctgctgcgaggccggctgtcgacgagggtatgcggagatttaaagaagataagatggacaacgtgcagagagactgggattgtatatgggctgatttccagaagcgggttgagacttgtatcgggagggacagtgatcaggaaaaagcttcgtgggagctgtattgttcgaaattgaaggaggttattgatgcaaaaccgcctaggcttaagaagtctacttga

SEQ ID NO: 23530 - protein, 363 aa, Muscodor strobelii
  misc_feature: SGI Peptide ID NO. 568007
  misc_feature: Useful for introducing or modulating the production of volatile compounds
MKWVFENRGATKVKLKDLDKYNKHILRKVPKDWKDCRPATVRINRINPIILLSLGRDEKILLLKYLSRKTIEVEVLECVVERKIPRRSRNGPMPAVYKYTSKEKEVKIDLAIIMICSIAFKRPNNPFGLLIGELIGLSDPSTLQRLARYPWLLPTRCAGIKEMAHAAARVITQRRPLITNTHGDVLYGSLSLYYLMPPIIATQLDGLWDSGSPEANIPNALLQGLMYLAKHWDEGDDKGIQIGLVLAGIRHCFNTMQEKKSKKWDKRTLGLKVLVSGLAGGFNPAGPAFAAARPAVDEGMRRFKEDKMDNVQRDWDCIWADFQKRVETCIGRDSDQEKASWELYCSKLKEVIDAKPPRLKKST

SEQ ID NO: 23531 - DNA, 1711 bp, Muscodor strobelii
  misc_feature: SGI EST ID NO. CUFF.55352.0
  misc_feature: Variant of the nucleotide sequence at SEQ ID NO 23529
tgcgcacttctcttaggcgtgtcagacattacatcttctgtatatatttacatacatataccggaacgcagccttttatgactctactctcatccatcattccagctttccatttacaagttaccgatatacataataacgaaattcctgtattatttgtagctcgtgaatcttacattgtttttttgccattgtcaaaagattttcatcgtttcatacttgatatcagactaaggacttctctcagatactgtcttggccatgccaggaagacgaaacaagcatgattcatcggaaagcaagcatgataagcttaattctgtacagcctcggaactgggaacttcctcgtgattgtaaacccacgatgaaatgggtgttcgagaacaggggagccaccaaggttaaattaaaagatctggataaatacaataaacacatcttgcgcaaggtgccgaaagactggaaagactgtcgtcctgccaccgtacggatcaaccgcatcaacccgatcatccttctgagcttaggccgcgacgaaaaaatacttctgcttaaatacctatctaggaagacaatcgaagtagaggtccttgagtgtgtcgtcgaacgaaaaattccccgcaggtctagaaatgggccaatgcctgcagtctataaatatacctcgaaagaaaaggaggtcaagattgacttggcgatcatcatgatctgttcaatagctttcaaaagacctaacaacccattcggactacttataggcgagctcatcggcctgtcagaccccagtaccctccaacggctggcgagatatccctggttgcttccgactcgatgcgccggaataaaagagatggcgcacgcggcggcacgcgtgatcacccagcgccgtcctctcattacgaacacacacggcgatgttctatacggtagcctctcgctctactacctcatgccacctattatcgccacgcaactagatggcctatgggatagtggcagcccagaagcaaatattcccaatgcattactacaaggtctcatgtatctagccaaacactgggatgaaggcgacgataagggcatacagatcggcctagtactcgccgggataagacactgcttcaacactatgcaagagaagaaaagcaagaaatgggataaaagaacgctgggactcaaagtgttggtctcgggacttgcgggcgggtttaacccggcaggcccggcgttcgctgctgcgaggccggctgtcgacgagggtatgcggagatttaaagaagataagatggacaacgtgcagagagactgggattgtatatgggctgatttccagaagcgggttgagacttgtatcgggagggacagtgatcaggaaaaagcttcgtgggagctgtattgttcgaaattgaaggaggttattgatgcaaaaccgcctaggcttaagaagtctacttgataacttgaagaattaaagagatcgaggggagaggagagaaaggcaaaaacagattagactatccaattcgaatatctttcagtgctggtaccaatacaggtcacacgagtaattctcgcctggtgttagcgatagaaataatcttctttgataaataaagagcacaccttatgccatacttgatcttttgctgtgccattacaaactcctccttactgatggcggacaaccagaccagcaatgtatagctagg

SEQ ID NO: 23532 - DNA, 819 bp, Muscodor strobelii
  misc_feature: SGI cDNA ID NO. 568008
  misc_feature: Elevated expression when VOC is produced
  misc_feature: Encodes the peptide sequence at SEQ ID NO 23533
atgggtgcagaggcttctgtacccacagatccgacccgcagggtccgagtcatctcatctgggttctcgaggaccggaactgtttctatgtccttagccttaggaaagctgctcgacgggcctgtacttcatggaggcacccaaatatttcatcgagacgatgaatggctcaagacatggctgaaggtttatgagtcgaggcgtaatggagacaaagaagaaacattgaagcttatccgcatggtgactgcaggcttcgatgccgtggcagatgcaccaccaaacgactttattccagagttagtcgagctgtaccctgactctaaagtcatacttgtcaagcgggatcctgagaaatggtggaagagcatttcggctgttatgaccatggctgcaccatggtggttgagtgtcgtaatggcaccgatccccggatggaggcacgttccaacccttggcaacgagtacagtcgcacttttatggcattggcaggcatggaaccaggcaagggcaccgttgctgatcttgccaaacgaggtggtcctcatatgctacaggcacatatggacatggtacggagagtagttcccaagcacaggttactagaatacgacctcagtgagggctgggaacctctttgcaaattcttgaaagtgccagttccaaatgagccctttccaagggcaaatgatgccaatgcagcggaagagtatagcaggacggtattgttgaaagtcgctcaggtctggctaggtattttctcggcactcggcctcactatctatgggacactctggctgtggcggaacgtgttatga

SEQ ID NO: 23533 - protein, 272 aa, Muscodor strobelii
  misc_feature: SGI Peptide ID NO. 568008
  misc_feature (1)..(250): NCBI GI: 145601239 Blast Desc: MGG_08722 [Magnaporthe grisea 70-15] gi|145009265|gb|EDJ93976.1| MGG_08722 [Magnaporthe grisea 70-15]
  misc_feature (1)..(259): NCBI GI: 238497233 Blast Desc: NAD dependent epimerase/dehydratase, [Aspergillus flavus NRRL3357] gi|220694732|gb|EED51076.1| NAD dependent epimerase/dehydratase, [Aspergillus flavus NRRL3357]
  misc_feature (1)..(259): NCBI GI: 169774259 Blast Desc: [Aspergillus oryzae RIB40] gi|83769460|dbj|BAE59595.1| protein product [Aspergillus oryzae]
  misc_feature (1)..(270): NCBI GI: 145234771 Blast Desc: An03g01320 [Aspergillus niger] gi|134057707|emb|CAK38105.1| protein product [Aspergillus niger]
  misc_feature (1)..(245): NCBI GI: 145246676 Blast Desc: An12g05170 [Aspergillus niger] gi|134080308|emb|CAK46230.1| protein product [Aspergillus niger]
  misc_feature (1)..(265): NCBI GI: 256728385 Blast Desc: NECHADRAFT_54291 [Nectria haematococca mpVI 77-13-4]
  misc_feature (1)..(240): NCBI GI: 145247056 Blast Desc: An12g07240 [Aspergillus niger] gi|134080504|emb|CAK46352.1| protein product [Aspergillus niger]
  misc_feature (1)..(269): NCBI GI: 255941500 Blast Desc: Pc16g12200 [Penicillium chrysogenum Wisconsin 54-1255] gi|211586142|emb|CAP93890.1| Pc16g12200 [Penicillium chrysogenum Wisconsin 54-1255]
  misc_feature (1)..(268): NCBI GI: 169772381 Blast Desc: [Aspergillus oryzae RIB40] gi|83768520|dbj|BAE58657.1| protein product [Aspergillus oryzae]
  misc_feature (1)..(268): NCBI GI: 238490282 Blast Desc: NAD dependent epimerase/dehydratase, [Aspergillus flavus NRRL3357] gi|220696791|gb|EED53132.1| NAD dependent epimerase/dehydratase, [Aspergillus flavus NRRL3357]
  misc_feature: Useful for introducing or modulating the production of volatile compounds
MGAEASVPTDPTRRVRVISSGFSRTGTVSMSLALGKLLDGPVLHGGTQIFHRDDEWLKTWLKVYESRRNGDKEETLKLIRMVTAGFDAVADAPPNDFIPELVELYPDSKVILVKRDPEKWWKSISAVMTMAAPWWLSVVMAPIPGWRHVPTLGNEYSRTFMALAGMEPGKGTVADLAKRGGPHMLQAHMDMVRRVVPKHRLLEYDLSEGWEPLCKFLKVPVPNEPFPRANDANAAEEYSRTVLLKVAQVWLGIFSALGLTIYGTLWLWRNVL

SEQ ID NO: 23534 - DNA, 2607 bp, Muscodor strobelii
  misc_feature: SGI EST ID NO. CUFF.55373.1
  misc_feature: Variant of the nucleotide sequence at SEQ ID NO 23532
ggaattttaacctttcattccggttggctattctagagctatatctggtcactacgttcaatccagaggcatacacatacgtcaatgttatcacaaacttggtctagacgtgagactttctcgctgaagaagcccaactggtactaatcactacattgcaatatgactcactcagtttgctcataaattgcagggctccgacaagcctgatcctccactgcaaatagcaatgtagcgcgctccccaatcgttcaaagtgatctcctctagacgcatactcagggaatcaatggtttttttcgctaggcgtctttcgatattggtctattgagactctgacgacgagctcgaacaccccgtgccatccttcagctttcttgatttgccagcatgaggtgcggggctgtgttggctgcctgcctatcatcctgcacggcatgaatgtaacataataacacttccaaggtcaataggatcatcacaacgaaagagcgagccattcgaagacgattgcaaacaccatctcttatgctgttacttgaccattcccaattgacattttatcgcgatggaaaatttcaagcagaccccgaactgggttcgaataatcctcattgtgttgacagttgcatcatttgtgcctcaaatatatcgggttatcaagttgcgagacagccgaggcatctcactcctaggtgtattcctatacacgattagctttaccgagcaactggtttttgcaatcatatatcgattctataatgaaccatacggggcagcagacgcggagaaatggtgtgactttttccagtgcttagtccaatgggtttgcatatcagccttctttgtagctgtcatgcgctggtccacacatcatcgtaacatgagtgaagccctaactacgctttacggtgtatttctggtgtttgcgatcgtcccaataatcactcccttgttggtatggccaatgaaggccgaaccagttttccaagtattaatagtggtacacatgttttacgtcggtccattcgttacgatcatcggcctcggatttgccgtgtttaaacaagcgcgtttgatagctacgcttgggactggtccatcgcaaacgtcagtgagcactgcagggctcgcattacaagccgctgtgtttgctcttctggcgatgagctggcaatggagaggcatgcggctgagcgaagaatacgatttcctagaatggtatttgtctgttgggtgggaacttgtccacaatgcgctttatgcaatagggcaagttatcatcttagcagtagctgtcaagcgggacagcggagcgggaactagcgaggatttagagatcgcggcagagactgaacccttgttacgaaaccaggctaccgctggccaaccgttgaacgagtcgcgatgacacccacacgtcggtatgtatgtaagggcaaatggctacacatacgattaccagccctccgagaacttaaatacaaatcatcaaggggctctgtcccactcgacttcaacattttcggtcgcagttttgataggtaattgaggactaataagggaaaggaagctgttcctagtcacgcgacccggtaatgcccagtctccatccaatcgtgaggcgggtccataccgccatttcgcgaaacatgtgatatgttcattcgattctgtcatctcagatcgcataatggcctttgttatgtcttgttgtaattatcgcttgtaatttttcattctcctaaaagatgggtgcagaggcttctgtacccacagatccgacccgcagggtccgagtcatctcatctgggttctcgaggaccggaactgtttctatgtccttagccttaggaaagctgctcgacgggcctgtacttcatggaggcacccaaatatttcatcgagacgatgaatggctcaagacatggctgaaggtttatgagtcgaggcgtaatggagacaaagaagaaacattgaagcttatccgcatggtgactgcaggcttcgatgccgtggcagatgcaccaccaaacgactttattccagagttagtcgagctgtaccctgactctaaagtcatacttgtcaagcgggatcctgagaaatggtggaagagcatttcggctgttatgaccatggctgcaccatggtggttgagtgtcgtaatggcaccgatccccggatggaggcacgttccaacccttggcaacgagtacagtcgcacttttatggcattggcaggcatggaaccaggcaagggcaccgttgctgatcttgccaaacgaggtggtcctcatatgctacaggcacatatggacatggtacggagagtagttcccaagcacaggttactagaatacgacctcagtgagggctgggaacctctttgcaaattcttgaaagtgccagttccaaatgagccctttccaagggcaaatgatgccaatgcagcggaagagtatagcaggacggtattgttgaaagtcgctcaggtctggctaggtattttctcggcactcggcctcactatctatgggacactctggctgtggcggaacgtgttatgatgaatagatcagctagaaattcaaaaatgctaaaata

SEQ ID NO: 23535 - DNA, 843 bp, Muscodor strobelii
  misc_feature: SGI cDNA ID NO. 568009
  misc_feature: Encodes the peptide sequence at SEQ ID NO 23536
atggaaaatttcaagcagaccccgaactgggttcgaataatcctcattgtgttgacagttgcatcatttgtgcctcaaatatatcgggttatcaagttgcgagacagccgaggcatctcactcctaggtgtattcctatacacgattagctttaccgagcaactggtttttgcaatcatatatcgattctataatgaaccatacggggcagcagacgcggagaaatggtgtgactttttccagtgcttagtccaatgggtttgcatatcagccttctttgtagctgtcatgcgctggtccacacatcatcgtaacatgagtgaagccctaactacgctttacggtgtatttctggtgtttgcgatcgtcccaataatcactcccttgttggtatggccaatgaaggccgaaccagttttccaagtattaatagtggtacacatgttttacgtcggtccattcgttacgatcatcggcctcggatttgccgtgtttaaacaagcgcgtttgatagctacgcttgggactggtccatcgcaaacgtcagtgagcactgcagggctcgcattacaagccgctgtgtttgctcttctggcgatgagctggcaatggagaggcatgcggctgagcgaagaatacgatttcctagaatggtatttgtctgttgggtgggaacttgtccacaatgcgctttatgcaatagggcaagttatcatcttagcagtagctgtcaagcgggacagcggagcgggaactagcgaggatttagagatcgcggcagagactgaacccttgttacgaaaccaggctaccgctggccaaccgttgaacgagtcgcgatga

SEQ ID NO: 23536 - protein, 280 aa, Muscodor strobelii
  misc_feature: SGI Peptide ID NO. 568009
  misc_feature (14)..(269): NCBI GI: 145252080 Blast Desc: An16g02400 [Aspergillus niger] gi|134083096|emb|CAL00464.1| protein product [Aspergillus niger]
  misc_feature (6)..(267): NCBI GI: 169604368 Blast Desc: SNOG_05196 [Phaeosphaeria nodorum SN15] gi|160706550|gb|EAT87587.2| SNOG_05196 [Phaeosphaeria nodorum SN15]
  misc_feature (14)..(273): NCBI GI: 115385429 Blast Desc: [Aspergillus terreus NIH2624] gi|114187708|gb|EAU29408.1| [Aspergillus terreus NIH2624]
  misc_feature (14)..(273): NCBI GI: 4959944 Blast Desc: [Aspergillus terreus]
  misc_feature (4)..(268): NCBI GI: 169765846 Blast Desc: [Aspergillus oryzae RIB40] gi|83765249|dbj|BAE55392.1| protein product [Aspergillus oryzae]
  misc_feature (9)..(269): NCBI GI: 242821773 Blast Desc: conserved [Talaromyces stipitatus ATCC 10500] gi|218712669|gb|EED12094.1| conserved [Talaromyces stipitatus ATCC 10500]
  misc_feature (17)..(266): NCBI GI: 169762984 Blast Desc: [Aspergillus oryzae RIB40] gi|83770420|dbj|BAE60553.1| protein product [Aspergillus oryzae]
  misc_feature (14)..(246): NCBI GI: 171691456 Blast Desc: protein product [Podospora anserina] gi|170945676|emb|CAP71789.1| protein product [Podospora anserina]
MENFKQTPNWVRIILIVLTVASFVPQIYRVIKLRDSRGISLLGVFLYTISFTEQLVFAIIYRFYNEPYGAADAEKWCDFFQCLVQWVCISAFFVAVMRWSTHHRNMSEALTTLYGVFLVFAIVPIITPLLVWPMKAEPVFQVLIVVHMFYVGPFVTIIGLGFAVFKQARLIATLGTGPSQTSVSTAGLALQAAVFALLAMSWQWRGMRLSEEYDFLEWYLSVGWELVHNALYAIGQVIILAVAVKRDSGAGTSEDLEIAAETEPLLRNQATAGQPLNESR

SEQ ID NO: 23537 - DNA, 2607 bp, Muscodor strobelii; identical to SEQ ID NO: 23534
  misc_feature: SGI EST ID NO. CUFF.55373.1
  misc_feature: Variant of the nucleotide sequence at SEQ ID NO 23535

SEQ ID NO: 23538 - DNA, 1053 bp, Muscodor strobelii
  misc_feature: SGI cDNA ID NO. 568010
  misc_feature: Reduced expression when VOC is produced
  misc_feature: Encodes the peptide sequence at SEQ ID NO 23539
atgtccgctccgggcagcggagtccccacaccggcgccggacatttggcgtgtctcacatgagtctatcggactcaaagttcgaaagtggaaggcacaccgtaataaccaccagaagacgtcaagtcgaaagtttcctgttgtgagaaagtattgcaagatggataccgctagcattttccgagtcgatggcatggtcgcagccataagcggcgggcacacaggcatcggtttaatgatggccaagggtttggtgggtgcaggagcaaaaaaggtctatcttctgggccgacgcaaggaagttctcgaagaggcagccaaagcgcatgcaaacctccagccccttttctgcgacgttgggtcgaaagaatcgctccaaacagcagtagatgtcgtggccaaggaggtcggatatcttaatttactgatagcaaattcaggaatcgtggggcccgaggttcgttggaacccacaatcaagcgcagcagatatccggaaacgactttttgaggacgtgaaaatggaggatttcacgcaaaccatgcatgttaatgtcacgggagcgtatttcacgttcctggctttcatcgaactactggatgctggtaataagaacgcactgaagggcggatttggcgcgccccttacccccggcagcgatgtgccctcggtgcagagccaggtcatcttcacaagttcaatatcagcttatagtagagcgttcctctcggcgcctgcgtacgctggtagcaaggctgctattgcacatttggcaaagcacgcgagcacgaattcggcgcctctgggaatacgggcaaatgctcttgctcctggccttttcccaagtgagcttgcgcaaggtctaataggctctcgcgaccccgccaaagaaggacccgacgaattgcggttcatcccagcacgccgctttggtggcgacgaagagatggcggggacggttctgtacttagcaagccgagcgggtgcttattgcaacggtctagtgctcgtccatgatggcgggaaattggctactatgccctcagaatactga

SEQ ID NO: 23539 - protein, 350 aa, Muscodor strobelii
  misc_feature: SGI Peptide ID NO. 568010
  misc_feature (65)..(266): Pfam Id: PF00106 Pfam Desc: short chain dehydrogenase
  misc_feature (65)..(188): Pfam Id: PF00106 Pfam Desc: short chain dehydrogenase
  misc_feature (52)..(350): NCBI GI: 116179138 Blast Desc: CHGG_00197 [Chaetomium globosum CBS 148.51] gi|88184494|gb|EAQ91962.1| CHGG_00197 [Chaetomium globosum CBS 148.51]
  misc_feature (59)..(350): NCBI GI: 39942668 Blast Desc: MGG_03414 [Magnaporthe grisea 70-15] gi|145010047|gb|EDJ94703.1| MGG_03414 [Magnaporthe grisea 70-15]
  misc_feature (58)..(350): NCBI GI: 85083242 Blast Desc: NCU05094 [Neurospora crassa OR74A] gi|28881379|emb|CAD70420.1| related to gluconate 5-dehydrogenase [Neurospora crassa] gi|28918165|gb|EAA27844.1| conserved crassa
  misc_feature (53)..(350): NCBI GI: 171684627 Blast Desc: protein product [Podospora anserina] gi|170942274|emb|CAP67926.1| protein product [Podospora anserina]
  misc_feature (56)..(350): NCBI GI: 256729314 Blast Desc: NECHADRAFT_95809 [Nectria haematococca mpVI 77-13-4]
  misc_feature (53)..(350): NCBI GI: 169765484 Blast Desc: [Aspergillus oryzae RIB40] gi|83765068|dbj|BAE55211.1| protein product [Aspergillus oryzae]
  misc_feature (57)..(350): NCBI GI: 154312001 Blast Desc: BC1G_06034 [Botryotinia fuckeliana B05.10] gi|150850684|gb|EDN25877.1| BC1G_06034 [Botryotinia fuckeliana B05.10]
  misc_feature (54)..(350): NCBI GI: 189205264 Blast Desc: short chain dehydrogenase/reductase [Pyrenophora tritici-repentis Pt-1C-BFP] gi|187986066|gb|EDU51554.1| short chain dehydrogenase/reductase [Pyrenophora tritici-repentis
  misc_feature (54)..(350): NCBI GI: 212534714 Blast Desc: short-chain dehydrogenase, [Penicillium marneffei ATCC 18224] gi|210069912|gb|EEA24002.1| short-chain dehydrogenase, [Penicillium marneffei ATCC 18224]
  misc_feature (54)..(350): NCBI GI: 242792187 Blast Desc: short chain dehydrogenase/reductase family [Talaromyces stipitatus ATCC 10500] gi|218718490|gb|EED17910.1| short chain dehydrogenase/reductase family [Talaromyces ATCC
  misc_feature (54)..(341): SWISSPROT Homolog: EC 1.1.1.69 Gluconate 5-dehydrogenase
  misc_feature: Useful for introducing or modulating the production of volatile compounds
MSAPGSGVPTPAPDIWRVSHESIGLKVRKWKAHRNNHQKTSSRKFPVVRKYCKMDTASIFRVDGMVAAISGGHTGIGLMMAKGLVGAGAKKVYLLGRRKEVLEEAAKAHANLQPLFCDVGSKESLQTAVDVVAKEVGYLNLLIANSGIVGPEVRWNPQSSAADIRKRLFEDVKMEDFTQTMHVNVTGAYFTFLAFIELLDAGNKNALKGGFGAPLTPGSDVPSVQSQVIFTSSISAYSRAFLSAPAYAGSKAAIAHLAKHASTNSAPLGIRANALAPGLFPSELAQGLIGSRDPAKEGPDELRFIPARRFGGDEEMAGTVLYLASRAGAYCNGLVLVHDGGKLATMPSEY

SEQ ID NO: 23540 - DNA, 2469 bp, Muscodor strobelii
  misc_feature: SGI EST ID NO. CUFF.55635.0
  misc_feature: Variant of the nucleotide sequence at SEQ ID NO 23538
ggcgtcattgactttatttcttcctccagccatattccctgggcgtcttgtgtatctcctagtctacaatcaaatactattccagactcaaagttcgaaagtggaaggcacaccgtaataaccaccagaagacgtcaagtcgaaagtttcctgttgtgagaaagtattgcaagatggataccgctagcattttccgagtcgatggcatggtcgcagccataagcggcgggcacacaggcatcggtttaatgatggccaagggtttggtgggtgcaggagcaaaaaaggtctatcttctgggccgacgcaaggaagttctcgaagaggcagccaaagcgcatgcaaacctccagccccttttctgcgacgttgggtcgaaagaatcgctccaaacagcagtagatgtcgtggccaaggaggtcggatatcttaatttactgatagcaaattcaggaatcgtggggcccgaggttcgttggaacccacaatcaagcgcagcagatatccggaaacgactttttgaggacgtgaaaatggaggatttcacgcaaaccatgcatgttaatgtcacgggagcgtatttcacgttcctggctttcatcgaactactggatgctggtaataagaacgcactgaagggcggatttggcgcgccccttacccccggcagcgatgtgccctcggtgcagagccaggtcatcttcacaagttcaatatcagcttatagtagagcgttcctctcggcgcctgcgtacgctggtagcaaggctgctattgcacatttggcaaagcacgcgagcacgaattcggcgcctctgggaatacgggcaaatgctcttgctcctggccttttcccaagtgagcttgcgcaaggtctaataggctctcgcgaccccgccaaagaaggacccgacgaattgcggttcatcccagcacgccgctttggtggcgacgaagagatggcggggacggttctgtacttagcaagccgagcgggtgcttattgcaacggtctagtgctcgtccatgatggcgggaaattggctactatgccctcagaatactgatggggtgttgtgttcacggtatacgaatgcagcttcaagataaggtttcgagagcttcccatgtaaaggactatcaattgaaactagtagaatacagtgtcaatggagtagaagaaaagcagtagtctagtccattgcagcgttaggcatcaaattacgcggtgccttcggaatatacaacaaaaaccatcaagcatagatcctgtgctagctcatctagatggaagtgggcaagcagattgtctcgccgatgaccaaccgatcgcaatctgaaccctcgttctcatggaggatcatctccagcggtacagaatgatcctctccaatctgccaacaagtgtcgtccttcttgatttggtagggtgtctggtcatcgttgcaagtcctgacgagcttgtcgtcgcccttagaaccgccactcgagataaaccagaaaacaagtagcaagaagagaccgacgagcaaggtccacgagagcaaaggcgagacttcacttcgccaagatgcagatccgacgggagcgctgccattcagaggctgggcggcactactctcttcctcgtcgtcgtagggaggtagtgatatggtcacaggacgaagctgcccataacgatttcctggagcgctctcccacagcttaccctcagcatcgcggaatgtgtaaacttgtgtgtcggcatcgtaaccaattcgcgtgaaaccctcgggcaagcgctcggcatcggtatcgtattcagaccagcgagacattgtgtagatcgtttcgttcgccgcgaaaagatggacttggaggttgacgaactgcctgatcgagattcagggtgtcagagtttaagggatccggctgtggttcaggtgtacttagtagtggagccggtgtggacttggctgagctaagtagaggtgtggtaatgtggtaatgtactgaaagcacctagtgcggcagcaaaggcgaagaaacaattcctgacgtatgatgtgttacaggcagagtttggtagaggtgatgtacagtaacaatgaaaacagatcccaaatgaacagagaataggtaatcaatggcgagctggcgaggaacgcgatcaggtttcggagggtcggtacggcggcctgaaactactccgccacaccacaaagaaggggatgggactcacgtcatagcgagtcagtcctagagagtgtatgccttacttcataccagtaaccaagcagaatatctcgataaggtactcataccatttttcataagatgctgatggtagaccttcgtttgcaaaattcaataccatcaaagttttagcagaatgatgcaggtaatttttatatactcgacgtacctagcttaattcggccttactgcttcaatgattatcaactttgggcttatgtaagactaccaggc

SEQ ID NO: 23541 - DNA, 534 bp, Muscodor strobelii
  misc_feature: SGI cDNA ID NO. 568011
  misc_feature: Encodes the peptide sequence at SEQ ID NO 23542
atgtctcgctggtctgaatacgataccgatgccgagcgcttgcccgagggtttcacgcgaattggttacgatgccgacacacaagtttacacattccgcgatgctgagggtaagctgtgggagagcgctccaggaaatcgttatgggcagcttcgtcctgtgaccatatcactacctccctacgacgacgaggaagagagtagtgccgcccagcctctgaatggcagcgctcccgtcggatctgcatcttggcgaagtgaagtctcgcctttgctctcgtggaccttgctcgtcggtctcttcttgctacttgttttctggtttatctcgagtggcggttctaagggcgacgacaagctcgtcaggacttgcaacgatgaccagacaccctaccaaatcaagaaggacgacacttgttggcagattggagaggatcattctgtaccgctggagatgatcctccatgagaacgagggttcagattgcgatcggttggtcatcggcgagacaatctgcttgcccacttccatctag

SEQ ID NO: 23542 - protein, 177 aa, Muscodor strobelii
  misc_feature: SGI Peptide ID NO. 568011
  misc_feature (131)..(174): Pfam Id: PF01476 Pfam Desc: LysM domain
  misc_feature (1)..(174): NCBI GI: 256725017 Blast Desc: NECHADRAFT_66955 [Nectria haematococca mpVI 77-13-4]
  misc_feature (1)..(174): NCBI GI: 261355407 Blast Desc: conserved [Verticillium albo-atrum VaMs.102]
  misc_feature (1)..(174): NCBI GI: 46110705 Blast Desc: FG02234.1 [Gibberella zeae PH-1]
  misc_feature (1)..(175): NCBI GI: 169623146 Blast Desc: SNOG_14804 [Phaeosphaeria nodorum SN15] gi|111056876|gb|EAT77996.1| SNOG_14804 [Phaeosphaeria nodorum SN15]
  misc_feature (1)..(174): NCBI GI: 169845485 Blast Desc: [Coprinopsis cinerea okayama7#130] gi|116509527|gb|EAU92422.1| [Coprinopsis cinerea okayama7#130]
  misc_feature (1)..(135): NCBI GI: 145602652 Blast Desc: MGG_09548 [Magnaporthe grisea 70-15] gi|145011051|gb|EDJ95707.1| MGG_09548 [Magnaporthe grisea 70-15]
  misc_feature (1)..(109): NCBI GI: 189188020 Blast Desc: conserved [Pyrenophora tritici-repentis Pt-1C-BFP] gi|187971955|gb|EDU39454.1| conserved [Pyrenophora tritici-repentis Pt-1C-BFP]
  misc_feature (1)..(59): NCBI GI: 28881208 Blast Desc: [Neurospora crassa]
  misc_feature (1)..(59): NCBI GI: 116208246 Blast Desc: CHGG_03416 [Chaetomium globosum CBS 148.51] gi|88184013|gb|EAQ91481.1| CHGG_03416 [Chaetomium globosum CBS 148.51]
  misc_feature (1)..(54): NCBI GI: 169862476 Blast Desc: [Coprinopsis cinerea okayama7#130] gi|116501070|gb|EAU83965.1| [Coprinopsis cinerea okayama7#130]
MSRWSEYDTDAERLPEGFTRIGYDADTQVYTFRDAEGKLWESAPGNRYGQLRPVTISLPPYDDEEESSAAQPLNGSAPVGSASWRSEVSPLLSWTLLVGLFLLLVFWFISSGGSKGDDKLVRTCNDDQTPYQIKKDDTCWQIGEDHSVPLEMILHENEGSDCDRLVIGETICLPTSI

SEQ ID NO: 23543 - DNA, 1887 bp, Muscodor strobelii
  misc_feature: SGI cDNA ID NO. 568012
  misc_feature: Encodes the peptide sequence at SEQ ID NO 23544
atgggcgccagagccaaatcattacacgacctcaaaaagcaatctctagctgtagatttcattgacaaccatgcacacggataccatgctgcattcgttgaccctcctacgcagttcaactctgagctcggtgaataccgaccgcagaatgttgtctcctggatgacagccccacgcactgctcattgcagtcgcatcaatcgaccagaccctcattggaatggcatggacttctgggaacaaatattcccgctagccatgcaccaattcatgtctgttcatgttcaagaaccaaaacgccgggctgagagcgggtttagcattcgaaaatcgaaaatttgggaagctgtgttttcgacccttcaaaatgccctagcaaagtacgaaacagttaatggtatacgggggaacatgaagaaaaagtttcgaggcgttatggcacacatccagcctctagaacaagtcgtggctctgatacctgacgtggactatatttctccagtcatcggtacgatcgagatcatcataaaggcagcaaagagatcaatcgatgtgcgcgaagacgtaactgcaggactagactctctcgcagagcattttggagacatagacacatatctcaagattttcccaaacgatcgcaacattgtgagagcttcggtgacgttggtttcatctattttcaaaacaattgaagacatcatcgggtacttccttagtcgctcagcatcaaaagcagtatcagctctcttcaatggagcagagtatcaaagggaattaacagacagcctcgaaagcatcaagcagagtggctcaaatctccttcatcaggcaaatagctcgaatatatggcaaaaccagcaatctctgcgtatagctcaagataattcatctacactcgatgacatggcgaaaaaacaacagaaaattgccgatactcagaatgagatgaaaagttttcttgatcaacttttggaaaatatggcaaatacccaacgtcagaaagaggagttagagcgtattgtccaaaagcagaatgcttgtcttgctttacaagccaccacgaattacaacatcgacgtgggctccgtgatacaacaaagaccgctatcaggtccgacccactcagaaatattgacgtacttagactttccagatctcgtcacaatcgactttgcatatgtgcttgggaagaagcagtcgatgtctactcaagaccgctcacgcgctgagagagtgatcataagccgcgggttccgatcttggatagtagcaccgagttctcaaaagttactagtacacggagactttagtgggacttgttacgtttctggtctatctcttctttgttgtagtctcattcaagcactttccgaaagagagagactttacagcatagcatatttctgcggtcgacatctcgataggaccgactctcacagtggtgctctaggactgatcaacagcatgctgtcacagctaattcagcatggtctactcgacactagcacgtccttgatacagacgacagactgggagagtattaagaatggctcacttatgcattcttgctctcttttcgaatcaattttgcaacacctgccttcaaatctggtcatcgtatgcatgatcgatggcatgaagtactacgaaagagatcaatacgtcaacgatgtgaggaatgtgctcagctttttgttaagtctcgctcaggccggcagactgcaatgcgtctttaaaatcctcattacgagccctcaaccgactacagtcatacgacatgcttttgaagaagattgcattatctcgatggcatcattgcctgcaactcttgaggcaccgaacccctcacgggttatgcgcaatcttgagagggacttggcatga

SEQ ID NO: 23544 - protein, 628 aa, Muscodor strobelii
  misc_feature: SGI Peptide ID NO. 568012
  misc_feature (55)..(557): NCBI GI: 116194348 Blast Desc: CHGG_03772 [Chaetomium globosum CBS 148.51] gi|88179685|gb|EAQ87153.1| CHGG_03772 [Chaetomium globosum CBS 148.51]
  misc_feature (1)..(589): NCBI GI: 256721944 Blast Desc: NECHADRAFT_78308 [Nectria haematococca mpVI 77-13-4]
  misc_feature (17)..(619): NCBI GI: 169620734 Blast Desc: SNOG_13571 [Phaeosphaeria nodorum SN15] gi|111057898|gb|EAT79018.1| SNOG_13571 [Phaeosphaeria nodorum SN15]
  misc_feature (87)..(628): NCBI GI: 154302113 Blast Desc: [Botryotinia fuckeliana B05.10] gi|150855511|gb|EDN30703.1| [Botryotinia fuckeliana B05.10]
  misc_feature (86)..(587): NCBI GI: 189206646 Blast Desc: conserved [Pyrenophora tritici-repentis Pt-1C-BFP] gi|187975750|gb|EDU42376.1| conserved [Pyrenophora tritici-repentis Pt-1C-BFP]
  misc_feature (107)..(608): NCBI GI: 225680864 Blast Desc: [Paracoccidioides brasiliensis Pb03]
  misc_feature (83)..(585): NCBI GI: 212544005 Blast Desc: conserved [Penicillium marneffei ATCC 18224] gi|210067064|gb|EEA21157.1| conserved [Penicillium marneffei ATCC 18224]
  misc_feature (104)..(609): NCBI GI: 171690694 Blast Desc: protein product [Podospora anserina] gi|170945295|emb|CAP71407.1| protein product [Podospora anserina]
  misc_feature (130)..(597): NCBI GI: 67522266 Blast Desc: AN1590.2 [Aspergillus nidulans FGSC A4] gi|40745141|gb|EAA64297.1| AN1590.2 [Aspergillus nidulans FGSC A4] gi|259486921|tpe|CBF85173.1| TPA: conserved [Aspergillus FGSC
  misc_feature (71)..(291): NCBI GI: 85094974 Blast Desc: NCU06129 [Neurospora crassa OR74A] gi|28921449|gb|EAA30755.1| [Neurospora crassa OR74A]
MGARAKSLHDLKKQSLAVDFIDNHAHGYHAAFVDPPTQFNSELGEYRPQNVVSWMTAPRTAHCSRINRPDPHWNGMDFWEQIFPLAMHQFMSVHVQEPKRRAESGFSIRKSKIWEAVFSTLQNALAKYETVNGIRGNMKKKFRGVMAHIQPLEQVVALIPDVDYISPVIGTIEIIIKAAKRSIDVREDVTAGLDSLAEHFGDIDTYLKIFPNDRNIVRASVTLVSSIFKTIEDIIGYFLSRSASKAVSALFNGAEYQRELTDSLESIKQSGSNLLHQANSSNIWQNQQSLRIAQDNSSTLDDMAKKQQKIADTQNEMKSFLDQLLENMANTQRQKEELERIVQKQNACLALQATTNYNIDVGSVIQQRPLSGPTHSEILTYLDFPDLVTIDFAYVLGKKQSMSTQDRSRAERVIISRGFRSWIVAPSSQKLLVHGDFSGTCYVSGLSLLCCSLIQALSERERLYSIAYFCGRHLDRTDSHSGALGLINSMLSQLIQHGLLDTSTSLIQTTDWESIKNGSLMHSCSLFESILQHLPSNLVIVCMIDGMKYYERDQYVNDVRNVLSFLLSLAQAGRLQCVFKILITSPQPTTVIRHAFEEDCIISMASLPATLEAPNPSRVMRNLERDLA

SEQ ID NO: 23545 - DNA, 3630 bp, Muscodor strobelii
  misc_feature: SGI cDNA ID NO. 568013
  misc_feature: Elevated expression when VOC is produced
  misc_feature: Encodes the peptide sequence at SEQ ID NO 23546
atggcgcacccaaaaaagactcgttcacgtgaggaggacatggccacccaggaggcagcaacttcagccgagacggagattgggaacagagccaaagtcagcatcaaagatagaggacaagaatccagaggagactcggcaagcgtggatttggcctcacttgcccggaggacagacgtgaagtcaaaccgtcgctcaccaataatcatcaatccccgatacatttctcatgatgcttcgtccgaaaattgggactcggagtcagaaaatgcattcttatcgctcgaggatgtgccagttccccaagacacgcaaacccgggcggcggcggcttctaagctgatagctgagatcaatttggtgtctcgtctgaagtacgtcgaactcagaaagtatctgtcacgtactggacctcagaatctctattcaggcctggaatcacccgcaagacatcatcaggccgagcgaaatctaacggaggacgaagaagaaatatcagaaagacgcgggcggttggtgatcagcccagaagtatcccaatcccaattcgtggaaccgcgagaaagaaatagttcaaaaaatgagaacaccaacaagtccagacagaagaaacctacgaaaggcggtgcgaacgatctgtgccaagacgagagtgatactaaaaagcccaatgaaagcgtcaccgtacatacagtttatgctattgacgtcttggtagacgaatccgaaacagttctggatgaacaggcgggaaatggacacgcaaagccgtctcatgccgcagacggtgatatattagattgtgataatcagactagccgagaaggccgcaacaaacagggtgcaagtaggccgccagagcgcatacggatcaattcccaatacataatgatgcaattgacgttggacgggtctcattcactatctcgagagcctcgtaccttcatacgaccctaccacagtctcttgtttcatgaagagcagctaagagcaaagtgcgcgaagcagcaggagagatgtgcaaaaacatctatcggcgagtctgtatcatcagagatttcacttcagccaaatccacagagctcggctcgcgcagaagaccaaatatacacagataatcaaaatttcgaggagctctcgcgtgatcgataccgactcaagctacttcaatgccttctccaattcatagacgcctatgtttcacctcgaatcaactacgtaaggggcgttcattgcaaacgaatttatttcgacgacctacaatatctcttcaaatcaggagattacatgattatgccaactgagaaaccgttatacgacattcaagtagtacaattactctctgtccatggggttcgacacaggtcaactacaggctccgagtaccgcgactccacggcaaaacgaattccatgcatcgttcattgtataacgattgattttgatggaaagcaaattggaccgcgcacaggcgcgtttcaaatcccttattttgaaggagaaaagcttgtaacatcactcccgatatttcctatcaatcgtctcatggacacggactatcagcaaactcttactcaaaatcgacttggtttcttagctcataagggccaacatgagatcacacaaactctcattgacagaggtaaaaagttcttcagtttgactgagaccaaacacatgcacttcaatggactcacaggatacggcgaagagcttgactgtccgactatcatcgacttcgaggaagcgtatgcaagtcttcactcccaggcgcatccgttagtaagtggcaatcgagcgtttcaggccgaggtgcctcgaatagacagccttgtcggatggcgtccaccaggtgaaaagtatcctgaacggtgcttcggtagttgctgtaatggcgataatgttgacgacgatagatggattgacgccgcgaacgctgatcgctatatggagagtctggaaataaagattcattcgagactaccatctctaatcattcatccacgttggcgacaggaagcagatgccgaagagaaccgtatcgtagaccaagagtatttgctcatgccttggttcgcgtatggcttcgtatttcggctccgaagtttcaggcccttgagtgttttctggctcacccccatcagagacgagcaccctaatccaagcacgaaaactgttcatacttccacttataaagaagcatttgatcagctagtgcttccgccaggtcacaaggacatggtgaaatcattgattgcacagcacttcagagataagaattctccagtcgccaaagaagatcaatgggatatgattcgtggcaaagacggagctccaggagtgggaaaaactacgactgcagaatgcgttgccgattactttaggcgcccactatttcaaatgacatgtggtgaccttggaatgtgggccgagcaggtagaagatgcgcttcaagagacgtttggactagcgtcgagatgggggtgtattctgcttctagacgaggccgatgtgtttctatctgcacggactccaacagatcttctaagaaacagtctcgtctcggtttttctaagggtgatggaatactattctggcatactattcctcactactaaccgcgtaggagattttgatgaagcattcgcctcccggatccatatgagtctttactatcccccgttggatcttcaggctacaacatctattttggatcttaacctggagcgactacaaagaagattcgacagcagaaaattgaaacttaacattgctaagacaaatatactcgtctctgcaacgtcacactggcacaactacccagaagcgagatggaatggtcgccagatccgtaatgcatgtcagactgccctagctttagcagaattcgaagcacgaggaggagaccacgaggcgatactcgagcctaacgctgttgttagtctggaggtcaaacacttcaacacagtaacccggtcatatcttggctttatgcagtacatgacagacatctacggcgtcaattttgacgcgagagccaaggaaaactttctgcgagcagctaatggaacatctgaagtcgacaatgctcccaacccattattattcccgaatcagcagcgtacaaatccatcaattccaaatttcaacagtagtcctcgcacatggaacccggcgccgaacaccactggatcctcattcccgccacctccctttgtccagccgagtaatatgcaaatgcacacaaatatgccgggtgcgtcgatgcatccgcaatattcccaaagtcatttggcaacgcaacaagcgcatcaaatgccagccatgagtttctcacagcaaccattcgcaactgatccacgtctccaagctgccaactatccccaaactgcccagtcaggtgtccctcagacgacggcgccgcttcagcacacagtcccgatattttcacagggcgcaggacagatgttgccacagacgacttcgccgcctgctgcgccgaattcccaagctccaaattacccagaaacagcgcatgtctggacccaaccggcccaaatggcatctatgcatggctatacggggccatcaaaccccggcgatgctaatagaggacaggggatgcagtag

SEQ ID NO: 23546 - protein, 1209 aa, Muscodor strobelii
  misc_feature: SGI Peptide ID NO. 568013
  misc_feature (777)..(963): Pfam Id: PF00004 Pfam Desc: ATPase family associated with various cellular activities (AAA)
  misc_feature (777)..(911): Pfam Id: PF00004 Pfam Desc: ATPase family associated with various cellular activities (AAA)
  misc_feature (314)..(1199): NCBI GI: 171678727 Blast Desc: protein product [Podospora anserina] gi|170937433|emb|CAP62091.1| protein product [Podospora anserina]
  misc_feature (286)..(1024): NCBI GI: 169620738 Blast Desc: SNOG_13573 [Phaeosphaeria nodorum SN15] gi|160704095|gb|EAT79020.2| SNOG_13573 [Phaeosphaeria nodorum SN15]
  misc_feature (226)..(1020): NCBI GI: 116201315 Blast Desc: CHGG_08542 [Chaetomium globosum CBS 148.51] gi|88177060|gb|EAQ84528.1| CHGG_08542 [Chaetomium globosum CBS 148.51]
  misc_feature (281)..(913): NCBI GI: 256721915 Blast Desc: NECHADRAFT_78309 [Nectria haematococca mpVI 77-13-4]
  misc_feature (286)..(1007): NCBI GI: 225562337 Blast Desc: conserved [Ajellomyces capsulatus G186AR]
  misc_feature (286)..(1010): NCBI GI: 154279082 Blast Desc: [Ajellomyces capsulatus NAm1] gi|150412297|gb|EDN07684.1| [Ajellomyces capsulatus NAm1]
  misc_feature (286)..(1006): NCBI GI: 171690692 Blast Desc: protein product [Podospora anserina] gi|170945294|emb|CAP71406.1| protein product [Podospora anserina]
  misc_feature (286)..(975): NCBI GI: 240281176 Blast Desc: conserved [Ajellomyces capsulatus H143]
  misc_feature (286)..(1007): NCBI GI: 226282273 Blast Desc: conserved [Paracoccidioides brasiliensis Pb01]
  misc_feature (256)..(1007): NCBI GI: 225680865 Blast Desc: conserved [Paracoccidioides brasiliensis Pb03]
  misc_feature: Useful for introducing or modulating the production of volatile compounds
MAHPKKTRSREEDMATQEAATSAETEIGNRAKVSIKDRGQESRGDSASVDLASLARRTDVKSNRRSPIIINPRYISHDASSENWDSESENAFLSLEDVPVPQDTQTRAAAASKLIAEINLVSRLKYVELRKYLSRTGPQNLYSGLESPARHHQAERNLTEDEEEISERRGRLVISPEVSQSQFVEPRERNSSKNENTNKSRQKKPTKGGANDLCQDESDTKKPNESVTVHTVYAIDVLVDESETVLDEQAGNGHAKPSHAADGDILDCDNQTSREGRNKQGASRPPERIRINSQYIMMQLTLDGSHSLSREPRTFIRPYHSLLFHEEQLRAKCAKQQERCAKTSIGESVSSEISLQPNPQSSARAEDQIYTDNQNFEELSRDRYRLKLLQCLLQFIDAYVSPRINYVRGVHCKRIYFDDLQYLFKSGDYMIMPTEKPLYDIQVVQLLSVHGVRHRSTTGSEYRDSTAKRIPCIVHCITIDFDGKQIGPRTGAFQIPYFEGEKLVTSLPIFPINRLMDTDYQQTLTQNRLGFLAHKGQHEITQTLIDRGKKFFSLTETKHMHFNGLTGYGEELDCPTIIDFEEAYASLHSQAHPLVSGNRAFQAEVPRIDSLVGWRPPGEKYPERCFGSCCNGDNVDDDRWIDAANADRYMESLEIKIHSRLPSLIIHPRWRQEADAEENRIVDQEYLLMPWFAYGFVFRLRSFRPLSVFWLTPIRDEHPNPSTKTVHTSTYKEAFDQLVLPPGHKDMVKSLIAQHFRDKNSPVAKEDQWDMIRGKDGAPGVGKTTTAECVADYFRRPLFQMTCGDLGMWAEQVEDALQETFGLASRWGCILLLDEADVFLSARTPTDLLRNSLVSVFLRVMEYYSGILFLTTNRVGDFDEAFASRIHMSLYYPPLDLQATTSILDLNLERLQRRFDSRKLKLNIAKTNILVSATSHWHNYPEARWNGRQIRNACQTALALAEFEARGGDHEAILEPNAVVSLEVKHFNTVTRSYLGFMQYMTDIYGVNFDARAKENFLRAANGTSEVDNAPNPLLFPNQQRTNPSIPNFNSSPRTWNPAPNTTGSSFPPPPFVQPSNMQMHTNMPGASMHPQYSQSHLATQQAHQMPAMSFSQQPFATDPRLQAANYPQTAQSGVPQTTAPLQHTVPIFSQGAGQMLPQTTSPPAAPNSQAPNYPETAHVWTQPAQMASMHGYTGPSNPGDANRGQGMQ

SEQ ID NO: 23547 - DNA, 4399 bp, Muscodor strobelii
  misc_feature: SGI EST ID NO. CUFF.55430.0
  misc_feature: Variant of the nucleotide sequence at SEQ ID NO 23545
cgacattcaagtagtacaattactctctgtccatggggttcgacacaggtcaactacaggctccgagtaccgcgactccacggcaaaacgaattccatgcatcgttcattgtataacgattgattttgatggaaagcaaattggaccgcgcacaggcgcgtttcaaatcccttattttgaaggagaaaagcttgtaacatcactcccgatatttcctatcaatcgtctcatggacacggactatcagcaaactcttactcaaaatcgacttggtttcttagctcataagggccaacatgagatcacacaaactctcattgacagaggtaaaaagttcttcagtttgactgagaccaaacacatgcacttcaatggactcacaggatacggcgaagagcttgactgtccgactatcatcgacttcgaggaagcgtatgcaagtcttcactcccaggcgcatccgttagtaagtggcaatcgagcgtttcaggccgaggtgcctcgaatagacagccttgtcggatggcgtccaccaggtgaaaagtatcctgaacggtgcttcggtagttgctgtaatggcgataatgttgacgacgatagatggattgacgccgcgaacgctgatcgctatatggagagtctggaaataaagattcattcgagactaccatctctaatcattcatccacgttggcgacaggaagcagatgccgaagagaaccgtatcgtagaccaagagtatttgctcatgccttggttcgcgtatggcttcgtatttcggctccgaagtttcaggcccttgagtgttttctggctcacccccatcagagacgagcaccctaatccaagcacgaaaactgttcatacttccacttataaagaagcatttgatcagctagtgcttccgccaggtcacaaggacatggtgaaatcattgattgcacagcacttcagagataagaattctccagtcgccaaagaagatcaatgggatatgattcgtggcaaaggtaattcttcgcacttgactatttctgctagacctagctaaacattgcactacaggcaaaggcttagttatacttcttcacggagctccaggagtgggaaaaactacgactgcagaatgcgttgccgattactttaggcgcccactatttcaaatgacatgtggtgaccttggaatgtgggccgagcaggtagaagatgcgcttcaagagacgtttggactagcgtcgagatgggggtgtattctgcttctagacgaggccgatgtgtttctatctgcacggactccaacagatcttctaagaaacagtctcgtctcggtttttctaagggtgatggaatactattctggcatactattcctcactactaaccgcgtaggagattttgatgaagcattcgcctcccggatccatatgagtctttactatcccccgttggatcttcaggctacaacatctattttggatcttaacctggagcgactacaaagaagattcgacagcagaaaattgaaacttaacattgctaagacaaatatactcgtctctgcaacgtcacactggcacaactacccagaagcgagatggaatggtcgccagatccgtaatgcatgtcagactgccctagctttagcagaattcgaagcacgaggaggagaccacgaggcgatactcgagcctaacgctgttgttagtctggaggtcaaacacttcaacacagtaacccggtcatatcttggctttatgcagtacatgacagacatctacggcgtcaattttgacgcgagagccaaggaaaactttctgcgagcagctaatggaacatctgaagtcgacaatgctcccaacccattattattcccgaatcagcagcgtacaaatccatcaattccaaatttcaacagtagtcctcgcacatggaacccggcgccgaacaccactggatcctcattcccgccacctccctttgtccagccgagtaatatgcaaatgcacacaaatatgccgggtgcgtcgatgcatccgcaatattcccaaagtcatttggcaacgcaacaagcgcatcaaatgccagccatgagtttctcacagcaaccattcgcaactgatccacgtctccaagctgccaactatccccaaactgcccagtcaggtgtccctcagacgacggcgccgcttcagcacacagtcccgatattttcacagggcgcaggacagatgttgccacagacgacttcgccgcctgctgcgccgaattcccaagctccaaattacccagaaacagcgcatgtctggacccaaccggcccaaatggcatctatgcatggctatacggggccatcaaaccccggcgatgctaatagaggacaggggatgcagtagaaatttagtttctcccgttcctgccaaaatgctgagatcaggcacccacaagtcgcggcgggtatggggacgtcgaagtttatgtcaagtgatatatgaaagcggggatgatcgtgatcgaagacttagttgctgagagaattatcagaggagaataactgaagaattgcattttttacgtaatctacatatgttcttcgcgaaataaatcctattgaaattttagatccaagaggcagtgaatcttctaattcttagctatgctctccactcaactcagcacacgcgtcctctcaccctcgatcccacactcaagcagcaacagaggatgaaatttaaatcgaggatcgcgacccagttcatagagcgtcttcaaacgctccgccaactccgtataccccttccctcgtacctgaccctgttccacagcatcggagtacttcccgagcatcgatgcgcagatcacaatacgcgcacagatagcaaagacctggggtttcgaagaccatcccaacggcccgtcttctccctccttgctagatgtgatctttgtgagcgtgtctatacctgctaaagtccaggcagccaaagaatcgactaccttgccgtccgtattctcagattccgccggagagccaggtgttggagctagtgaattagagaaaagcggtacaaacacacttgcccaccgtctcgcctcttgtacctcgtctatgtactgattatgctcttcgatgacgaacagcgagtcatcaaagcgcattgctgcttctagttgcgctgctacgagaatccattgcctatcttcaatttcgctcccaggaccgttggtaaaaaggctggaaaaagaggatgcaccaaagttatgtcctatcatgcgctcaacgacgtgtagtttgaaatccggcacatttgcaaaggttttagcgagccattgcaatagacggagggcggcttctgtcggtactagcgcgaggccaattatcggggtcgctgcaagagctgctgcctctctgacttcgatgtcgtcctcggtgagagcgtcgtagagggcgatgagccaagggagatggtccatggacagctgcgtatcgctgtccttgactttgccaagctgtacagtcacagataaggagtttatagcttcgacggcggctatcctggtgtcgaaggtctatgtaattagttagttccacccaaaaagcgaatcattcaataagttggtgttacgatggatgaatataatatcactcactctgtctgcaaacccagcgtcactcatcattgtactccagcctctcaaatattgtccaagacgatcatcgacatatccttgattctgcatgagtgctgcagcgacaagtggtccgctaacgcgaacgatagcgtccgacaggctagggttcatcgcatttacttgcaggtcttgccacagagcagaaagtatctcttctgtcgcgagagcgtcgagattatcattcttcccaagagagcttaaaataacatctaacagagatgcgagattctccaaagcaagtgttatggcttctggtgccttcgttacacgaacaacgcggaagtatgtttttgcgaggcttatgcgcattgcgtgtgtagacgggttttcatagtccgatattgcttcgagcattgcacatgcgacgtttgtatctgtagcaagagcaggtagcaattctgcaatcaagttgccgatttcgacgtcgtctgctcttctcaaagattgctgcacgaatgtttccccgtttcgtatttttagtaaagcaactggtgcttgattctgctcttgtgattcttcgaaagtctgatatgaggtcgcaaaaaaagaccggttgagtagaagactttcgtgggcattttgctttggactcaacttggcgatgaagttgagaatatcgacatatacagcctgtgcttctgtacatgtatgaagagagtcgtgtgacgacgacaactgctccattagtctacagagacttgagatagtt

SEQ ID NO: 23548 - DNA, 993 bp, Muscodor strobelii
  misc_feature: SGI cDNA ID NO. 568014
  misc_feature: Encodes the peptide sequence at SEQ ID NO 23549
atggcgactaccatagcatcggttcagctacccgatgttgcagacaagtccttcaaccagaagacagcagtcacatggatagagcagcagtctgaagaactgcatcagtccttagtcgaacacatattcagagagcttcttgtcatagcttcaaaaccaaaacagctttctggtagcgcatgtagcaagctctgcggtttcgccgaaaactgttccaaatccaagtcaaatttgctgaaagattttgcattttccgaggagattgtgaggagactgttcgatttcttcatcgagtggaatgaacaagacgctcacagatcaatgcgattagtccttgactatgtcgttttagccattagactgaatccagatccggcaatagggaatttaatcagaaccaccatcttgaatgagaccatttccgtcatcaccctagaggcttcgaaaccctccaccaaatcctccatgattgcactcgaccatctcattcagaccaaggttgtatacctaggggaagttttatcgcactaccaaagtattatgaaaagtgttatgagtcatgatgctggctgggatacttttgtctctcgagtctttgcatggatggacttgcagaatgtatggacagctgcaggaaagcttcttgctacgattttcacacagccctggtacgaagacagcaaagattttaagcataacccggatatctggcatgagttcatatcaaaagcgttgaaaacaaatcctgagttgcttgaacctatcaaagtctatcttctcatacccttgtgcaaagcagatccagctgccgctctcgtatatttggacaagttgactaagacccagagactcacggccaacgatacccaaggctggaacctggacgctatgttatgggtggctatgcttgaagccgggaagaaaaccggcattatcggcgatccagagaatggtaaggacccctccgctcgcagtcggtacagacaatattaa

SEQ ID NO: 23549 - protein, 330 aa, Muscodor strobelii
  misc_feature: SGI Peptide ID NO. 568014
  misc_feature (13)..(318): NCBI GI: 46125095 Blast Desc: FG06925.1 [Gibberella zeae PH-1]
  misc_feature (9)..(315): NCBI GI: 145614230 Blast Desc: MGG_08884 [Magnaporthe grisea 70-15] gi|145021173|gb|EDK05302.1| MGG_08884 [Magnaporthe grisea 70-15]
  misc_feature (26)..(314): NCBI GI: 156033255 Blast Desc: SS1G_13703 [Sclerotinia sclerotiorum 1980] gi|154699106|gb|EDN98844.1| SS1G_13703 [Sclerotinia sclerotiorum 1980]
  misc_feature (19)..(325): NCBI GI: 85084173 Blast Desc: NCU00372 [Neurospora crassa OR74A] gi|28918347|gb|EAA28022.1| NCU00372 [Neurospora crassa OR74A]
  misc_feature (19)..(322): NCBI GI: 171685894 Blast Desc: protein product [Podospora anserina] gi|170942908|emb|CAP68561.1| protein product [Podospora anserina]
  misc_feature (1)..(314): NCBI GI: 154294144 Blast Desc: BC1G_14142 [Botryotinia fuckeliana B05.10] gi|150845079|gb|EDN20272.1| BC1G_14142 [Botryotinia fuckeliana B05.10]
  misc_feature (6)..(322): NCBI GI: 261358186 Blast Desc: conserved [Verticillium albo-atrum VaMs.102]
  misc_feature (45)..(322): NCBI GI: 116207334 Blast Desc: CHGG_02960 [Chaetomium globosum CBS 148.51] gi|88183557|gb|EAQ91025.1| CHGG_02960 [Chaetomium globosum CBS 148.51]
  misc_feature (51)..(323): NCBI GI: 242783686 Blast Desc: HEAT repeat protein [Talaromyces stipitatus ATCC 10500] gi|218720383|gb|EED19802.1| HEAT repeat protein [Talaromyces stipitatus ATCC 10500]
  misc_feature (59)..(312): NCBI GI: 169772491 Blast Desc: [Aspergillus oryzae RIB40] gi|83768575|dbj|BAE58712.1| protein product [Aspergillus oryzae]
MATTIASVQLPDVADKSFNQKTAVTWIEQQSEELHQSLVEHIFRELLVIASKPKQLSGSACSKLCGFAENCSKSKSNLLKDFAFSEEIVRRLFDFFIEWNEQDAHRSMRLVLDYVVLAIRLNPDPAIGNLIRTTILNETISVITLEASKPSTKSSMIALDHLIQTKVVYLGEVLSHYQSIMKSVMSHDAGWDTFVSRVFAWMDLQNVWTAAGKLLATIFTQPWYEDSKDFKHNPDIWHEFISKALKTNPELLEPIKVYLLIPLCKADPAAALVYLDKLTKTQRLTANDTQGWNLDAMLWVAMLEAGKKTGIIGDPENGKDPSARSRYRQY

SEQ ID NO: 23550 - DNA, 1126 bp, Muscodor strobelii
  misc_feature: SGI EST ID NO. CUFF.55376.0
  misc_feature: Variant of the nucleotide sequence at SEQ ID NO 23548
gccacacttgggaatatctcttggcacttataaccctccatgagaagcaattgatgctccttttcaatgggttatgttgagtataatttcagcaagatttctgctctctttgaataactaatgatttcaaatgttatcggttttatggatgtgttatttacatatgcactcatagaacttcatccgccactaccacactcctccgcacatcttctatgacattgcatcagtatggcgactaccatagcatcggttcagctacccgatgttgcagacaagtccttcaaccagaagacagcagtcacatggatagagcagcagtctgaagaactgcatcagtccttagtcgaacacatattcagagagcttcttgtcatagcttcaaaaccaaaacagctttctggtagcgcatgtagcaagctctgcggtttcgccgaaaactgttccaaatccaagtcaaatttgctgaaagattttgcattttccgaggagattgtgaggagactgttcgatttcttcatcgagtggaatgaacaagacgctcacagatcaatgcgattagtccttgactatgtcgttttagccattagactgaatccagatccggcaatagggaatttaatcagaaccaccatcttgaatgagaccatttccgtcatcaccctagaggcttcgaaaccctccaccaaatcctccatgattgcactcgaccatctcattcagaccaaggttgtatacctaggggaagttttatcgcactaccaaagtattatgaaaagtgttatgagtcatgatgctggctgggatacttttgtctctcgagtctttgcatggatggacttgcagaatgtatggacagctgcaggaaagcttcttgctacgattttcacacagccctggtacgaagacagcaaagattttaagcataacccggatatctggcatgagttcatatcaaaagcgttgaaaacaaatcctgagttgcttgaacctatcaaagtctatcttctcatacccttgtgcaaagcagatccagctgccgctctcgtatatttggacaagttgactaagacccagagactcacggccaacgatacccaaggctggaacctggacgctatgttat

SEQ ID NO: 23551 - DNA, 4527 bp, Muscodor strobelii
  misc_feature: SGI cDNA ID NO. 568015
  misc_feature: Encodes the peptide sequence at SEQ ID NO 23552
atggcgactaccatagcatcggttcagctacccgatgttgcagacaagtccttcaaccagaagacagcagtcacatggatagagcagcagtctgaagaactgcatcagtccttagtcgaacacatattcagagagcttcttgtcatagcttcaaaaccaaaacagctttctggtagcgcatgtagcaagctctgcggtttcgccgaaaactgttccaaatccaagtcaaatttgctgaaagattttgcattttccgaggagattgtgaggagactgttcgatttcttcatcgagtggaatgaacaagacgctcacagatcaatgcgattagtccttgactatgtcgttttagccattagactgaatccagatccggcaatagggaatttaatcagaaccaccatcttgaatgagaccatttccgtcatcaccctagaggcttcgaaaccctccaccaaatcctccatgattgcactcgaccatctcattcagaccaaggttgtatacctaggggaagttttatcgcactaccaaagtattatgaaaagtgttatgagtcatgatgctggctgggatacttttgtctctcgagtctttgcatggatggacttgcagaatgtatggacagctgcaggaaagcttcttgctacgattttcacacagccctggtacgaagacagcaaagattttaagcataacccggatatctggcatgagttcatatcaaaagcgttgaaaacaaatcctgagttgcttgaacctatcaaagtctatcttctcatacccttgtgcaaagcagatccagctgccgctctcgtatatttggacaagttgactaagacccagagactcacggccaacgatacccaaggctggaacctggacgctatgttatgggtggctatgcttgaagccgggaagaaaaccggcattatcggcgatccagagaatggcaatgcaaagcgtgtaaatctcacaaatcagctacctgagggtgtgatagatattgtcctctgccatcagtccacagaagcccgtgcctctggcctatctattctcctcgcctccccttctacatcaaaaccttttgcgtcagagacattgaggcttttggagagacatttacctgctttctaccaagactgtgacccaaagattaggtacgaagtgcttggtcactcaagaaatatgattcaacggctccatgctgcaattgatgcactgcgcagagatttgtctcgcttgtccaaaaaagccaagaatcctacgttgccaggacatgagtcaggcacaatctctagagaagcgagtggcagttccaatttgccaattccaactgagagggaagataaaggaagaattctaaataatattctgcgtgagcatgaagaattcaccgactggtatatagggttcctcaaggacgagctcactccaaccgcctcttaccagcggcacataacttcgttgaaagcaatgacctatttcctcaaatcagccattggcccgggcgactcaattcctaccacgcaatggctaagaagcctaatggttgatagcgattggtccagacttgtacttgatctaattatggatccgtatgacgatgtaagggaaattgctgcatcgctgatgatgcaagttcaatgtggcccaacaatgtctgggtctcctgagcttcaatttcaacacagtacaccttatcaggaactccagaatttttgccagcgggcgaatgaactcgcacagaagacggcccgcgctgatcattgtgatggcgctgcaagatgtcaagaactgctctatcgatggagtccgaggtttgagcaagcagcgaaagtgccagcattgatactcaatggtcttgagaggaagttatgcgcagctgaaaataatctcgccgctgcggttctacatgcccctgtgcatggcgattttgcatctttgaggtatatctggagtgctctcacaggcgtcaagcacactgaaaattctcttctcgtgccttcaatgccgactaaaaccggagacgagacaaacttgctggaagaatggtacaagggcggtttggattgtatatacaatcaagcctcgacgacacgaaggtcggcgggtatccctgccatcatcgtgggcatcctggcttctagagccaagagtccatcattcggagaggtaatggcaaaactacaggaaattggacgtgaaccagcttatgtagctcaaacggatggatctaatttgtcccaagttcacgctctaaactgcctaaaagacgttttcaagacctcattcttgagtcaccacgcagagccctatttaacagattgcttgcagttagcagcccaaagcctgcaatcagagatgtgggcaatacgaaattgcgggttgctattgttacgaagtctgatagacaaccttttcggaacgagtgagagcaaagccacgacggaggccggttgggacggacgaaccatcaagatctcttatcacaaatacaaagcattgcccgaactactaatgagtcttcttgatataggaaaggaatcagccggtatggtgatgggaacaaacacggctgaagcggtatttccagcacttgacatcattcgtcgcgccggaccaccggaaggatatcgagataaactgtataacagtgtgtcattctacttagggagtagaatctggcatgtaagagagattgcggctcggacgttgtgctcgttgcttttggtcccgacttggtttggagcgatcgagtctcttgttaatgagcccaagagctccgcaaacaaattgcatggagcattgctaacagtgaagttcttgctcgaaaggctacaccaagtttcgtccgaacaactgaacagtaaaactatctcaagtctctgtagactaatggagcagttgtcgtcgtcacacgactctcttcatacatgtacagaagcacaggctgtatatgtcgatattctcaacttcatcgccaagttgagtccaaagcaaaatgcccacgaaagtcttctactcaaccggtctttttttgcgacctcatatcagactttcgaagaatcacaagagcagaatcaagcaccagttgctttactaaaaatacgaaacggggaaacattcgtgcagcaatctttgagaagagcagacgacgtcgaaatcggcaacttgattgcagaattgctacctgctcttgctacagatacaaacgtcgcatgtgcaatgctcgaagcaatatcggactatgaaaacccgtctacacacgcaatgcgcataagcctcgcaaaaacatacttccgcgttgttcgtgtaacgaaggcaccagaagccataacacttgctttggagaatctcgcatctctgttagatgttattttaagctctcttgggaagaatgataatctcgacgctctcgcgacagaagagatactttctgctctgtggcaagacctgcaagtaaatgcgatgaaccctagcctgtcggacgctatcgttcgcgttagcggaccacttgtcgctgcagcactcatgcagaatcaaggatatgtcgatgatcgtcttggacaatatttgagaggctggagtacaatgatgagtgacgctgggtttgcagacagaaccttcgacaccaggatagccgccgtcgaagctataaactccttatctgtgactgtacagcttggcaaagtcaaggacagcgatacgcagctgtccatggaccatctcccttggctcatcgccctctacgacgctctcaccgaggacgacatcgaagtcagagaggcagcagctcttgcagcgaccccgataattggcctcgcgctagtaccgacagaagccgccctccgtctattgcaatggctcgctaaaacctttgcaaatgtgccggatttcaaactacacgtcgttgagcgcatgataggacataactttggtgcatcctctttttccagcctttttaccaacggtcctgggagcgaaattgaagataggcaatggattctcgtagcagcgcaactagaagcagcaatgcgctttgatgactcgctgttcgtcatcgaagagcataatcagtacatagacgaggtacaagaggcgagacggtgggcaagtgtgtttgtaccgcttttctctaattcactagctccaacacctggctctccggcggaatctgagaatacggacggcaaggtagtcgattctttggctgcctggactttagcaggtatagacacgctcacaaagatcacatctagcaaggagggagaagacgggccgttgggatggtcttcgaaaccccaggtctttgctatctgtgcgcgtattgtgatctgcgcatcgatgctcgggaagtactccgatgctgtggaacagggtcaggtacgagggaaggggtatacggagttggcggagcgtttgaagacgctctatgaactgggtcgcgatcctcgatttaaatttcatcctctgttgctgcttgagtgtgggatcgagggtgagaggacgcgtgtgctgagttga

SEQ ID NO: 23552 - protein, 1508 aa, Muscodor strobelii
  misc_feature: SGI Peptide ID NO. 568015
  misc_feature (9)..(1455): NCBI GI: 145614230 Blast Desc: MGG_08884 [Magnaporthe grisea 70-15] gi|145021173|gb|EDK05302.1| MGG_08884 [Magnaporthe grisea 70-15]
  misc_feature (6)..(1443): NCBI GI: 261358186 Blast Desc: conserved [Verticillium albo-atrum VaMs.102]
  misc_feature (26)..(1494): NCBI GI: 156033255 Blast Desc: SS1G_13703 [Sclerotinia sclerotiorum 1980] gi|154699106|gb|EDN98844.1| SS1G_13703 [Sclerotinia sclerotiorum 1980]
  misc_feature (377)..(1494): NCBI GI: 154294144 Blast Desc: BC1G_14142 [Botryotinia fuckeliana B05.10] gi|150845079|gb|EDN20272.1| BC1G_14142 [Botryotinia fuckeliana B05.10]
  misc_feature (668)..(1447): NCBI GI: 85084173 Blast Desc: NCU00372 [Neurospora crassa OR74A] gi|28918347|gb|EAA28022.1| NCU00372 [Neurospora crassa OR74A]
  misc_feature (677)..(1487): NCBI GI: 116207334 Blast Desc: CHGG_02960 [Chaetomium globosum CBS 148.51] gi|88183557|gb|EAQ91025.1| CHGG_02960 [Chaetomium globosum CBS 148.51]
  misc_feature (680)..(1453): NCBI GI: 256732700 Blast Desc: [Nectria haematococca mpVI 77-13-4]
  misc_feature (679)..(1454): NCBI GI: 46125095 Blast Desc: FG06925.1 [Gibberella zeae PH-1]
  misc_feature (644)..(1448): NCBI GI: 171685894 Blast Desc: protein product [Podospora anserina] gi|170942908|emb|CAP68561.1| protein product [Podospora anserina]
  misc_feature (13)..(666): NCBI GI: 46125095 Blast Desc: FG06925.1 [Gibberella zeae PH-1]
MATTIASVQLPDVADKSFNQKTAVTWIEQQSEELHQSLVEHIFRELLVIASKPKQLSGSACSKLCGFAENCSKSKSNLLKDFAFSEEIVRRLFDFFIEWNEQDAHRSMRLVLDYVVLAIRLNPDPAIGNLIRTTILNETISVITLEASKPSTKSSMIALDHLIQTKVVYLGEVLSHYQSIMKSVMSHDAGWDTFVSRVFAWMDLQNVWTAAGKLLATIFTQPWYEDSKDFKHNPDIWHEFISKALKTNPELLEPIKVYLLIPLCKADPAAALVYLDKLTKTQRLTANDTQGWNLDAMLWVAMLEAGKKTGIIGDPENGNAKRVNLTNQLPEGVIDIVLCHQSTEARASGLSILLASPSTSKPFASETLRLLERHLPAFYQDCDPKIRYEVLGHSRNMIQRLHAAIDALRRDLSRLSKKAKNPTLPGHESGTISREASGSSNLPIPTEREDKGRILNNILREHEEFTDWYIGFLKDELTPTASYQRHITSLKAMTYFLKSAIGPGDSIPTTQWLRSLMVDSDWSRLVLDLIMDPYDDVREIAASLMMQVQCGPTMSGSPELQFQHSTPYQELQNFCQRANELAQKTARADHCDGAARCQELLYRWSPRFEQAAKVPALILNGLERKLCAAENNLAAAVLHAPVHGDFASLRYIWSALTGVKHTENSLLVPSMPTKTGDETNLLEEWYKGGLDCIYNQASTTRRSAGIPAIIVGILASRAKSPSFGEVMAKLQEIGREPAYVAQTDGSNLSQVHALNCLKDVFKTSFLSHHAEPYLTDCLQLAAQSLQSEMWAIRNCGLLLLRSLIDNLFGTSESKATTEAGWDGRTIKISYHKYKALPELLMSLLDIGKESAGMVMGTNTAEAVFPALDIIRRAGPPEGYRDKLYNSVSFYLGSRIWHVREIAARTLCSLLLVPTWFGAIESLVNEPKSSANKLHGALLTVKFLLERLHQVSSEQLNSKTISSLCRLMEQLSSSHDSLHTCTEAQAVYVDILNFIAKLSPKQNAHESLLLNRSFFATSYQTFEESQEQNQAPVALLKIRNGETFVQQSLRRADDVEIGNLIAELLPALATDTNVACAMLEAISDYENPSTHAMRISLAKTYFRVVRVTKAPEAITLALENLASLLDVILSSLGKNDNLDALATEEILSALWQDLQVNAMNPSLSDAIVRVSGPLVAAALMQNQGYVDDRLGQYLRGWSTMMSDAGFADRTFDTRIAAVEAINSLSVTVQLGKVKDSDTQLSMDHLPWLIALYDALTEDDIEVREAAALAATPIIGLALVPTEAALRLLQWLAKTFANVPDFKLHVVERMIGHNFGASSFSSLFTNGPGSEIEDRQWILVAAQLEAAMRFDDSLFVIEEHNQYIDEVQEARRWASVFVPLFSNSLAPTPGSPAESENTDGKVVDSLAAWTLAGIDTLTKITSSKEGEDGPLGWSSKPQVFAICARIVICASMLGKYSDAVEQGQVRGKGYTELAERLKTLYELGRDPRFKFHPLLLLECGIEGERTRVLS

SEQ ID NO: 23553 - DNA, 5085 bp, Muscodor strobelii
  misc_feature: SGI EST ID NO. CUFF.55431.1
  misc_feature: Variant of the nucleotide sequence at SEQ ID NO 23551
tatgattcaacggctccatgctgcaattgatgcactgcgcagagatttgtctcgcttgtccaaaaaagccaagaatcctacgttgccaggacatgagtcaggcacaatctctagagaagcgagtggcagttccaatttgccaattccaactgagagggaagataaaggaagaattctaaataatattctgcgtgagcatgaagaattcaccgactggtatatagggttcctcaaggacgagctcactccaaccgcctcttaccagcggcacataacttcgttgaaagcaatgacctatttcctcaaatcagccattggcccgggcgactcaattcctaccacgcaatggctaagaagcctaatggttgatagcgattggtccagacttgtacttgatctaattatggatccgtatgacgatgtaagggaaattgctgcatcgctgatgatgcaagttcaatgtggcccaacaatgtctgggtctcctgagcttcaatttcaacacagtacaccttatcaggaactccagaatttttgccagcgggcgaatgaactcgcacagaagacggcccgcgctgatcattgtgatggcgctgcaagatgtcaagaactgctctatcgatggagtccgaggtttgagcaagcagcgaaagtgccagcattgatactcaatggtcttgagaggaagttatgcgcagctgaaaataatctcgccgctgcggttctacatgcccctgtgcatggcgattttgcatctttgaggtatatctggagtgctctcacaggcgtcaagcacactgaaaattctcttgtaattctggaagattaccaagatcgcgctattatatgctgtcggcgaatttggcaagctgtgcaacatatcttatgtgacgattcacctgaaggccatcttcctgaagaattacaacagattgaaggactcgacactaaggatctgttgagttatagtttcagggccgtacatgaatcaagcaatcttatgcgtgtaatagcaaataatgcttgttacaatcgagcacttgcgtttctcgctccttcacagcaaaatttcgaggatatcgggagattgacttttgatcaattatccaacttgaggcacagaggagcattttcgaccgtgtcccaaacctttactgcttgttgccagctcgtgccttcaatgccgactaaaaccggagacgagacaaacttgctggaagaatggtacaagggcggtttggattgtatatacaatcaagcctcgacgacacgaaggtcggcgggtatccctgccatcatcgtgggcatcctggcttctagagccaagagtccatcattcggagaggtaatggcaaaactacaggaaattggacgtgaaccagcttatgtagctcaaacggatggatctaatttgtcccaagttcacgctctaaactgcctaaaagacgttttcaagacctcattcttgagtcaccacgcagagccctatttaacagattgcttgcagttagcagcccaaagcctgcaatcagagatgtgggcaatacgaaattgcgggttgctattgttacgaagtctgatagacaaccttttcggaacgagtgagagcaaagccacgacggaggccggttgggacggacgaaccatcaagatctcttatcacaaatacaaagcattgcccgaactactaatgagtcttcttgatataggaaaggaatcagccggtatggtgatgggaacaaacacggctgaagcggtatttccagcacttgacatcattcgtcgcgccggaccaccggaaggatatcgagataaactgtataacagtgtgtcattctacttagggagtagaatctggcatgtaagagagattgcggctcggacgttgtgctcgttgcttttggtcccgacttggtttggagcgatcgagtctcttgttaatgagcccaagagctccgcaaacaaattgcatggagcattgctaacagtgaagttcttgctcgaaaggctacaccaagtttcgtccgaacaactgaacagtaaaactatctcaagtctctgtagactaatggagcagttgtcgtcgtcacacgactctcttcatacatgtacagaagcacaggctgtatatgtcgatattctcaacttcatcgccaagttgagtccaaagcaaaatgcccacgaaagtcttctactcaaccggtctttttttgcgacctcatatcagactttcgaagaatcacaagagcagaatcaagcaccagttgctttactaaaaatacgaaacggggaaacattcgtgcagcaatctttgagaagagcagacgacgtcgaaatcggcaacttgattgcagaattgctacctgctcttgctacagatacaaacgtcgcatgtgcaatgctcgaagcaatatcggactatgaaaacccgtctacacacgcaatgcgcataagcctcgcaaaaacatacttccgcgttgttcgtgtaacgaaggcaccagaagccataacacttgctttggagaatctcgcatctctgttagatgttattttaagctctcttgggaagaatgataatctcgacgctctcgcgacagaagagatactttctgctctgtggcaagacctgcaagtaaatgcgatgaaccctagcctgtcggacgctatcgttcgcgttagcggaccacttgtcgctgcagcactcatgcagaatcaaggatatgtcgatgatcgtcttggacaatatttgagaggctggagtacaatgatgagtgacgctgggtttgcagacagaaccttcgacaccaggatagccgccgtcgaagctataaactccttatctgtgactgtacagcttggcaaagtcaaggacagcgatacgcagctgtccatggaccatctcccttggctcatcgccctctacgacgctctcaccgaggacgacatcgaagtcagagaggcagcagctcttgcagcgaccccgataattggcctcgcgctagtaccgacagaagccgccctccgtctattgcaatggctcgctaaaacctttgcaaatgtgccggatttcaaactacacgtcgttgagcgcatgataggacataactttggtgcatcctctttttccagcctttttaccaacggtcctgggagcgaaattgaagataggcaatggattctcgtagcagcgcaactagaagcagcaatgcgctttgatgactcgctgttcgtcatcgaagagcataatcagtacatagacgaggtacaagaggcgagacggtgggcaagtgtgtttgtaccgcttttctctaattcactagctccaacacctggctctccggcggaatctgagaatacggacggcaaggtagtcgattctttggctgcctggactttagcaggtatagacacgctcacaaagatcacatctagcaaggagggagaagacgggccgttgggatggtcttcgaaaccccaggtctttgctatctgtgcgcgtattgtgatctgcgcatcgatgctcgggaagtactccgatgctgtggaacagggtcaggtacgagggaaggggtatacggagttggcggagcgtttgaagacgctctatgaactgggtcgcgatcctcgatttaaatttcatcctctgttgctgcttgagtgtgggatcgagggtgagaggacgcgtgtgctgagttgagtggagagcatagctaagaattagaagattcactgcctcttggatctaaaatttcaataggatttatttcgcgaagaacatatgtagattacgtaaaaaatgcaattcttcagttattctcctctgataattctctcagcaactaagtcttcgatcacgatcatccccgctttcatatatcacttgacataaacttcgacgtccccatacccgccgcgacttgtgggtgcctgatctcagcattttggcaggaacgggagaaactaaatttctactgcatcccctgtcctctattagcatcgccggggtttgatggccccgtatagccatgcatagatgccatttgggccggttgggtccagacatgcgctgtttctgggtaatttggagcttgggaattcggcgcagcaggcggcgaagtcgtctgtggcaacatctgtcctgcgccctgtgaaaatatcgggactgtgtgctgaagcggcgccgtcgtctgagggacacctgactgggcagtttggggatagttggcagcttggagacgtggatcagttgcgaatggttgctgtgagaaactcatggctggcatttgatgcgcttgttgcgttgccaaatgactttgggaatattgcggatgcatcgacgcacccggcatatttgtgtgcatttgcatattactcggctggacaaagggaggtggcgggaatgaggatccagtggtgttcggcgccgggttccatgtgcgaggactactgttgaaatttggaattgatggatttgtacgctgctgattcgggaataataatgggttgggagcattgtcgacttcagatgttccattagctgctcgcagaaagttttccttggctctcgcgtcaaaattgacgccgtagatgtctgtcatgtactgcataaagccaagatatgaccgggttactgtgttgaagtgtttgacctccagactaacaacagcgttaggctcgagtatcgcctcgtggtctcctcctcgtgcttcgaattctgctaaagctagggcagtctgacatgcattacggatctggcgaccattccatctcgcttctgggtagttgtgccagtgtgacgttgcagagacgagtatatttgtcttagcaatgttaagtttcaattttctgctgtcgaatcttctttgtagtcgctccaggttaagatccaaaatagatgttgtagcctgaagatccaacgggggatagtaaagactcatatggatccgggaggcgaatgcttcatcaaaatctcctacgcggttagtagtgaggaatagtatgccagaatagtattccatcacccttagaaaaactaggatatgtcagtaagctctgtgccaagcatgatgaggtgctacttacccg

SEQ ID NO: 23554 - DNA, 717 bp, Muscodor strobelii
  misc_feature: SGI cDNA ID NO. 568016
  misc_feature: Reduced expression when VOC is produced
  misc_feature: Encodes the peptide sequence at SEQ ID NO 23555
atgtcatccatctggaacgcactcaccgggcaaaaatcctcgtcccagtcctctcagcagtcctccgcgcccgcgccctccacatctactcctaccaccacattcgcatccagccccttcgacccatcggaagctcaaggcgtcgatgctttcctcaacagttccaccttcgccgacccctcgcggctgcatcccctcgccggcttaaatcaggagaccctcgagtacttgagtctcgaagactccgccctctccgacctgcccggcgcacaatccgccatcccctcgcgcggcttcagtgacgatctctgctatggaactggcataacgtatttgactgctctctccataggtggtgcctggggtctccaggagggcctcaggaggtctgctggtcaaccacccaagctgcgcctcaactctgtccttaatgcaatcacacggcgagggcctttcttgggcaactccgctggtgtagtcgccatcacatacaactgcatcaactcattcatcggctatctgagaggcaagcatgacgccgcaaacaccatcgccgccggagggctgagtggtatggtcttcaagagcacgcgcggtgtccggcctatgttgatttctggtggtgttgttgcttccatggccggtgcttgggcggtcacgaaggctgttgttctcccaaccccggcgccgcacgctcacgaacacgcacacctatga

SEQ ID NO: 23555 - protein, 238 aa, Muscodor strobelii
  misc_feature: SGI Peptide ID NO. 568016
  misc_feature (92)..(224): Pfam Id: PF02466 Pfam Desc: Tim17/Tim22/Tim23 family
  misc_feature (3)..(237): NCBI GI: 116207336 Blast Desc: CHGG_02961 [Chaetomium globosum CBS 148.51] gi|88183558|gb|EAQ91026.1| CHGG_02961 [Chaetomium globosum CBS 148.51]
  misc_feature (3)..(238): NCBI GI: 171685892 Blast Desc: protein product [Podospora anserina] gi|170942907|emb|CAP68560.1| protein product [Podospora anserina]
  misc_feature (3)..(225): NCBI GI: 154294142 Blast Desc: BC1G_14141 [Botryotinia fuckeliana B05.10] gi|150845078|gb|EDN20271.1| BC1G_14141 [Botryotinia fuckeliana B05.10]
  misc_feature (1)..(228): NCBI GI: 256729861 Blast Desc: NECHADRAFT_8467 [Nectria haematococca mpVI 77-13-4]
  misc_feature (1)..(221): NCBI GI: 39954014 Blast Desc: MGG_08885 [Magnaporthe grisea 70-15] gi|145021172|gb|EDK05301.1| MGG_08885 [Magnaporthe grisea 70-15]
  misc_feature (1)..(228): NCBI GI: 85084169 Blast Desc: mitochondrial import inner membrane translocase subunit tim23 [Neurospora crassa OR74A] gi|13447149|gb|AAK26640.1|AF343071_1 TIM23 [Neurospora crassa]
  misc_feature (3)..(221): NCBI GI: 156033253 Blast Desc: SS1G_13702 [Sclerotinia sclerotiorum 1980] gi|154699105|gb|EDN98843.1| SS1G_13702 [Sclerotinia sclerotiorum 1980]
  misc_feature (1)..(228): NCBI GI: 46122401 Blast Desc: FG05578.1 [Gibberella zeae PH-1]
  misc_feature (3)..(221): NCBI GI: 261195696 Blast Desc: mitochondrial import inner membrane translocase subunit tim23 [Ajellomyces dermatitidis SLH14081] gi|239588124|gb|EEQ70767.1| mitochondrial import inner membrane
  misc_feature (3)..(225): NCBI GI: 240107343 Blast Desc: Mitochondrial import inner membrane translocase subunit tim23, [Coccidioides posadasii C735 delta SOWgp]
  misc_feature: Useful for introducing or modulating the production of volatile compounds
MSSIWNALTGQKSSSQSSQQSSAPAPSTSTPTTTFASSPFDPSEAQGVDAFLNSSTFADPSRLHPLAGLNQETLEYLSLEDSALSDLPGAQSAIPSRGFSDDLCYGTGITYLTALSIGGAWGLQEGLRRSAGQPPKLRLNSVLNAITRRGPFLGNSAGVVAITYNCINSFIGYLRGKHDAANTIAAGGLSGMVFKSTRGVRPMLISGGVVASMAGAWAVTKAVVLPTPAPHAHEHAHL

SEQ ID NO: 23556 - DNA, 2148 bp, Muscodor strobelii
  misc_feature: SGI EST ID NO. CUFF.55668.0
  misc_feature: Variant of the nucleotide sequence at SEQ ID NO 23554
atttgcaagacggaaacttttttctggtctaaagatgcggctcgacgatatcgccatcacttcgagctcttacacctcgcgattcgactatcgacacattccccatcccctacgtcgcccgccatcctaacggcctacctccatcctctgtgtcaacggtctgacctgccgacgagcggaattccttctcctcattgtttttcttttattttggtaaccttactcttttaattcgtcgacaatgtcatccatctggaacgcactcaccgggcaaaaatcctcgtcccagtcctctcagcagtcctccgcgcccgcgccctccacatctactcctaccaccacattcgcatccagccccttcgacccatcggaagctcaaggcgtcgatgctttcctcaacagttccaccttcgccgacccctcgcggctgcatcccctcgccggcttaaatcaggagaccctcgagtacttgagtctcgaagactccgccctctccgacctgcccggcgcacaatccgccatcccctcgcgcggcttcagtgacgatctctgctatggaactggcataacgtatttgactgctctctccataggtggtgcctggggtctccaggagggcctcaggaggtctgctggtcaaccacccaagctgcgcctcaactctgtccttaatgcaatcacacggcgagggcctttcttgggcaactccgctggtgtagtcgccatcacatacaactgcatcaactcattcatcggctatctgagaggcaagcatgacgccgcaaacaccatcgccgccggagggctgagtggtatggtcttcaagagcacgcgcggtgtccggcctatgttgatttctggtggtgttgttgcttccatggccggtgcttgggcggtcacgaaggctgttgttctcccaaccccggcgccgcacgctcacgaacacgcacacctatgatttgatgtgctgtgcctgtagcgcagtgtgagacagcgctacgacaagaatagggcaaaattaccataatagataatagtgtaggatactgggtttccgatcaacagcacaccgatacaacgacttcggtttcacctcaggcagttagggcggcttggccttgttgcgaagtgatagaagatgatctctcctcaggctaagatgccacttgtacaaaataagggttcactcgcattagaaagcctataaggctgtggtatggcaggcgttacgcgttcgcacggggcggcggttgaaatttagccagcctaggtgcaaaatccagatgtgtctagtagttacacatcgcatcctcatcaagatcgagttgacatattgtaggataagcagcattttactgtacagcaagtcaatacatctactcgagcaatacccaaaagtacccaaattcacgcctggtgccacattcgtgttgcgggggcccatctcccctggtttaaggatggtaatctcgtcctacgggcttacgactcaccggacctaggtactaatgcaatgctataaatataattatgagtgcagaaacgacgcgcgattcgaacaaacgtaactgcttcaaagatacaaccggctggatcaaaatgttgtagacatgactccttcgtccacctcagtcttcatctatactctctaacaatcgaacgccataagcaatagtctaaacaacatgcggtcaacgcctcacttcgcaatgccttttcccttaatcttcttcacagcagcaaaagcacgaccagtctctttcgtgctagacaccagcaaagcaaaaggaatgacgatccaaaacgcgttcagaaacacataatagccgatgaagtatctcaattcaggacgcgagtactcggttccccagctcatgaattcgaacgtgcaagtggcgtaatacagcacatcgccatatagttgtccgagactgatgatcgattgaagtggatggcgtagcggatgatcagacacaatgaaccaggcgcagacgaaagatagaggaccccaaaagacggccgtgatcgcttccatacacacgacgaacgtgtccgctatgagataccgggaatcggagtaggagtattctttccagagctgtgctaggactgtttcttgacctgcgattgtgtgggcgttgaatgcga

SEQ ID NO: 23557 - DNA, 711 bp, Muscodor strobelii
  misc_feature: SGI cDNA ID NO. 568017
  misc_feature: Encodes the peptide sequence at SEQ ID NO 23558
atgcaaaacatgacggattccttactaggagcgacacctctacacccttatttcccccttggcgtcgcaatacccgagtacatcgccaacgacctctcaacgcaagagatactcgcaatcttcactacgacatgcatcgccgttctcgtaccgacattagtcctggcacgacacaaacgccccgatctgtcaagaggtgagctggccacggtgttatggtttgtcctctgtggttcaatccactcctgtctcgaaggatacttcgcattcaacgcccacacaatcgcaggtcaagaaacagtcctagcacagctctggaaagaatactcctactccgattcccggtatctcatagcggacacgttcgtcgtgtgtatggaagcgatcacggccgtcttttggggtcctctatctttcgtctgcgcctggttcattgtgtctgatcatccgctacgccatccacttcaatcgatcatcagtctcggacaactatatggcgatgtgctgtattacgccacttgcacgttcgaattcatgagctggggaaccgagtactcgcgtcctgaattgagatacttcatcggctattatgtgtttctgaacgcgttttggatcgtcattccttttgctttgctggtgtctagcacgaaagagactggtcgtgcttttgctgctgtgaagaagattaagggaaaaggcattgcgaagtga

SEQ ID NO: 23558 - protein, 236 aa, Muscodor strobelii
  misc_feature: SGI Peptide ID NO. 568017
  misc_feature (29)..(230): Pfam Id: PF05241 Pfam Desc: Emopamil binding protein
  misc_feature (29)..(173): Pfam Id: PF05241 Pfam Desc: Emopamil binding protein
  misc_feature (1)..(236): NCBI GI: 261354372 Blast Desc: 3-beta-hydroxysteroid-Delta(8),Delta(7)-isomerase [Verticillium albo-atrum VaMs.102]
  misc_feature (13)..(230): NCBI GI: 138248504 Blast Desc: EBDP4 [Botryotinia fuckeliana]
  misc_feature (12)..(208): NCBI GI: 259483451 Blast Desc: TPA: cholestenol delta-isomerase, (AFU_orthologue; AFUA_3G00810) [Aspergillus nidulans FGSC A4]
  misc_feature (1)..(232): NCBI GI: 39945184 Blast Desc: MGG_04574 [Magnaporthe grisea 70-15] gi|145021472|gb|EDK05601.1| MGG_04574 [Magnaporthe grisea 70-15]
  misc_feature (15)..(228): NCBI GI: 169598830 Blast Desc: SNOG_02221 [Phaeosphaeria nodorum SN15] gi|111069313|gb|EAT90433.1| SNOG_02221 [Phaeosphaeria nodorum SN15]
  misc_feature (13)..(235): NCBI GI: 138248510 Blast Desc: EBDP1 [Gibberella zeae]
  misc_feature (13)..(235): NCBI GI: 46138833 Blast Desc: FG10931.1 [Gibberella zeae PH-1]
  misc_feature (15)..(228): NCBI GI: 189209303 Blast Desc: 3-beta-hydroxysteroid-Delta(8),Delta(7)-isomerase [Pyrenophora tritici-repentis Pt-1C-BFP] gi|187977077|gb|EDU43703.1| [Pyrenophora tritici-repentis
  misc_feature (12)..(209): NCBI GI: 67900448 Blast Desc: AN7211.2 [Aspergillus nidulans FGSC A4] gi|40742068|gb|EAA61258.1| AN7211.2 [Aspergillus nidulans FGSC A4]
  misc_feature (12)..(223): NCBI GI: 256729048 Blast Desc: NECHADRAFT_68940 [Nectria haematococca mpVI 77-13-4]
  misc_feature (10)..(218): SWISSPROT Homolog: EC 5.3.3.5 Cholestenol Delta-isomerase
MQNMTDSLLGATPLHPYFPLGVAIPEYIANDLSTQEILAIFTTTCIAVLVPTLVLARHKRPDLSRGELATVLWFVLCGSIHSCLEGYFAFNAHTIAGQETVLAQLWKEYSYSDSRYLIADTFVVCMEAITAVFWGPLSFVCAWFIVSDHPLRHPLQSIISLGQLYGDVLYYATCTFEFMSWGTEYSRPELRYFIGYYVFLNAFWIVIPFALLVSSTKETGRAFAAVKKIKGKGIAK

SEQ ID NO: 23559 - DNA, 2738 bp, Muscodor strobelii
  misc_feature: SGI EST ID NO. CUFF.55669.1
  misc_feature: Variant of the nucleotide sequence at SEQ ID NO 23557
ctcgtgtctgtaagtgtaaggagccagctcgtatgttgcatctatcagaagaaccgaattacatattatatgggaacaagagctcgtttcattacttcgtgaggcatgcttggcaagataatcatgtaatcagtcatcgtattcgggtcatcagtgtacaaccagtttcattctttcaagtagtaatgggcatccctcgatttcaccaattaatcaaagactttcatagacttcttgacattttcctctttagcctgtatcaatcaaaatgcaaaacatgacggattccttactaggagcgacacctctacacccttatttcccccttggcgtcgcaatacccgagtacatcgccaacgacctctcaacgcaagagatactcgcaatcttcactacgacatgcatcgccgttctcgtaccgacattagtcctggcacgacacaaacgccccgatctgtcaagaggtgagctggccacggtgttatggtttgtcctctgtggttcaatccactcctgtctcgaaggatacttcgcattcaacgcccacacaatcgcaggtcaagaaacagtcctagcacagctctggaaagaatactcctactccgattcccggtatctcatagcggacacgttcgtcgtgtgtatggaagcgatcacggccgtcttttggggtcctctatctttcgtctgcgcctggttcattgtgtctgatcatccgctacgccatccacttcaatcgatcatcagtctcggacaactatatggcgatgtgctgtattacgccacttgcacgttcgaattcatgagctggggaaccgagtactcgcgtcctgaattgagatacttcatcggctattatgtgtttctgaacgcgttttggatcgtcattccttttgctttgctggtgtctagcacgaaagagactggtcgtgcttttgctgctgtgaagaagattaagggaaaaggcattgcgaagtgaggcgttgaccgcatgttgtttagactattgcttatggcgttcgattgttagagagtatagatgaagactgaggtggacgaaggagtcatgtctacaacattttgatccagccggttgtatctttgaagcagttacgtttgttcgaatcgcgcgtcgtttctgcactcataattatatttatagcattgcattagtacctaggtccggtgagtcgtaagcccgtaggacgagattaccatccttaaaccaggggagatgggcccccgcaacacgaatgtggcaccaggcgtgaatttgggtacttttgggtattgctcgagtagatgtattgacttgctgtacagtaaaatgctgcttatcctacaatatgtcaactcgatcttgatgaggatgcgatgtgtaactactagacacatctggattttgcacctaggctggctaaatttcaaccgccgccccgtgcgaacgcgtaacgcctgccataccacagccttataggctttctaatgcgagtgaacccttattttgtacaagtggcatcttagcctgaggagagatcatcttctatcacttcgcaacaaggccaagccgccctaactgcctgaggtgaaaccgaagtcgttgtatcggtgtgctgttgatcggaaacccagtatcctacactattatctattatggtaattttgccctattcttgtcgtagcgctgtctcacactgcgctacaggcacagcacatcaaatcataggtgtgcgtgttcgtgagcgtgcggcgccggggttgggagaacaacagccttcgtgacctgttcgaagttagtcatcgtgtctcctaatgtgatagtgctcgaggacaagatgcttaccgcccaagcaccggccatggaagcaacaacaccaccagaaatcaacataggccggacaccgcgcgtgctcttgaagaccataccactcagccctccggcggcgatggtgtttgcggcgtcatgcttgcctctcagatagccgatgaatgagttgatgcagttgtatgtgatggcgactacaccagcggagttgcccaagaaaggccctcgccgtgtgattgcattaaggacagagttgaggcgcagcttgggtggttgaccagcagacctcctgaggccctcctggagaccccaggcaccacctatggagagagcagtcaaatacgttatgccagttccatagcagagatcgtcactgaagccgcgcgaggggatggcggattgtgcgccgggcaggtcggagagggcggagtcttcgagactcaagtactcgagggtctcctgatttaagccggcgaggggatgcagccgcgaggggtcggcgaaggtggaactgttgaggaaagcatcgacgccttgagcttccgatgggtcgaaggggctggatgcgaatgtggtggtaggagtagatgtggagggcgcgggcgcggaggactgctgagaggactgggacgaggatttttgcccggtgagtgcgttccagatggatgacattgtcgacgaattaaaagagtaaggttaccaaaataaaagaaaaacaatgaggagaaggaattccgctcgtcggcaggtcagaccgttgacacagaggatggaggtaggccgttaggatggcgggcgacgtaggggatggggaatgtgtcgatagtcgaatcgcgaggtgtaagagctcgaagtgatggcgatatcgtcgagccgcatctttagaccagaaaaaagtttccgtcttgcaaat

SEQ ID NO: 23560 - DNA, 1263 bp, Muscodor strobelii
  misc_feature: SGI cDNA ID NO. 568018
  misc_feature: Encodes the peptide sequence at SEQ ID NO 23561
atgtcgggtcaacctcgccaaacaaaccgcactggacctgagccaagtcagcccaatcccagtagcaatcacgcaaagcccagacgggtttcctttactactggcaccaagcctaacactcctggtgcaaacaaccacacccgcgctgagcccgccaataactctcagccctccaacccgcgcgtcagcccggatccgcgcccttccctgctgcgtgacttgcctgtgcattacgtccagaacactccccagggtctcgtcctcgacggcgttcttgagaacaagcttccccagcaagatctcttcacgggtctaccaagctatcccgtccctcagcctcaaccatatccatacccttttacccatttcccccaaccttttccggccatgagtaacgtacctgcccccagcagcgttgccgctggcatctcaaatgatcccaatcagcgccatttccagcctgctgtccctgacacgtccaatggccccatccgccattggtatgtccctcgctctgaccaagatacctcgcaatttcttggtgccagccgcccgggcatggttcctcctatcctccaacagcccaccccagtcccacctcagtttggtcctggccctgctgtgagtgtcatccctggcgccatggctggtatgcctggcactgtctgctatggatttcccggccttgctagtcaacagtcgcagcccggtctggtcaccacacctattgccatgctcccccagggtgcccagtgtcagccaatgccacagatgcagtactgtgttcccgctggaggaatcagcactcagcctggtgctcctcctatgatggtctatcagcaggctcctggtgctggcgctgcacctggccaggcctatgtgatcgctggagctgccggctcaggaggtgctccacccccttctgtgccgaccttcatgatgtccggcgccagtggtccccctgcccctggcggcggctttgttcttcccggtaacctgaattccgactactctaacatcacttatggaaagaccaaaactgagcttgacaccgagcagttgtttttggccaacgaggaccaggccaatgagcctcagggaatcaagcccgaagaccccgaccctggccgcatgtactggtgccaacagcttgacggtgaatatattcaagtcagtcgccaggttatcgacagaggtggtagcgaataccgctggtatgtgactgcccagggagtcttctacgctaagcgtctgccgccttga

SEQ ID NO: 23561 - protein, 420 aa, Muscodor strobelii
  misc_feature: SGI Peptide ID NO. 568018
  misc_feature (151)..(418): NCBI GI: 164429034 Blast Desc: NCU00370 [Neurospora crassa OR74A] gi|157072381|gb|EAA28020.2| [Neurospora crassa OR74A]
  misc_feature (343)..(419): NCBI GI: 145614232 Blast Desc: MGG_11320 [Magnaporthe grisea 70-15] gi|145021175|gb|EDK05304.1| MGG_11320 [Magnaporthe grisea 70-15]
  misc_feature (148)..(400): NCBI GI: 256729859 Blast Desc: NECHADRAFT_23236 [Nectria haematococca mpVI 77-13-4]
  misc_feature (343)..(418): NCBI GI: 116207340 Blast Desc: CHGG_02963 [Chaetomium globosum CBS 148.51] gi|88183560|gb|EAQ91028.1| CHGG_02963 [Chaetomium globosum CBS 148.51]
  misc_feature (341)..(419): NCBI GI: 154294138 Blast Desc: [Botryotinia fuckeliana B05.10] gi|150845076|gb|EDN20269.1| [Botryotinia fuckeliana B05.10]
  misc_feature (341)..(418): NCBI GI: 156033249 Blast Desc: [Sclerotinia sclerotiorum 1980] gi|154699103|gb|EDN98841.1| [Sclerotinia sclerotiorum 1980]
  misc_feature (343)..(419): NCBI GI: 261358285 Blast Desc: conserved [Verticillium albo-atrum VaMs.102]
  misc_feature (146)..(418): NCBI GI: 171685888 Blast Desc: protein product [Podospora anserina] gi|170942905|emb|CAP68558.1| protein product [Podospora anserina]
  misc_feature (307)..(400): NCBI GI: 46122397 Blast Desc: FG05576.1 [Gibberella zeae PH-1]
MSGQPRQTNRTGPEPSQPNPSSNHAKPRRVSFTTGTKPNTPGANNHTRAEPANNSQPSNPRVSPDPRPSLLRDLPVHYVQNTPQGLVLDGVLENKLPQQDLFTGLPSYPVPQPQPYPYPFTHFPQPFPAMSNVPAPSSVAAGISNDPNQRHFQPAVPDTSNGPIRHWYVPRSDQDTSQFLGASRPGMVPPILQQPTPVPPQFGPGPAVSVIPGAMAGMPGTVCYGFPGLASQQSQPGLVTTPIAMLPQGAQCQPMPQMQYCVPAGGISTQPGAPPMMVYQQAPGAGAAPGQAYVIAGAAGSGGAPPPSVPTFMMSGASGPPAPGGGFVLPGNLNSDYSNITYGKTKTELDTEQLFLANEDQANEPQGIKPEDPDPGRMYWCQQLDGEYIQVSRQVIDRGGSEYRWYVTAQGVFYAKRLPP

SEQ ID NO: 23562 - DNA, 1535 bp, Muscodor strobelii
  misc_feature: SGI EST ID NO. CUFF.55391.0
  misc_feature: Variant of the nucleotide sequence at SEQ ID NO 23560
taactctcagccctccaacccgcgcgtcagcccggatccgcgcccttccctgctgcgtgacttgcctgtgcattacgtccagaacactccccagggtctcgtcctcgacggcgttcttgagaacaagcttccccagcaagatctcttcacgggtctaccaagctatcccgtccctcagcctcaaccatatccatacccttttacccatttcccccaaccttttccggccatgagtaacgtacctgcccccagcagcgttgccgctggcatctcaaatgatcccaatcagcgccatttccagcctgctgtccctgacacgtccaatggccccatccgccattggtatgtccctcgctctgaccaagatacctcgcaatttcttggtgccagccgcccgggcatggttcctcctatcctccaacagcccaccccagtcccacctcagtttggtcctggccctgctgtgagtgtcatccctggcgccatggctggtatgcctggcactgtctgctatggatttcccggccttgctagtcaacagtcgcagcccggtctggtcaccacacctattgccatgctcccccagggtgcccagtgtcagccaatgccacagatgcagtactgtgttcccgctggaggaatcagcactcagcctggtgctcctcctatgatggtctatcagcaggctcctggtgctggcgctgcacctggccaggcctatgtgatcgctggagctgccggctcaggaggtgctccacccccttctgtgccgaccttcatgatgtccggcgccagtggtccccctgcccctggcggcggctttgttcttcccgttgtttttggccaacgaggaccaggccaatgagcctcagggaatcaagcccgaagaccccgaccctggccgcatgtactggtgccaacagcttgacggtgaatatattcaagtcagtcgccaggttatcgacagaggtggtagcgaataccgctggtatgtgactgcccagggagtcttctacgctaagcgtctgccgccttgattgccacgcaaaactcttactgcactggaccctcgtcgcctgttcatcaccaccatgcatgagagatttcactcgacttgtatatacgacttcgctgtctttcttttgctccacagcatttttctattacctcttcatttccttgcatcagggcatctgagcccaaccactcacaacaacggccatcgatttcatagtcagcatcacgacaaactctcggacgcttgcgagacctttcgacacatctcgacacgtctcaatatgatggatgcaaaaatgaggaaaaaaatcgggagcggccgaacccgagaaacggctaaagacgacagcattgtcggatatggataagtccgtcgttgtggacgaaatggataaagccgtcaatgtcagacgagcaaaaaagaactcaagaaaaagggagcaactaaagcggttgacgaggtagcacttgggctatatccatcttctgtactttagagcacaatagatttatttgtg

SEQ ID NO: 23563 - DNA, 1164 bp, Muscodor strobelii
  misc_feature: SGI cDNA ID NO. 568019
  misc_feature: Reduced expression when VOC is produced
  misc_feature: Encodes the peptide sequence at SEQ ID NO 23564
atggcggcagaggatcgcggtcctgagttggcaactgtggtgtcggtgtttttgggtgtgtcggctgtcactgttgctcttcgatgttatgtgaggattggtatactcaagatcttccgggttgaagattggttggctttgttggctctggcttcttcgattgcgtttacttactttgtcctggtcagcattcagtatggcgctggtaaacatacaacggctgttccaaaggagaacatacccacagtgctcaagatgcgctgggctggagaactgacttatgtcattacctcgatgcttcttaagatgacaatcggtatctttctcttacgaatctgctctaaaacgtggcaccgggttaccatctggtttgttctcatcagctgcctcgttttcaacgtcttctacgtgtttgttgctgcatttcaatgtgatcccatcgactactattggaaccgatacacgacggatatgactggagtctgtgtatcagctcagatcatcgcaagctcaacctatgcagctgtgggagtaaatgccgcggcggattgggctctcggcttgctcccaatcgcactgttatggaatctggacctcaacaagaaatcgaaaatttcggtagcaggtattttagctctcggccttcttgcgtcaactgctactattgtccgtattttttacgtctggcaactcaatcatgacgacgacattctctacgactttaccgaccttgctatctggtcaacagtcgagaatggcctgggccttattgcatcatcggttgcaaccctacgcccgctttttaagaatatcttagatcccattccacaggaaagactatcgtggcaggccattaaacgatcatcatctaacggactcaaatttcattgtcgtggaagtgccgagatgggtgacccctactttcgcatgggggcctatccaccacctggcactgctaaggcaagatactacagacagagtgatagtattggaaacaagtcagagattttaacgatgagaggggccgctttacggagccctcaagccctagatcagtgcgatctggctggcatagcgatggaactcggcgtttatatgggaatggtatgggaggttttcatgatgatatccccccgccgcggccagctcggccagcaagcttga

SEQ ID NO: 23564 - protein, 387 aa, Muscodor strobelii
  misc_feature: SGI Peptide ID NO. 568019
  misc_feature (4)..(309): NCBI GI: 85109074 Blast Desc: NCU07649 [Neurospora crassa OR74A] gi|28924355|gb|EAA33496.1| [Neurospora crassa OR74A]
  misc_feature (1)..(272): NCBI GI: 46139657 Blast Desc: FG11343.1 [Gibberella zeae PH-1]
  misc_feature (54)..(304): NCBI GI: 154308878 Blast Desc: BC1G_07967 [Botryotinia fuckeliana B05.10] gi|150852593|gb|EDN27785.1| BC1G_07967 [Botryotinia fuckeliana B05.10]
  misc_feature (1)..(296): NCBI GI: 169615038 Blast Desc: SNOG_10673 [Phaeosphaeria nodorum SN15] gi|160702870|gb|EAT82067.2| SNOG_10673 [Phaeosphaeria nodorum SN15]
  misc_feature (5)..(335): NCBI GI: 121706204 Blast Desc: conserved [Aspergillus clavatus NRRL 1] gi|119399511|gb|EAW09939.1| conserved [Aspergillus clavatus NRRL 1]
  misc_feature (4)..(380): NCBI GI: 67525377 Blast Desc: AN3146.2 [Aspergillus nidulans FGSC A4] gi|40744541|gb|EAA63717.1| AN3146.2 [Aspergillus nidulans FGSC A4]
  misc_feature (4)..(361): NCBI GI: 259485899 Blast Desc: TPA: P-type ATPase, (Eurofung) [Aspergillus nidulans FGSC A4]
  misc_feature (5)..(269): NCBI GI: 154295897 Blast Desc: BC1G_13318 [Botryotinia fuckeliana B05.10] gi|150843868|gb|EDN19061.1| BC1G_13318 [Botryotinia fuckeliana B05.10]
  misc_feature (61)..(269): NCBI GI: 154313823 Blast Desc: BC1G_05761 [Botryotinia fuckeliana B05.10] gi|150849343|gb|EDN24536.1| BC1G_05761 [Botryotinia fuckeliana B05.10]
  misc_feature (4)..(269): NCBI GI: 169763664 Blast Desc: [Aspergillus oryzae RIB40] gi|83770760|dbj|BAE60893.1| protein product [Aspergillus oryzae]
  misc_feature: Useful for introducing or modulating the production of volatile compounds
MAAEDRGPELATVVSVFLGVSAVTVALRCYVRIGILKIFRVEDWLALLALASSIAFTYFVLVSIQYGAGKHTTAVPKENIPTVLKMRWAGELTYVITSMLLKMTIGIFLLRICSKTWHRVTIWFVLISCLVFNVFYVFVAAFQCDPIDYYWNRYTTDMTGVCVSAQIIASSTYAAVGVNAAADWALGLLPIALLWNLDLNKKSKISVAGILALGLLASTATIVRIFYVWQLNHDDDILYDFTDLAIWSTVENGLGLIASSVATLRPLFKNILDPIPQERLSWQAIKRSSSNGLKFHCRGSAEMGDPYFRMGAYPPPGTAKARYYRQSDSIGNKSEILTMRGAALRSPQALDQCDLAGIAMELGVYMGMVWEVFMMISPRRGQLGQQA

SEQ ID NO: 23565 - DNA, 1819 bp, Muscodor strobelii
  misc_feature: SGI EST ID NO. CUFF.55403.0
  misc_feature: Variant of the nucleotide sequence at SEQ ID NO 23563
cgagaagacgccattgtcggcagcctcggaatagactcattgcttacaatatcttataatctgcagccactggttttggctgtggtgctgacgagtatgcaccgtcggtagattcgcggtcaagggcatggtgtcgacttcctatctggccactagggccgttccatgatacctttgtggaatcaaagtggatgcatgaacaattccatcgggtccgctccctcagcggcatcggtatatcgccgcttttcagactaccagagctaccccggattccagcttaactataacttgatcggtatcctcttcttcttctttaatttcgcttcgtcccgcgatgtgaccgtgcgacttcgtcaagccccttgaactcccacgtgtgacgatcttgtctttcaactagccgccatggtcatcttcggtagtggttcaatactgccaagcagacgaaacaaataacaactctcagatatggcggcagaggatcgcggtcctgagttggcaactgtggtgtcggtgtttttgggtgtgtcggctgtcactgttgctcttcgatgttatgtgaggattggtatactcaagatcttccgggttgaagattggttggctttgttggctctggcttcttcgattgcgtttacttactttgtcctggtcagcattcagtatggcgctggtaaacatacaacggctgttccaaaggagaacatacccacagtgctcaagatgcgctgggctggagaactgacttatgtcattacctcgatgcttcttaagatgacaatcggtatctttctcttacgaatctgctctaaaacgtggcaccgggttaccatctggtttgttctcatcagctgcctcgttttcaacgtcttctacgtgtttgttgctgcatttcaatgtgatcccatcgactactattggaaccgatacacgacggatatgactggagtctgtgtatcagctcagatcatcgcaagctcaacctatgcagctgtgggagtaaatgccgcggcggattgggctctcggcttgctcccaatcgcactgttatggaatctggacctcaacaagaaatcgaaaatttcggtagcaggtattttagctctcggccttcttgcgtcaactgctactattgtccgtattttttacgtctggcaactcaatcatgacgacgacattctctacgactttaccgaccttgctatctggtcaacagtcgagaatggcctgggccttattgcatcatcggttgcaaccctacgcccgctttttaagaatatcttagatcccattccacaggaaagactatcgtggcaggccattaaacgatcatcatctaacggactcaaatttcattgtcgtggaagtgccgagatgggtgacccctactttcgcatgggggcctatccaccacctggcactgctaaggcaagatactacagacagagtgatagtagtgagtacgacgggtcaaacacaatttcaacaaaacatagttggcacagtttccacagttggaaacaagtcagagattttaacgatgagaggggccgctttacggagccctcaagccctagatcagtgcgatctggctggcatagcgatggaactcggcgtttatatgggaatggtatgggaggttttcatgatgatatccccccgccgcggccagctcggccagcaagcttgagcttttgattgcttttataatgatatctacttggcaggatgtatataggaacatgctgagagatacataaggcttcatggtacatacttaacagactgtatatatgttatgagcggatgacgaaaa

SEQ ID NO: 23566 - DNA, 1047 bp, Muscodor strobelii
  misc_feature: SGI cDNA ID NO. 568020
  misc_feature: Encodes the peptide sequence at SEQ ID NO 23567
atggctccagacctcagcgccgtcactggcgtggcatcaccaagcacaccaccagacaccgactcacaaacaccccacaccaaagccctatcacaactccaatccctgcaaccaatcttcaaaggcatagcacaccgaaaccacaaccaacaccggcgctcatcatggtggcgaagcttcggcatgttgcggcgcaactgcgataaactcatctcagagctacaatcctccatctccgcggtgcaagccaatgccgcgaaagccgccaagactcaaaaggcattgagtaagaagcgtcggcgagaggcttgggggggtatcaaaaccggtggtatggcggaggatgatatagtgactgagcgcaacaatgtagatgagaaggtagtggcgtacgctatttggatgcgcgacattttgataccaaagtgttacctcgcattctcacaactaacagcagacaaccaattcgcaacgctaggagtcgtgctcttaagcgctttatcacaagtccacgctgcatgtcagctcgtgggccctgagccgaagtcttcgggccctgagtcgccccccgagggagaattcttaactcccgggactgccaaacccgaggctcagagtatcagacagagtatagaaaatcagtcatcatcaagtctccaaacaacgcaagacgcactccccacaagcggaggcaagacaatctcccgcgacgccgtagaactcctccgcaaaaggaagaaacataaaatcccggatctagacatcgacgagagtccaatcccacaatcatcatcaaaaccacagatcaatctctcatcagcaaccaaatccgcaaagtcgtcaccatcgacaccatcgtcaacaggcccaccaatcaagcgtctcccctctacccaagacgacaccgaggatgccaggccaaataagaaggcaaagccgataccagaatccaaagagatgtctaccaaagacccacgcaccaagaagacaaagaagaaagccaaaaagggcgatgagttcgatgatttattcaaggggctcgtgtag

SEQ ID NO: 23567 - protein, 348 aa, Muscodor strobelii
  misc_feature: SGI Peptide ID NO. 568020
  misc_feature (39)..(174): NCBI GI: 85109445 Blast Desc: NCU06204 [Neurospora crassa OR74A] gi|28924564|gb|EAA33684.1| [Neurospora crassa OR74A]
  misc_feature (31)..(180): NCBI GI: 119196401 Blast Desc: [Coccidioides immitis RS]
  misc_feature (31)..(180): NCBI GI: 240110894 Blast Desc: CPC735_037560 [Coccidioides posadasii C735 delta SOWgp]
  misc_feature (33)..(171): NCBI GI: 156048592 Blast Desc: [Sclerotinia sclerotiorum 1980] gi|154693424|gb|EDN93162.1| [Sclerotinia sclerotiorum 1980]
  misc_feature (31)..(169): NCBI GI: 239608881 Blast Desc: [Ajellomyces dermatitidis ER-3]
  misc_feature (31)..(169): NCBI GI: 261187660 Blast Desc: [Ajellomyces dermatitidis SLH14081] gi|239594140|gb|EEQ76721.1| [Ajellomyces dermatitidis SLH14081]
  misc_feature (31)..(169): NCBI GI: 225561457 Blast Desc: HCBG_01382 [Ajellomyces capsulatus G186AR]
  misc_feature (33)..(176): NCBI GI: 238842786 Blast Desc: conserved [Microsporum canis CBS 113480]
  misc_feature (21)..(169): NCBI GI: 240274563 Blast Desc: conserved [Ajellomyces capsulatus H143]
  misc_feature (36)..(176): NCBI GI: 115398448 Blast Desc: [Aspergillus terreus NIH2624] gi|114191696|gb|EAU33396.1| [Aspergillus terreus NIH2624]
MAPDLSAVTGVASPSTPPDTDSQTPHTKALSQLQSLQPIFKGIAHRNHNQHRRSSWWRSFGMLRRNCDKLISELQSSISAVQANAAKAAKTQKALSKKRRREAWGGIKTGGMAEDDIVTERNNVDEKVVAYAIWMRDILIPKCYLAFSQLTADNQFATLGVVLLSALSQVHAACQLVGPEPKSSGPESPPEGEFLTPGTAKPEAQSIRQSIENQSSSSLQTTQDALPTSGGKTISRDAVELLRKRKKHKIPDLDIDESPIPQSSSKPQINLSSATKSAKSSPSTPSSTGPPIKRLPSTQDDTEDARPNKKAKPIPESKEMSTKDPRTKKTKKKAKKGDEFDDLFKGLV

SEQ ID NO: 23568 - DNA, 4237 bp, Muscodor strobelii
  misc_feature: SGI EST ID NO. CUFF.56248.0
  misc_feature: Variant of the nucleotide sequence at SEQ ID NO 23566
ccacactcgcatctcatccgtcgaacttctcaccacatcaaagcacaaccaaaatccataaaattcgccagaattacgaataatgtaatggctccagacctcagcgccgtcactggcgtggcatcaccaagcacaccaccagacaccgactcacaaacaccccacaccaaagccctatcacaactccaatccctgcaaccaatcttcaaaggcatagcacaccgaaaccacaaccaacaccggcgctcatcatggtggcgaagcttcggcatgttgcggcgcaactgcgataaactcatctcagagctacaatcctccatctccgcggtgcaagccaatgccgcgaaagccgccaagactcaaaaggcattgagtaagaagcgtcggcgagaggcttgggggggtatcaaaaccggtggtatggcggaggatgatatagtgactgagcgcaacaatgtagatgagaaggtagtggcgtacgctatttggatgcgcgacattttgataccaaagtgttacctcgcattctcacaactaacagcagacaaccaattcgcaacgctaggagtcgtgctcttaagcgctttatcacaagtccacgctgcatgtcagctcgtgggccctgagccgaagtcttcgggccctgagtcgccccccgagggagaattcttaactcccgggactgccaaacccgaggctcagagtatcagacagagtatagaaaatcagtcatcatcaagtctccaaacaacgcaagacgcactccccacaagcggaggcaagacaatctcccgcgacgccgtagaactcctccgcaaaaggaagaaacataaaatcccggatctagacatcgacgagagtccaatcccacaatcatcatcaaaaccacagatcaatctctcatcagcaaccaaatccgcaaagtcgtcaccatcgacaccatcgtcaacaggcccaccaatcaagcgtctcccctctacccaagacgacaccgaggatgccaggccaaataagaaggcaaagccgataccagaatccaaagagatgtctaccaaagacccacgcaccaagaagacaaagaagaaagccaaaaagggcgatgagttcgatgatttattcaaggggctcgtgtagagaccacgtaaccttgttagataccatacccacaacatctttaataaaccgattttcaagcattgatttactccagagccaacccattagggtcatcttgcggtcacttttattgcataattcaccattgaaattgagcagactgtattaaaatcataaagaggctgttatcgttgttttaaaatatactcatcttgaagtctcgagtttttgagcctacagtctgcaataattgaactaaaacacaaacatgattctgacagttgtattgtttccactcttcctacacaaccaagccctcctttcccagtaagtccacatattctcacaggttgacctctagcgcttcgccgccctcctgtccataatatcccatacaaaaaccaggccctatgggacgattccgtttgttcgaaggtagtttgttcgtcgaatttcccttattcgactgttcgatgaagcgaagcgaggatcttcttttaccatgatcagtgcctcctcctactgagtcagtgtccggtacgaccagattcgggccctcatgtcgcctgagccggtggcaaagaagccgcctgtggggctgggagcaacggagatgactgaatttttgtggccctgcaacatcagttgagtacaaccggttcgcgggtcccagaactgtaccccacgatccttggatccggacatgacccagttggcatcaggcgtaagggcgacgctcaaaacgaaatcctgctatacgttagctgtggttgtttcactattggcatgttacctactctgtgaccctcgaatgtcttgatgcatctgcctcccttagggccagcgttaccgttaattctcgaggtggacaactcccacatcttgatcgtcttgtccaagctaccactgacaagctccttgccacttggcgagaaagcgacggaatagacgctatctttatggccatcgggtccctccaggcgctcgagcaggtagccctgcatgatatcccagacgcgcacgctcttgtcgagtgagccagcagcgacatacttggtatccggagaaatagccacagtcgtgacaccgtcctcgatagtgagggtcaagatattggagctgttctcgatgtcccaaagtcggacagttctgtcgccacttcctgaggcaatagtgcggccatcacgggcaaaatccagcgagtagatatcttgctcgtgaccagcaaatgtgttacggatcgtgcggttggcgatatcccagacctggtcgggttagcatagaagtagtacgcgcacgtacagtagaacttacacgaatgagcttgtcttcagcaccagtagccaagtacttgccatcagggctgaagcacacacttcgaatgtacaggtcacccgtcacgtcggcgttctcgtcctgcaagacgcagactttctcaccggtattaacatcgtaaatctgggcagaccggttgcagccagtggccacatacttgccgtcatgactgaatcggacacagcagacgacgctttcgtgtgacaaggtgtggactaggtcgacatccaacacacgaggtacagcctggttgaagatgacaaaccagtcgtcacgcgtcttcttgacatgagcgggcacgcgctcgggatccagctcgcccagtgcattgtttaccatgggattgggagcttgtgggtgaacgactcgatgatcaggcgtagggtggttaggaacctgcggcgatgctcccgggccagcgtatggcagaggggtgttgatctgaggggtagcgggccccgcggcaggaggtctgccaataccacgcttgccggggccaggagaggcagtggtctggggcgcctgaccggggaagccgttgggaccggggccttgtccatagccgagttggaaaggaggcgcctgcgacggtggagggggaggtggcggagggccctgaagacccggaggcggctgaggcatgtgttgctgagctccggggggttgatgctcaggcggcgggggctgaggaggcaggccctgtccctggccctgtcccgtcatgatgccgccgaatagattgttgcccacgccgatagagggaggcggagggccggctgaaggaccgccgtgctgcggcccaggcatgcccggctgcggaggggcacctcctcgagcagcgtcgagctggcggcggaggttgagtatgtcctcctcatacctgttgcgcatcagcatatacttgacaacagactgctgactgacacgagactggactcacttctgcttgatctgcatgtgcgcctgctcgagctggtaaactttgtctcggatatgggtcgcatcttggatctgctgctgaactacagacgtatatcatcagagaggcatccagtggggggacatgccgtaagcgcgaatgtacatgactgaagactcactctgctggtcataattctcgttgatcctgacctgattgtcgaattcctgccgaatctgctcgagcaattcattgagacgagtggcattctgcggcatgccgcgttggtgaggatacatagacatggcggcgagactgtctagtcgtattgcaggctgaatcctgatctacggcgaggccggtagacgattacaatagaaagcaatacggcgcttaggcggaagatgacgtttcgctggacgcgcgcgacacgaaaaaaatggttgcgctaagtgacaaactagcgattgaagacgtaactattcgaaggcgtattcagagtccctttgcctccagggtcctcaatggaaaaacactgttcttgttgttgatatcgtgtcgtcggggatgacgagacagtgcaaggctccagttgcggtatgtcaagcctcgtcagacgacagtgacctcagcccgatgttgtgcgcgcaagagaagggtcgtcgctgggcgacagggcgatgcggcggtggttggagcggcgggagagagctgaggggatcgcgaagctgtcggctgcgctggcgatcgggcagaggacgggtgcacaacacacagcgatgggctagaatgaattagatggaaaggggagggaatattgggaatcggtgccaggtgcacttctccagagaagaagaaacggtggag

SEQ ID NO: 23569 - DNA, 1806 bp, Muscodor strobelii
  misc_feature: SGI cDNA ID NO. 568021
  misc_feature: Reduced expression when VOC is produced
  misc_feature: Encodes the peptide sequence at SEQ ID NO 23570
atgtctatgtatcctcaccaacgcggcatgccgcagaatgccactcgtctcaatgaattgctcgagcagattcggcaggaattcgacaatcaggtcaggatcaacgagaattatgaccagcagattcagcagcagatccaagatgcgacccatatccgagacaaagtttaccagctcgagcaggcgcacatgcagatcaagcagaagtatgaggaggacatactcaacctccgccgccagctcgacgctgctcgaggaggtgcccctccgcagccgggcatgcctgggccgcagcacggcggtccttcagccggccctccgcctccctctatcggcgtgggcaacaatctattcggcggcatcatgacgggacagggccagggacagggcctgcctcctcagcccccgccgcctgagcatcaaccccccggagctcagcaacacatgcctcagccgcctccgggtcttcagggccctccgccacctccccctccaccgtcgcaggcgcctcctttccaactcggctatggacaaggccccggtcccaacggcttccccggtcaggcgccccagaccactgcctctcctggccccggcaagcgtggtattggcagacctcctgccgcggggcccgctacccctcagatcaacacccctctgccatacgctggcccgggagcatcgccgcaggttcctaaccaccctacgcctgatcatcgagtcgttcacccacaagctcccaatcccatggtaaacaatgcactgggcgagctggatcccgagcgcgtgcccgctcatgtcaagaagacgcgtgacgactggtttgtcatcttcaaccaggctgtacctcgtgtgttggatgtcgacctagtccacaccttgtcacacgaaagcgtcgtctgctgtgtccgattcagtcatgacggcaagtatgtggccactggctgcaaccggtctgcccagatttacgatgttaataccggtgagaaagtctgcgtcttgcaggacgagaacgccgacgtgacgggtgacctgtacattcgaagtgtgtgcttcagccctgatggcaagtacttggctactggtgctgaagacaagctcattcgtgtctgggatatcgccaaccgcacgatccgtaacacatttgctggtcacgagcaagatatctactcgctggattttgcccgtgatggccgcactattgcctcaggaagtggcgacagaactgtccgactttgggacatcgagaacagctccaatatcttgaccctcactatcgaggacggtgtcacgactgtggctatttctccggataccaagtatgtcgctgctggctcactcgacaagagcgtgcgcgtctgggatatcatgcagggctacctgctcgagcgcctggagggacccgatggccataaagatagcgtctattccgtcgctttctcgccaagtggcaaggagcttgtcagtggtagcttggacaagacgatcaagatgtgggagttgtccacctcgagaattaacggtaacgctggccctaagggaggcagatgcatcaagacattcgagggtcacagagatttcgttttgagcgtcgcccttacgcctgatgccaactgggtcatgtccggatccaaggatcgtggggtacagttctgggacccgcgaaccggttgtactcaactgatgttgcagggccacaaaaattcagtcatctccgttgctcccagccccacaggcggcttctttgccaccggctcaggcgacatgagggcccgaatctggtcgtaccggacactgactcagtag

SEQ ID NO: 23570 - protein, 601 aa, Muscodor strobelii
  misc_feature: SGI Peptide ID NO. 568021
  misc_feature (376)..(414): Pfam Id: PF00400 Pfam Desc: WD domain, G-beta repeat
  misc_feature (462)..(500): Pfam Id: PF00400 Pfam Desc: WD domain, G-beta repeat
  misc_feature (515)..(553): Pfam Id: PF00400 Pfam Desc: WD domain, G-beta repeat
  misc_feature (557)..(595): Pfam Id: PF00400 Pfam Desc: WD domain, G-beta repeat
  misc_feature (334)..(372): Pfam Id: PF00400 Pfam Desc: WD domain, G-beta repeat
  misc_feature (418)..(455): Pfam Id: PF00400 Pfam Desc: WD domain, G-beta repeat
  misc_feature (287)..(324): Pfam Id: PF00400 Pfam Desc: WD domain, G-beta repeat
  misc_feature (16)..(87): Pfam Id: PF08581 Pfam Desc: Tup N-terminal
  misc_feature (347)..(372): Pfam Id: PF00400 Pfam Desc: WD domain, G-beta repeat
  misc_feature (427)..(455): Pfam Id: PF00400 Pfam Desc: WD domain, G-beta repeat
  misc_feature (1)..(600): NCBI GI: 46111239 Blast Desc: FG02501.1 [Gibberella zeae PH-1]
  misc_feature (1)..(597): NCBI GI: 256725811 Blast Desc: chromatin associated protein [Nectria haematococca mpVI 77-13-4]
  misc_feature (1)..(599): NCBI GI: 154297425 Blast Desc: BC1G_12309 [Botryotinia fuckeliana B05.10] gi|150858505|gb|EDN33697.1| BC1G_12309 [Botryotinia fuckeliana B05.10]
  misc_feature (1)..(599): NCBI GI: 156048464 Blast Desc: SS1G_08963 [Sclerotinia sclerotiorum 1980] gi|154693360|gb|EDN93098.1| SS1G_08963 [Sclerotinia sclerotiorum 1980]
  misc_feature (1)..(599): NCBI GI: 1698504 Blast Desc: rco-1 [Neurospora crassa]
  misc_feature (1)..(599): NCBI GI: 85109447 Blast Desc: NCU06205 [Neurospora crassa OR74A] gi|61252265|sp|P78706.2|RCO1_NEUCR RecName: Full=Transcriptional repressor rco-1 gi|28924565|gb|EAA33685.1| NCU06205 [Neurospora
  misc_feature (185)..(599): NCBI GI: 39953425 Blast Desc: MGG_08829 [Magnaporthe grisea 70-15] gi|145021238|gb|EDK05367.1| MGG_08829 [Magnaporthe grisea 70-15]
  misc_feature (192)..(599): NCBI GI: 116191811 Blast Desc: CHGG_05623 [Chaetomium globosum CBS 148.51] gi|88181536|gb|EAQ89004.1| CHGG_05623 [Chaetomium globosum CBS 148.51]
  misc_feature (167)..(597): NCBI GI: 223975113 Blast Desc: [Zea mays]
  misc_feature (3)..(600): NCBI GI: 119467836 Blast Desc: wd-repeat protein [Neosartorya fischeri NRRL 181] gi|119405876|gb|EAW15827.1| wd-repeat protein [Neosartorya fischeri NRRL 181]
  misc_feature: Useful for introducing or modulating the production of volatile compounds
MSMYPHQRGMPQNATRLNELLEQIRQEFDNQVRINENYDQQIQQQIQDATHIRDKVYQLEQAHMQIKQKYEEDILNLRRQLDAARGGAPPQPGMPGPQHGGPSAGPPPPSIGVGNNLFGGIMTGQGQGQGLPPQPPPPEHQPPGAQQHMPQPPPGLQGPPPPPPPPSQAPPFQLGYGQGPGPNGFPGQAPQTTASPGPGKRGIGRPPAAGPATPQINTPLPYAGPGASPQVPNHPTPDHRVVHPQAPNPMVNNALGELDPERVPAHVKKTRDDWFVIFNQAVPRVLDVDLVHTLSHESVVCCVRFSHDGKYVATGCNRSAQIYDVNTGEKVCVLQDENADVTGDLYIRSVCFSPDGKYLATGAEDKLIRVWDIANRTIRNTFAGHEQDIYSLDFARDGRTIASGSGDRTVRLWDIENSSNILTLTIEDGVTTVAISPDTKYVAAGSLDKSVRVWDIMQGYLLERLEGPDGHKDSVYSVAFSPSGKELVSGSLDKTIKMWELSTSRINGNAGPKGGRCIKTFEGHRDFVLSVALTPDANWVMSGSKDRGVQFWDPRTGCTQLMLQGHKNSVISVAPSPTGGFFATGSGDMRARIWSYRTLTQ

SEQ ID NO: 23571 - DNA, 3429 bp, Muscodor strobelii
  misc_feature: SGI EST ID NO. CUFF.56249.1
  misc_feature: Variant of the nucleotide sequence at SEQ ID NO 23569
ctccaccgtttcttcttctctggagaagtgcacctggcaccgattcccaatattccctcccctttccatctaattcattctagcccatcgctgtgtgttgtgcacccgtcctctgcccgatcgccagcgcagccgacagcttcgcgatcccctcagctctctcccgccgctccaaccaccgccgcatcgccctgtcgcccagcgacgacccttctcttgcgcgcacaacatcgggctgaggtcactgtcgtctgacgaggcttgacataccgcaactggagccttgcactgtctcgtcatccccgacgacacgatatcaacaacaagaacagtgtttttccattgaggaccctggaggcaaagggactctgaatacgccttcgaatagttacgtcttcaatcgctagtttgtcacttagcgcaaccatttttttcgtgtcgcgcgcgtccagcgaaacgtcatcttccgcctaagcgccgtattgctttctattgtaatcgtctaccggcctcgccgtagatcaggattcagcctgcaatacgactagacagtctcgccgccatgtctatgtatcctcaccaacgcggcatgccgcagaatgccactcgtctcaatgaattgctcgagcagattcggcaggaattcgacaatcaggtcaggatcaacgagaattatgaccagcagattcagcagcagatccaagatgcgacccatatccgagacaaagtttaccagctcgagcaggcgcacatgcagatcaagcagaagtatgaggaggacatactcaacctccgccgccagctcgacgctgctcgaggaggtgcccctccgcagccgggcatgcctgggccgcagcacggcggtccttcagccggccctccgcctccctctatcggcgtgggcaacaatctattcggcggcatcatgacgggacagggccagggacagggcctgcctcctcagcccccgccgcctgagcatcaaccccccggagctcagcaacacatgcctcagccgcctccgggtcttcagggccctccgccacctccccctccaccgtcgcaggcgcctcctttccaactcggctatggacaaggccccggtcccaacggcttccccggtcaggcgccccagaccactgcctctcctggccccggcaagcgtggtattggcagacctcctgccgcggggcccgctacccctcagatcaacacccctctgccatacgctggcccgggagcatcgccgcaggttcctaaccaccctacgcctgatcatcgagtcgttcacccacaagctcccaatcccatggtaaacaatgcactgggcgagctggatcccgagcgcgtgcccgctcatgtcaagaagacgcgtgacgactggtttgtcatcttcaaccaggctgtacctcgtgtgttggatgtcgacctagtccacaccttgtcacacgaaagcgtcgtctgctgtgtccgattcagtcatgacggcaagtatgtggccactggctgcaaccggtctgcccagatttacgatgttaataccggtgagaaagtctgcgtcttgcaggacgagaacgccgacgtgacgggtgacctgtacattcgaagtgtgtgcttcagccctgatggcaagtacttggctactggtgctgaagacaagctcattcgtgtctgggatatcgccaaccgcacgatccgtaacacatttgctggtcacgagcaagatatctactcgctggattttgcccgtgatggccgcactattgcctcaggaagtggcgacagaactgtccgactttgggacatcgagaacagctccaatatcttgaccctcactatcgaggacggtgtcacgactgtggctatttctccggataccaagtatgtcgctgctggctcactcgacaagagcgtgcgcgtctgggatatcatgcagggctacctgctcgagcgcctggagggacccgatggccataaagatagcgtctattccgtcgctttctcgccaagtggcaaggagcttgtcagtggtagcttggacaagacgatcaagatgtgggagttgtccacctcgagaattaacggtaacgctggccctaagggaggcagatgcatcaagacattcgagggtcacagagatttcgttttgagcgtcgcccttacgcctgatgccaactgggtcatgtccggatccaaggatcgtggggtacagttctgggacccgcgaaccggttgtactcaactgatgttgcagggccacaaaaattcagtcatctccgttgctcccagccccacaggcggcttctttgccaccggctcaggcgacatgagggcccgaatctggtcgtaccggacactgactcagtaggaggaggcactgatcatggtaaaagaagatcctcgcttcgcttcatcgaacagtcgaataagggaaattcgacgaacaaactaccttcgaacaaacggaatcgtcccatagggcctggtttttgtatgggatattatggacaggagggcggcgaagcgctagaggtcaacctgtgagaatatgtggacttactgggaaaggagggcttggttgtgtaggaagagtggaaacaatacaactgtcagaatcatgtttgtgttttagttcaattattgcagactgtaggctcaaaaactcgagacttcaagatgagtatattttaaaacaacgataacagcctctttatgattttaatacagtctgctcaatttcaatggtgaattatgcaataaaagtgaccgcaagatgaccctaatgggttggctctggagtaaatcaatgcttgaaaatcggtttattaaagatgttgtgggtatggtatctaacaaggttacgtggtctctacacgagccccttgaataaatcatcgaactcatcgccctttttggctttcttctttgtcttcttggtgcgtgggtctttggtagacatctctttggattctggtatcggctttgccttcttatttggcctggcatcctcggtgtcgtcttgggtagaggggagacgcttgattggtgggcctgttgacgatggtgtcgatggtgacgactttgcggatttggttgctgatgagagattgatctgtggttttgatgatgattgtgggattggactctcgtcgatgtctagatccgggattttatgtttcttccttttgcggaggagttctacggcgtcgcgggagattgtcttgcctccgcttgtggggagtgcgtcttgcgttgtttggagacttgatgatgactgattttctatactctgtctgatactctgagcctcgggtttggcagtcccgggagttaagaattctccctcggggggcgactcagggcccgaagacttcggctcagggcccacgagctgacatgcagcgtggacttgtgataaagcgcttaaga

SEQ ID NO: 23572 - DNA, 882 bp, Muscodor strobelii
  misc_feature: SGI cDNA ID NO. 568022
  misc_feature: Encodes the peptide sequence at SEQ ID NO 23573
tttcggtgctattccagctcaagtcaatatttacctaccggcacccgcaatgttgtgtattgggttatagcggtctctattgggatcaattccgtcttttacatcagtcttctcttctcgtacatctttcaatgctggccacgaaacaagatctggcttggtgatgcggtctcgggcaaatgtaccaacgctgaagaggtgaacctcagctcaggagtgctcaatgtcatatccgatattgaagccctactcatccccggttgggccatctggcacctctcaatgcccgtccgacgcaaactcgctgccttttcggtcttcgccgtgtatctgattgccatcttcacgggtattgggggcctatatatccgcgtccggaccctgtcgaccgcggaccagacttggtggtctacaaagctcgcgttgattgtgatcgccgaaatctcgattgtcatatttgtcggttgtatgcccttctttcctcggctataccatcacaaacgcagacttagtccagtcgccaacaccgcacctcagtccagctctgggatcgcaaccttcggctcgtccggtaaatccgcgaagtctcgcaaaagcgacaggctgttacatagttttgctaagtacatgggtccgcgtggtgctggcatgacttcactggatactcagaacggctttgatgaggaggacagatttgagctgcgcaaacacatcgccgcatctgctagtgctggtgtagctacacctgcaatgtacacccatacggaagagttccagagtgccggcaaaggcgctgctctcgaatcgaacggcgcccagaatagcatctggaagacaaatcaagtcgagcagacctactccaggcggtcgagcaacaattga

SEQ ID NO: 23573 - protein, 293 aa, Muscodor strobelii
  misc_feature: SGI Peptide ID NO. 568022
  misc_feature (13)..(288): NCBI GI: 169614171 Blast Desc: SNOG_10221 [Phaeosphaeria nodorum SN15] gi|111061436|gb|EAT82556.1| SNOG_10221 [Phaeosphaeria nodorum SN15]
  misc_feature (13)..(171): NCBI GI: 189197019 Blast Desc: conserved [Pyrenophora tritici-repentis Pt-1C-BFP] gi|187980795|gb|EDU47421.1| conserved [Pyrenophora tritici-repentis Pt-1C-BFP]
  misc_feature (10)..(199): NCBI GI: 164423873 Blast Desc: NCU07769 [Neurospora crassa OR74A] gi|157070267|gb|EAA29027.2| [Neurospora crassa OR74A]
  misc_feature (10)..(199): NCBI GI: 16945439 Blast Desc: related to integral membrane protein PTH11 [Neurospora crassa]
  misc_feature (16)..(166): NCBI GI: 67528508 Blast Desc: AN4452.2 [Aspergillus nidulans FGSC A4] gi|40741027|gb|EAA60217.1| AN4452.2 [Aspergillus nidulans FGSC A4] gi|259482731|tpe|CBF77490.1| TPA: 60S ribosomal protein L36
  misc_feature (14)..(205): NCBI GI: 156057637 Blast Desc: SS1G_04550 [Sclerotinia sclerotiorum 1980] gi|154702335|gb|EDO02074.1| SS1G_04550 [Sclerotinia sclerotiorum 1980]
  misc_feature (34)..(205): NCBI GI: 189198722 Blast Desc: conserved [Pyrenophora tritici-repentis Pt-1C-BFP] gi|187982797|gb|EDU48285.1| conserved [Pyrenophora tritici-repentis Pt-1C-BFP]
  misc_feature (16)..(168): NCBI GI: 238489453 Blast Desc: conserved [Aspergillus flavus NRRL3357] gi|220698352|gb|EED54692.1| conserved [Aspergillus flavus NRRL3357]
  misc_feature (35)..(229): NCBI GI: 46118775 Blast Desc: FG04731.1 [Gibberella zeae PH-1]
  misc_feature (34)..(277): NCBI GI: 169609565 Blast Desc: SNOG_07874 [Phaeosphaeria nodorum SN15] gi|111063030|gb|EAT84150.1| SNOG_07874 [Phaeosphaeria nodorum SN15]
FRCYSSSSQYLPTGTRNVVYWVIAVSIGINSVFYISLLFSYIFQCWPRNKIWLGDAVSGKCTNAEEVNLSSGVLNVISDIEALLIPGWAIWHLSMPVRRKLAAFSVFAVYLIAIFTGIGGLYIRVRTLSTADQTWWSTKLALIVIAEISIVIFVGCMPFFPRLYHHKRRLSPVANTAPQSSSGIATFGSSGKSAKSRKSDRLLHSFAKYMGPRGAGMTSLDTQNGFDEEDRFELRKHIAASASAGVATPAMYTHTEEFQSAGKGAALESNGAQNSIWKTNQVEQTYSRRSSNN

SEQ ID NO: 23574 - DNA, 771 bp, Muscodor strobelii
  misc_feature: SGI EST ID NO. CUFF.55427.0
  misc_feature: Variant of the nucleotide sequence at SEQ ID NO 23572
attgggggcctatatatccgcgtccggaccctgtcgaccgcggaccagacttggtggtctacaaagctcgcgttgattgtgatcgccgaaatctcgattgtcatatttgtcggttgtatgcccttctttcctcggctataccatcacaaacgcagacttagtccagtcgccaacaccgcacctcagtccagctctgggatcgcaaccttcggctcgtccggtaaatccgcgaagtctcgcaaaagcgacaggctgttacatagttttgctaagtacatgggtccgcgtggtgctggcatgacttcactggatactcagaacggctttgatgaggaggacagatttgagctgcgcaaacacatcgccgcatctgctagtgctggtgtagctacacctgcaatgtacacccatacggaagagttccagagtgccggcaaaggcgctgctctcgaatcgaacggcgcccagaatagcatctggaagacaaatcaagtcgagcagacctactccaggcggtcgagcaacaattgaggtagaatgagttcaacgagatagaagagtgataagactattgtaaaggtcataattgatcttgaagtgcgccgaacgttccttgtcgtaccatatgctggcctacgggcgctctgaaacatcagcgaaagaacctattacgctgactcacgaactttcatttgtaaacaaggcatcgccgtagctacgatacgcctatttggtatcggcatacacagctttgcggaaaattaggcttcg

SEQ ID NO: 23575 - DNA, 1644 bp, Muscodor strobelii
  misc_feature: SGI cDNA ID NO. 568023
  misc_feature: Encodes the peptide sequence at SEQ ID NO 23576
atgacggcagctccagagcttccagtcatcatcgtgccattatgccttggtgtgatcctgcacctgggtcttttcatccgcggtgaatggcatctccatgccgcgagtatcttcttgacccacgctctcgtctttttactactgcatgccaatcagctgatctctgtctccgcaacttgggatgaggtcacgctggccttcgtggtctatctttgtggcctccttttcagtatgagtctatataggctctacttccatcgcctgagatcattcccaggccctcgccgtacggcactgacaaagctatggcatgcttggctgtgcagaaactccaagaaccatcttgtgttagactcatggcgtcagaagtatgggtcctttgtcaggacaggcccgagcgagattaccatctttcaccctgcagggctcgaatggttagacggagccctcaatcacaatgccagatccgactggtatgatctcttgtatccaagtattgggattttcagtagggatcctgcaatccaggcctcccgtcggaaggtttgggacaaggcaatgtcattttctgccacgaaacaatatcacgaaagaatcgcaaaccacaccaacaaactcgagagcatcatcagtgcggagaaagacaggcccttagtcatcaacgacttgatataccagatgaccttcgatgtgctcaacgacattggctttagcggcgtcgcgaatgtggagggcaaagatggggcttccatattgggttcgtcgctcggtatgctcgggcttaccaccccagtcccttggatcctgaggttcttgtttgctttacttcccagtatctggaaaattccgcactggttcaagttggccgagcttattggtgttatggtagagcaaagggtgaagatgtcgattgagctgacaggattgcaaaagagtaaaccagagtcggttgacatcgcttcattcttcattgaagactcccaacgccagagcgcagatgcgaccagccgtgaagccgtcgcaggtgattccggcattgtgctgatagcaggaagcaccacgggaccagttctcatcttcgtcttgtactgcctcgcccgctggcccgagcatgcagaaaagattcgccaggagctgcggaatgtagacttcaaagacatgacggcattatctgcgctaccgcatctcacagctaccatcaaagagtcgcagagactctatcccgcgggaccaacatttggatcgcggcaaactcctcctgaaggcctcgattgtgatggcgtacatataccaggaggcatcaaagtcatcgcgccgcgctggagcctcggacgactcgaagaagccttcgaggcaccgcacgattttgttcctgaacgctggtacagtaagaccgagatggttaaagacaggagagcattcgccccttttgccattggccgtaacagctgcgctggcaaaaagatagcaatgtcgcagataaggttaacaattgccatacttctctacaaatactctatatcttttgcccccgggacggcaaatggcgagcttgtggaaaaggatatgaaagatcaactgatctcacttcccggtgaattgaagctggtttttaggacactggaaacacagctgtgttcatag

SEQ ID NO: 23576 - protein, 547 aa, Muscodor strobelii
  misc_feature: SGI Peptide ID NO. 568023
  misc_feature (92)..(538): Pfam Id: PF00067 Pfam Desc: Cytochrome P450
  misc_feature (353)..(538): Pfam Id: PF00067 Pfam Desc: Cytochrome P450
  misc_feature (220)..(542): NCBI GI: 169614173 Blast Desc: SNOG_10222 [Phaeosphaeria nodorum SN15] gi|160707291|gb|EAT82557.2| SNOG_10222 [Phaeosphaeria nodorum SN15]
  misc_feature (16)..(539): NCBI GI: 171691038 Blast Desc: protein product [Podospora anserina] gi|170945467|emb|CAP71579.1| protein product [Podospora anserina]
  misc_feature (7)..(538): NCBI GI: 121720148 Blast Desc: benzoate 4-monooxygenase cytochrome P450 [Aspergillus clavatus NRRL 1] gi|119404984|gb|EAW15346.1| benzoate 4-monooxygenase cytochrome P450 [Aspergillus clavatus NRRL 1]
  misc_feature (1)..(543): NCBI GI: 242771984 Blast Desc: benzoate 4-monooxygenase cytochrome P450, [Talaromyces stipitatus ATCC 10500] gi|218721570|gb|EED20988.1| benzoate 4-monooxygenase cytochrome P450, [Talaromyces stipitatus ATCC
  misc_feature (130)..(538): NCBI GI: 242805794 Blast Desc: cytochrome P450, [Talaromyces stipitatus ATCC 10500] gi|218715231|gb|EED14653.1| cytochrome P450, [Talaromyces stipitatus ATCC 10500]
  misc_feature (12)..(479): NCBI GI: 255950776 Blast Desc: Pc22g22610 [Penicillium chrysogenum Wisconsin 54-1255] gi|211593172|emb|CAP99549.1| Pc22g22610 [Penicillium chrysogenum Wisconsin 54-1255]
  misc_feature (17)..(539): NCBI GI: 154313035 Blast Desc: BC1G_05519 [Botryotinia fuckeliana B05.10] gi|150849604|gb|EDN24797.1| BC1G_05519 [Botryotinia fuckeliana B05.10]
  misc_feature (39)..(538): NCBI GI: 145257250 Blast Desc: An04g02950 [Aspergillus niger] gi|134058574|emb|CAK96461.1| protein product [Aspergillus niger]
  misc_feature (16)..(538): NCBI GI: 145258880 Blast Desc: An04g08440 [Aspergillus niger] gi|134074816|emb|CAK38931.1| protein product [Aspergillus niger]
  misc_feature (17)..(544): NCBI GI: 67516649 Blast Desc: AN0606.2 [Aspergillus nidulans FGSC A4] gi|40747549|gb|EAA66705.1| AN0606.2 [Aspergillus nidulans FGSC A4] gi|259489127|tpe|CBF89142.1| TPA: (Eurofung) [Aspergillus A4]
  misc_feature (84)..(516): SWISSPROT Homolog: EC 1.14.13.98 Cholesterol 24-hydroxylase
MTAAPELPVIIVPLCLGVILHLGLFIRGEWHLHAASIFLTHALVFLLLHANQLISVSATWDEVTLAFVVYLCGLLFSMSLYRLYFHRLRSFPGPRRTALTKLWHAWLCRNSKNHLVLDSWRQKYGSFVRTGPSEITIFHPAGLEWLDGALNHNARSDWYDLLYPSIGIFSRDPAIQASRRKVWDKAMSFSATKQYHERIANHTNKLESIISAEKDRPLVINDLIYQMTFDVLNDIGFSGVANVEGKDGASILGSSLGMLGLTTPVPWILRFLFALLPSIWKIPHWFKLAELIGVMVEQRVKMSIELTGLQKSKPESVDIASFFIEDSQRQSADATSREAVAGDSGIVLIAGSTTGPVLIFVLYCLARWPEHAEKIRQELRNVDFKDMTALSALPHLTATIKESQRLYPAGPTFGSRQTPPEGLDCDGVHIPGGIKVIAPRWSLGRLEEAFEAPHDFVPERWYSKTEMVKDRRAFAPFAIGRNSCAGKKIAMSQIRLTIAILLYKYSISFAPGTANGELVEKDMKDQLISLPGELKLVFRTLETQLCS

SEQ ID NO: 23577 - DNA, 507 bp, Muscodor strobelii
  misc_feature: SGI EST ID NO. CUFF.55446.0
  misc_feature: Variant of the nucleotide sequence at SEQ ID NO 23575
cgtacatataccaggaggcatcaaagtcatcgcgccgcgctggagcctcggacgactcgaagaagccttcgaggcaccgcacgattttgttcctgaacgctggtacagtaagaccgagatggttaaagacaggagagcattcgccccttttgccattggccgtaacagctgcgctggcaaaaagatagcaatgtcgcagataaggttaacaattgccatacttctctacaaatactctatatcttttgcccccgggacggcaaatggcgagcttgtggaaaaggatatgaaagatcaactgatctcacttcccggtgaattgaagctggtttttaggacactggaaacacagctgtgttcataggagatgacaggatgacgttcatcagagcgttgttgagctggagattagagacacatatgtacagttcttgtttaagctataaggagtattgctcgttgacaaatggtaacagcaataatacaacaataacagataggaaattt

SEQ ID NO: 23578 - DNA, 1395 bp, Muscodor strobelii
  misc_feature: SGI cDNA ID NO. 568024
  misc_feature: Encodes the peptide sequence at SEQ ID NO 23579
atgaagtctgcttgtctccttcttgccttgtcggcagcagctggtgtcattgcctcattcggcgagcttcctgagcatgtcccaaggaacgtgcaagagttccgcgaaaagcacccctacaagccctctcacgggtgtggtggcgggaagcgaccaatcacgaccatccggagctctagaaatgacaccgatgatgtgtcggacgagttcttgcgcggattgcacaaggcaaaccatggcggtaccttgtatctccctaaggacaagctgtttgtcattggcaagcctctcgatctgacctttctcaatgatgtccaggtccactgggacggtgaggtcaagttcacaaacgacacgccatactggcaggccaatgccttcacacatcccttccagaactctattatgttctggaagtggggaggcaaggatattaagatctacggtgatggagtgctcaacgggaacggtcagcgctggtggaatgagttcgctgggctcgagattcttgatccagacaatgagtacctccgaccaatcctcttctatgctgagaatgccaccaacttcgcgatggagggtatccatgagaaagactcgccctgctggaccaacttcattgtcacatcccaggatatctcattcaagaacgtcatcgtcacagccgagtccaacaacgcctcggctcttcccaagaacaccgacttcttcgactctctcaatgttgtcaatcttgaagttgagaaggtgtgggtcaatattggagatgactgcttctcgcctaagtccaacgcaaccaacatacacgttgacactatgtactgtaatgtcataggtactcacggccaatctatgggatctgtcggtcagtatgagggagagtatagctacattcaggatgtagtcatcgagaacgtttggctgctcaatggccaacatggcgcccgtatcaagacgtgggctggcccggatgttggctatggctttgctgataatgtgacttttagaaacttctggcaagcggctaatgaatactcggccttcctcgattcatgctacttcaatattgacgccgagacctgcgctacctatcctagccagatgaatatcactaatatcctatttgaaaacttcactggatacacttcgggcaagtacggaacagctgttgccaggctgacgtgttctaccaaccccaacgctgtgtgcgaaaatatccaattccgaaactttaacattacctcaccctgcggtgatgctgtcgtcatttgtgacggcattaaaggtggacttggagagactggttgcgtgccatccaactcgaccgaggctgttgcagcactcagcgcgacgtgttcggtgcctcaggctactactgtcttcggaccttggtga

SEQ ID NO: 23579 - protein, 464 aa, Muscodor strobelii
  misc_feature: SGI Peptide ID NO. 568024
  misc_feature (86)..(440): Pfam Id: PF00295 Pfam Desc: Glycosyl hydrolases family 28
  misc_feature (145)..(337): Pfam Id: PF00295 Pfam Desc: Glycosyl hydrolases family 28
  misc_feature (1)..(458): NCBI GI: 109945238 Blast Desc: exopolygalacturonase [Fusarium oxysporum f. sp. radicis-lycopersici] gi|109945302|dbj|BAE97088.1| exopolygalacturonase [Fusarium oxysporum f. sp. [Fusarium f. sp.
  misc_feature (1)..(458): NCBI GI: 62898620 Blast Desc: exo-polygalacturonase [Fusarium oxysporum f. sp. radicis-lycopersici]
  misc_feature (1)..(458): NCBI GI: 13378332 Blast Desc: AF136444_1 exopolygalacturonase [Fusarium oxysporum f. sp. radicis-lycopersici]
  misc_feature (1)..(458): NCBI GI: 109945232 Blast Desc: exopolygalacturonase [Fusarium oxysporum f. sp. lycopersici] gi|109945236|dbj|BAE97055.1| exopolygalacturonase [Fusarium oxysporum f. sp. lycopersici] exopolygalacturonase f.
  misc_feature (1)..(458): NCBI GI: 268549263 Blast Desc: exopolygalacturonate [Fusarium oxysporum f. cubense]
  misc_feature (1)..(458): NCBI GI: 109945292 Blast Desc: exopolygalacturonase [Fusarium oxysporum f. sp. melonis] gi|109945320|dbj|BAE97097.1| exopolygalacturonase [Fusarium oxysporum f. sp. tulipae] gi|109945322|dbj|BAE97098.1|
  misc_feature (1)..(458): NCBI GI: 109945234 Blast Desc: exopolygalacturonase [Fusarium oxysporum f. sp. lycopersici] gi|109945276|dbj|BAE97075.1| exopolygalacturonase [Fusarium oxysporum f. sp. lycopersici] exopolygalacturonase f.
  misc_feature (1)..(458): NCBI GI: 63108396 Blast Desc: exo-polygalacturonase [Fusarium oxysporum f. sp. radicis-lycopersici]
  misc_feature (1)..(458): NCBI GI: 62898618 Blast Desc: exo-polygalacturonase [Fusarium oxysporum f. sp. radicis-lycopersici]
  misc_feature (1)..(458): NCBI GI: 62898616 Blast Desc: exo-polygalacturonase [Fusarium oxysporum f. sp. radicis-lycopersici]
  misc_feature (49)..(436): SWISSPROT Homolog: EC 3.2.1.67 Galacturan 1,4-alpha-galacturonidase
MKSACLLLALSAAAGVIASFGELPEHVPRNVQEFREKHPYKPSHGCGGGKRPITTIRSSRNDTDDVSDEFLRGLHKANHGGTLYLPKDKLFVIGKPLDLTFLNDVQVHWDGEVKFTNDTPYWQANAFTHPFQNSIMFWKWGGKDIKIYGDGVLNGNGQRWWNEFAGLEILDPDNEYLRPILFYAENATNFAMEGIHEKDSPCWTNFIVTSQDISFKNVIVTAESNNASALPKNTDFFDSLNVVNLEVEKVWVNIGDDCFSPKSNATNIHVDTMYCNVIGTHGQSMGSVGQYEGEYSYIQDVVIENVWLLNGQHGARIKTWAGPDVGYGFADNVTFRNFWQAANEYSAFLDSCYFNIDAETCATYPSQMNITNILFENFTGYTSGKYGTAVARLTCSTNPNAVCENIQFRNFNITSPCGDAVVICDGIKGGLGETGCVPSNSTEAVAALSATCSVPQATTVFGPW

SEQ ID NO: 23580 - DNA, 138 bp, Muscodor strobelii
  misc_feature: SGI EST ID NO. CUFF.55453.0
  misc_feature: Variant of the nucleotide sequence at SEQ ID NO 23578
ctcgattcatgctacttcaatattgacgccgagacctgcgctacctatcctagccagatgaatatcactaatatcctatttgaaaacttcactggatacacttcgggcaagtacggaacagctgttgccaggctgacg

SEQ ID NO: 23581 - DNA, 1248 bp, Muscodor strobelii
  misc_feature: SGI cDNA ID NO. 568025
  misc_feature: Encodes the peptide sequence at SEQ ID NO 23582
atgtctgtaacagggagccaatttcctcgacgttcgacttggaacatgggcatgcgctttaacccatatcatgatgttatgttcaacattcaggatacgcttccccacgacaagatcaaggccaaggtctcaccaggatattccggccgcgatactccaggccttgaggctatcatcgatgaacaagtgattaaccttataagtgccatggagagatactatgtcaatgatcctagagatccaaacgcaaaattcattgctatggatttgagtaaaatactacctctgttcaccttggatgtcatatctcatcttaccttgggaaaagagttcggctgtcttagcgaaaaccgcgatattcaccacttttatgatacactagaggagttcttcccggttatggcggtatcgacagatgttccttggatacgacgcatcctttactcgaagattggcctctggtttattggaccccgggagtccgacaagaaaggactgggcaagctgatgaaaatgacaaataaccatgtgcgcgagagataccaagaaaacgcgccgaaacaacatgacatgctagggtcattcaagcggcatgggctcactcaagcggagtgtgaatccgagcttctcttctcgttcgttgccggatcggacacaacagccactgtgctcaggctgatgatgctctacgtcattatttctccgttggtgtaccagaaactgaaatctgaagtaatgttggcagttcatgacgggagagtatctcatccaataacatctgccgaagcaaagagattgccgtatctccaggcagtcatatacgaaggaatgcgaatgcgaccagtagcaaatagtctcttcccaaaagaaatcccacccggaggcgataccataaacgggcattatctaccagctggcacggcaattggaatgaacttggcgtcgatgttgcgatccaaagccacttttggcgatgatgcggatttatttcgacccgaacgcttcctagatgcaagcgaggaggagtgcgcagaaagatttcgcgtcgtcgatttaacctttggtacggggagatggatgtgctcaggcaagcctattgcatggcacgaactgaacaaagttccgtttgagctcttacgcgaattcgatattcagctcatcgaccacaagcttcctccctcgcgctaccatggattcattgtggacggaacttggcccgtatacgtgactcgaacaactggcccctga

SEQ ID NO: 23582 - protein, 415 aa, Muscodor strobelii
  misc_feature: SGI Peptide ID NO. 568025
  misc_feature (1)..(411): Pfam Id: PF00067 Pfam Desc: Cytochrome P450
  misc_feature (213)..(411): Pfam Id: PF00067 Pfam Desc: Cytochrome P450
  misc_feature (1)..(388): NCBI GI: 46109770 Blast Desc: FG01767.1 [Gibberella zeae PH-1]
  misc_feature (10)..(414): NCBI GI: 51490962 Blast Desc: cytochrome P450 monooxygenase [Botryotinia fuckeliana]
  misc_feature (10)..(378): NCBI GI: 154309274 Blast Desc: BC1G_07531 [Botryotinia fuckeliana B05.10] gi|150852355|gb|EDN27547.1| BC1G_07531 [Botryotinia fuckeliana B05.10]
  misc_feature (10)..(388): NCBI GI: 171680444 Blast Desc: protein product [Podospora anserina] gi|170939849|emb|CAP65074.1| protein product [Podospora anserina]
  misc_feature (11)..(402): NCBI GI: 85094228 Blast Desc: NCU05848 [Neurospora crassa OR74A] gi|28921295|gb|EAA30603.1| [Neurospora crassa OR74A]
  misc_feature (11)..(392): NCBI GI: 39972649 Blast Desc: cytochrome P450 monooxygenase, [Magnaporthe grisea 70-15] gi|145016837|gb|EDK01267.1| cytochrome P450 monooxygenase, [Magnaporthe grisea 70-15]
  misc_feature (11)..(377): NCBI GI: 116194093 Blast Desc: CHGG_06764 [Chaetomium globosum CBS 148.51] gi|88182677|gb|EAQ90145.1| CHGG_06764 [Chaetomium globosum CBS 148.51]
  misc_feature (11)..(413): NCBI GI: 169615603 Blast Desc: SNOG_10960 [Phaeosphaeria nodorum SN15] gi|111060339|gb|EAT81459.1| SNOG_10960 [Phaeosphaeria nodorum SN15]
  misc_feature (10)..(399): NCBI GI: 39942624 Blast Desc: MGG_03392 [Magnaporthe grisea 70-15] gi|145015591|gb|EDK00081.1| MGG_03392 [Magnaporthe grisea 70-15]
  misc_feature (19)..(405): NCBI GI: 121711972 Blast Desc: benzoate 4-monooxygenase cytochrome P450 [Aspergillus clavatus NRRL 1] gi|119401753|gb|EAW12175.1| benzoate 4-monooxygenase cytochrome P450 [Aspergillus clavatus NRRL 1]
  misc_feature (20)..(400): SWISSPROT Homolog: EC 1.14.13.12 Benzoate 4-monooxygenase
MSVTGSQFPRRSTWNMGMRFNPYHDVMFNIQDTLPHDKIKAKVSPGYSGRDTPGLEAIIDEQVINLISAMERYYVNDPRDPNAKFIAMDLSKILPLFTLDVISHLTLGKEFGCLSENRDIHHFYDTLEEFFPVMAVSTDVPWIRRILYSKIGLWFIGPRESDKKGLGKLMKMTNNHVRERYQENAPKQHDMLGSFKRHGLTQAECESELLFSFVAGSDTTATVLRLMMLYVIISPLVYQKLKSEVMLAVHDGRVSHPITSAEAKRLPYLQAVIYEGMRMRPVANSLFPKEIPPGGDTINGHYLPAGTAIGMNLASMLRSKATFGDDADLFRPERFLDASEEECAERFRVVDLTFGTGRWMCSGKPIAWHELNKVPFELLREFDIQLIDHKLPPSRYHGFIVDGTWPVYVTRTTGP

SEQ ID NO: 23583 - DNA, 1946 bp, Muscodor strobelii
  misc_feature: SGI EST ID NO. CUFF.55510.0
  misc_feature: Variant of the nucleotide sequence at SEQ ID NO 23581
cgtgaatggaatatcgcatgatcgtgatctccataggtgaaagtatataaaaatgactaatgtgcaccttttactcatcgagccctctctcgttattatcaagaaagcaaccctagcttattctcaaatactagacagcctcgctgcattacgatagccttctttgtcaagcattacgatacatcacaagatgataatatcaagccagttattatctgctaatctgacatacatcccattcattattgccgtcgttctaatcggctggtatgtcacatcaacaatctatagctggcgaagacttcgccacgtacccggcccacgtttggcgtcattctcgtatttctggattgcgaacgtggattggcaaggaaagcaatacgatgagtatcgagtgtttggggagaagtacggcccgctggtgaggatcggtccaaatgatgtgataagcgacgacccggagataatacggcgaatgtctgtaacagggagccaatttcctcgacgttcgacttggaacatgggcatgcgctttaacccatatcatgatgttatgttcaacattcaggatacgcttccccacgacaagatcaaggccaaggtctcaccaggatattccggccgcgatactccaggccttgaggctatcatcgatgaacaagtgattaaccttataagtgccatggagagatactatgtcaatgatcctagagatccaaacgcaaaattcattgctatggatttgagtaaaatactacctctgttcaccttggatgtcatatctcatcttaccttgggaaaagagttcggctgtcttagcgaaaaccgcgatattcaccacttttatgatacactagaggagttcttcccggttatggcggtatcgacagatgttccttggatacgacgcatcctttactcgaagattggcctctggtttattggaccccgggagtccgacaagaaaggactgggcaagctgatgaaaatgacaaataaccatgtgcgcgagagataccaagaaaacgcgccgaaacaacatgacatgctagggtcattcaagcggcatgggctcactcaagcggagtgtgaatccgagcttctcttctcgttcgttgccggatcggacacaacagccactgtgctcaggctgatgatgctctacgtcattatttctccgttggtgtaccagaaactgaaatctgaagtaatgttggcagttcatgacgggagagtatctcatccaataacatctgccgaagcaaagagattgccgtatctccaggcagtcatatacgaaggaatgcgaatgcgaccagtagcaaatagtctcttcccaaaagaaatcccacccggaggcgataccataaacgggcattatctaccagctggcacggcaattggaatgaacttggcgtcgatgttgcgatccaaagccacttttggcgatgatgcggatttatttcgacccgaacgcttcctagatgcaagcgaggaggagtgcgcagaaagatttcgcgtcgtcgatttaacctttggtacggggagatggatgtgctcaggcaagcctattgcatggcacgaactgaacaaagttccgtttgagctcttacgcgaattcgatattcagctcatcgaccacaagcttcctccctcgcgctaccatggattcattgtggacggaacttggcccgtatacgtgactcgaacaactggcccctgagatataagagaaagaactatcttgtgatactattctcaagagattgatcgcattgtttcggactacttggggtttgaaatgctagatcaggatacaaatgttgtttaggagaggacacccttatcatccggccaggcatgaaaaagccaaacatatggtagacacaagaaagtctagagaagttaatattccacgtgcaacatgtcttgtagtaaatctggac

SEQ ID NO: 23584 - DNA, 1005 bp, Muscodor strobelii
  misc_feature: SGI cDNA ID NO. 568026
  misc_feature: Encodes the peptide sequence at SEQ ID NO 23585
atgtccaacgaaatcaaggcatggacatttacacacggaggttttcctgatgcgctccacctcaatcgaatacggttcgaccgaacccatctcaaagcttcggaagttctcgtcagagttaagacagcatccttgaacccagttgacgttcagttaatgggctatccattattgaaacatatgccaaactcactcttgccatctgaaaagggtgttggcgaagattttgctggcattattgaagaggcagggccggattcgggcttcaagcgcggtgacgaagtccttgggattggaccttttctaccgagcggaactctgcaagagaccattaggatagatacaaagtctagccagtcactcgtagtgcgaaagcctgcggattggtcttgggaacaggccggggcattaccacttgtctggctgactgcgcgtacgctcgtcgaaggagtcgtttcgcatgtaaaaaataacaaggtggcagtacttgggggtagctcgagctgtggtatgtatgcagttcatcttgcacaccaacgcggatgggaagtcattgccacgtgctcgagccgcaacacggacttcgtcaaaagtatgggagcaacagaaacaatcgactatactctgggtggtgttcaacagagactcaaatcatttgcacccgacgccgtcatcgactgtgttggtgggacagacagtataggtgttgcgaagagatatgtcactgtcgtcggtgataagacaaaccgtatgtctatggggggagccttgatttatcttggaaacccaaggatggttctacgcacagtaataggatggactggactcattccatcatacgcatgtttcaatctcagcctcaagccatcatacctgcaagaactgctgtgtttaccgaaggagaagatcatcattgatagcacttacggctttgaacacacgaaggaggcattcgacaggttaaacacgggtcgtaccagaggcaaagttgtggtcgtttcttag

SEQ ID NO: 23585 - protein, 334 aa, Muscodor strobelii
  misc_feature: SGI Peptide ID NO. 568026
  misc_feature (33)..(125): Pfam Id: PF08240 Pfam Desc: Alcohol dehydrogenase GroES-like domain
  misc_feature (156)..(288): Pfam Id: PF00107 Pfam Desc: Zinc-binding dehydrogenase
  misc_feature (156)..(242): Pfam Id: PF00107 Pfam Desc: Zinc-binding dehydrogenase
  misc_feature (40)..(332): NCBI GI: 189200633 Blast Desc: reticulon-4-interacting protein 1, mitochondrial precursor [Pyrenophora tritici-repentis Pt-1C-BFP] gi|187983752|gb|EDU49240.1| reticulon-4-interacting protein 1,
  misc_feature (34)..(332): NCBI GI: 169622663 Blast Desc: SNOG_14558 [Phaeosphaeria nodorum SN15] gi|160704824|gb|EAT78098.2| SNOG_14558 [Phaeosphaeria nodorum SN15]
  misc_feature (1)..(332): NCBI GI: 255724616 Blast Desc: conserved [Candida tropicalis MYA-3404] gi|240135128|gb|EER34682.1| conserved [Candida tropicalis MYA-3404]
  misc_feature (34)..(332): NCBI GI: 50412939 Blast Desc: DEHA0B04983g [Debaryomyces hansenii CBS767] gi|49652849|emb|CAG85179.1| DEHA2B05104p [Debaryomyces hansenii]
  misc_feature (1)..(332): NCBI GI: 262100448 Blast Desc: alcohol dehydrogenase, [Phytophthora infestans T30-4]
  misc_feature (4)..(332): NCBI GI: 50412933 Blast Desc: DEHA0B04961g [Debaryomyces hansenii CBS767] gi|49652848|emb|CAG85178.1| DEHA2B05082p [Debaryomyces hansenii]
  misc_feature (6)..(332): NCBI GI: 255724642 Blast Desc: conserved [Candida tropicalis MYA-3404] gi|240135141|gb|EER34695.1| conserved [Candida tropicalis MYA-3404]
  misc_feature (5)..(332): NCBI GI: 262109878 Blast Desc: alcohol dehydrogenase, [Phytophthora infestans T30-4]
  misc_feature (31)..(332): NCBI GI: 50420595 Blast Desc: DEHA0D09350g [Debaryomyces hansenii CBS767] gi|49654501|emb|CAG86980.1| DEHA2D08580p [Debaryomyces hansenii]
  misc_feature (1)..(332): NCBI GI: 262109871 Blast Desc: alcohol dehydrogenase, [Phytophthora infestans T30-4]
  misc_feature (36)..(332): SWISSPROT Homolog: EC 1.6.5.5 NADPH:quinone reductase
MSNEIKAWTFTHGGFPDALHLNRIRFDRTHLKASEVLVRVKTASLNPVDVQLMGYPLLKHMPNSLLPSEKGVGEDFAGIIEEAGPDSGFKRGDEVLGIGPFLPSGTLQETIRIDTKSSQSLVVRKPADWSWEQAGALPLVWLTARTLVEGVVSHVKNNKVAVLGGSSSCGMYAVHLAHQRGWEVIATCSSRNTDFVKSMGATETIDYTLGGVQQRLKSFAPDAVIDCVGGTDSIGVAKRYVTVVGDKTNRMSMGGALIYLGNPRMVLRTVIGWTGLIPSYACFNLSLKPSYLQELLCLPKEKIIIDSTYGFEHTKEAFDRLNTGRTRGKVVVVS

SEQ ID NO: 23586 - DNA, 952 bp, Muscodor strobelii
  misc_feature: SGI EST ID NO. CUFF.55488.0
  misc_feature: Variant of the nucleotide sequence at SEQ ID NO 23584
gattcgggcttcaagcgcggtgacgaagtccttgggattggaccttttctaccgagcggaactctgcaagagaccattaggatagatacaaagtctagccagtcactcgtagtgcgaaagcctgcggattggtcttgggaacaggccggggcattaccacttgtctggctgactgcgcgtacgctcgtcgaaggagtcgtttcgcatgtaaaaaataacaaggtggcagtacttgggggtagctcgagctgtggtatgtatgcagttcatcttgcacaccaacgcggatgggaagtcattgccacgtgctcgagccgcaacacggacttcgtcaaaagtatgggagcaacagaaacaatcgactatactctgggtggtgttcaacagagactcaaatcatttgcacccgacgccgtcatcgactgtgttggtgggacagacagtataggtgttgcgaagagatatgtcactgtcgtcggtgataagacaaaccgtatgtctatggggggagccttgatttatcttggaaacccaaggatggttctacgcacagtaataggatggactggactcattccatcatacgcatgtttcaatctcagcctcaagccatcatacctgcaagaactgctgtgtttaccgaaggagaagatcatcattgatagcacttacggctttgaacacacgaaggaggcattcgacaggttaaacacgggtcgtaccagaggcaaagttgtggtcgtttcttagtgtctaagggcagcagtgaggcagtggcaggaatatgtgtgctactcaagacgactactgcgcaagtagaatactaagagagtattggcatctcgttgttctaacagtacgaggctacgtcagcgccttgtaaaggtacgtataggttaggagaccggatctggacgcaatcttgtccgtgcgtaactcttggtcatttgtg

SEQ ID NO: 23587 - DNA, 1185 bp, Muscodor strobelii
  misc_feature: SGI cDNA ID NO. 568027
  misc_feature: Elevated expression when VOC is produced
  misc_feature: Encodes the peptide sequence at SEQ ID NO 23588
atgcagtctgccatatcgaccagtttcaccctggcaacgtgtctgcttccccttgttgcgggccatgggtatatgattgaaccatctagtcgcaccagacttggtgccgaggcagggatcgactcgtgtccggagtgcacaatccttgagcccgtcgcttcatggccagatcttgactctgccgaggttggccggagcgggatatgtggatataatgctcgcgtgagcgtggactacaatcgaccgtcaacccaatatggctggggcacagacactgtcacaacactcacagcagggtcgacaattgaggtacaatggtgcgtagaccataatggggatcatggcggaatgttcacgtatagactatgcaacgaccaatcaatcgtcgacaaattcttagatcctagctacacgcccaccgacacagagaagcaagcagccgaagattgtttcgaagaagggatattgccttgtactgatgttgacggccagacatgcgatttcagcgcagactgtgcagaaggtcagccatgctggcgcaatgattggtttacttgccatggtttcaacgcagacaagtgccagggtgtcgacaatgcagcgctgaattcgtgttacacgagcattgctggaggctatactgtcaccaagcgtgtcaagatccccgaagacttccccgcgagcggtcatacgctgctcaacttcaaatggaattcctttcaaactggacaaatttacctcagctgtgccgatgtcgccattgttggaggtagtggcggcggcagtggtggaagcacgacaacgacgacgacaacaaccaaaacatcaacatctactagctctaccttcacctctacctctactgcgtgtccttctaatgtggctgtgactttcaacgagaaggcaaccacagtgtacgggcaaacgatcaaagtcgttggatcaattccacaactcggaaattgggatactggagcagcgccagcaatgtctgctcaaggatacaccgattccaatcctctttggacctacactacgaatcttgctcctggcaccacatttgagtataagttcatcaatgtcgctcagtcgggcgcagtgacgtgggagagtgatccgaaccgttctttcacagtttcttcttcttgtgcagcaaaggtcaatgtggagactacatggcgttga

SEQ ID NO: 23588 - protein, 394 aa, Muscodor strobelii
  misc_feature: SGI Peptide ID NO. 568027
  misc_feature (293)..(389): Pfam Id: PF00686 Pfam Desc: Starch binding domain
  misc_feature (19)..(394): NCBI GI: 38524238 Blast Desc: related to glucoamylase precursor [Neurospora crassa]
  misc_feature (26)..(394): NCBI GI: 85110737 Blast Desc: NCU08746 [Neurospora crassa OR74A] gi|28925292|gb|EAA34371.1| conserved [Neurospora crassa OR74A]
  misc_feature (1)..(394): NCBI GI: 154319704 Blast Desc: BC1G_02333 [Botryotinia fuckeliana B05.10] gi|150855991|gb|EDN31183.1| BC1G_02333 [Botryotinia fuckeliana B05.10]
  misc_feature (19)..(394): NCBI GI: 261356947 Blast Desc: starch binding domain-containing protein [Verticillium albo-atrum VaMs.102]
  misc_feature (5)..(394): NCBI GI: 256727805 Blast Desc: NECHADRAFT_83307 [Nectria haematococca mpVI 77-13-4]
  misc_feature (17)..(394): NCBI GI: 156046276 Blast Desc: SS1G_09392 [Sclerotinia sclerotiorum 1980] gi|154693787|gb|EDN93525.1| SS1G_09392 [Sclerotinia sclerotiorum 1980]
  misc_feature (37)..(394): NCBI GI: 171677225 Blast Desc: protein product [Podospora anserina] gi|170936680|emb|CAP61339.1| protein product [Podospora anserina]
  misc_feature (8)..(394): NCBI GI: 145603948 Blast Desc: MGG_10208 [Magnaporthe grisea 70-15] gi|145012063|gb|EDJ96719.1| MGG_10208 [Magnaporthe grisea 70-15]
  misc_feature (30)..(394): NCBI GI: 189198073 Blast Desc: starch binding domain containing protein [Pyrenophora tritici-repentis Pt-1C-BFP] gi|187981322|gb|EDU47948.1| starch binding domain containing protein [Pyrenophora tritici-repentis
  misc_feature (21)..(394): NCBI GI: 119494507 Blast Desc: starch binding domain protein [Neosartorya fischeri NRRL 181] gi|119412311|gb|EAW22252.1| starch binding domain protein [Neosartorya fischeri NRRL 181]
  misc_feature: Useful for introducing or modulating the production of volatile compounds
MQSAISTSFTLATCLLPLVAGHGYMIEPSSRTRLGAEAGIDSCPECTILEPVASWPDLDSAEVGRSGICGYNARVSVDYNRPSTQYGWGTDTVTTLTAGSTIEVQWCVDHNGDHGGMFTYRLCNDQSIVDKFLDPSYTPTDTEKQAAEDCFEEGILPCTDVDGQTCDFSADCAEGQPCWRNDWFTCHGFNADKCQGVDNAALNSCYTSIAGGYTVTKRVKIPEDFPASGHTLLNFKWNSFQTGQIYLSCADVAIVGGSGGGSGGSTTTTTTTTKTSTSTSSTFTSTSTACPSNVAVTFNEKATTVYGQTIKVVGSIPQLGNWDTGAAPAMSAQGYTDSNPLWTYTTNLAPGTTFEYKFINVAQSGAVTWESDPNRSFTVSSSCAAKVNVETTWR

SEQ ID NO: 23589 - DNA, 1989 bp, Muscodor strobelii
  misc_feature: SGI EST ID NO. CUFF.55518.0
  misc_feature: Variant of the nucleotide sequence at SEQ ID NO 23587
ccacggaccagcgtagtatcaatgtacaatgatctgtgtcgtccatatctttggtagatgctaattgccgaacttacaagcaaagagcagggtcgatgccagccgcaaccttctttgccgccgaggggcgttagtgttgcttaagcttccgtccaagaatccatgtcaatcagtaaactagctttagaacaaaagcgtagcatgaaggaggttcgcgaagcagtcgcatcggatgctgctcctatataggtcggcggccctactcggcgtgttggttcggaccgtctcttaccaagggccagacgacactgcggagatgctagagataacagcgggcggcggtgacaagcaagcaacagcatctaagaaatgcatgatttcttcagttgatgcactcaactatatatgaaacctcccacgacgagatgttttgcattatcgagggtcaatcgttgatgaccacaccttgagtcgcataagtcaccacctccatctgccatatcgaccagtttcaccctggcaacgtgtctgcttccccttgttgcgggccatgggtatatgattgaaccatctagtcgcaccagacttggtgccgaggcagggatcgactcgtgtccggagtgcacaatccttgagcccgtcgcttcatggccagatcttgactctgccgaggttggccggagcgggatatgtggatataatgctcgcgtgagcgtggactacaatcgaccgtcaacccaatatggctggggcacagacactgtcacaacactcacagcagggtcgacaattgaggtacaatggtgcgtagaccataatggggatcatggcggaatgttcacgtatagactatgcaacgaccaatcaatcgtcgacaaattcttagatcctagctacacgcccaccgacacagagaagcaagcagccgaagattgtttcgaagaagggatattgccttgtactgatgttgacggccagacatgcgatttcagcgcagactgtgcagaaggtcagccatgctggcgcaatgattggtttacttgccatggtttcaacgcagacaagtgccagggtgtcgacaatgcagcgctgaattcgtgttacacgagcattgctggaggctatactgtcaccaagcgtgtcaagatccccgaagacttccccgcgagcggtcatacgctgctcaacttcaaatggaattcctttcaaactggacaaatttacctcagctgtgccgatgtcgccattgttggaggtagtggcggcggcagtggtggaagcacgacaacgacgacgacaacaaccaaaacatcaacatctactagctctaccttcacctctacctctactgcgtgtccttctaatgtggctgtgactttcaacgagaaggcaaccacagtgtacgggcaaacgatcaaagtcgttggatcaattccacaactcggaaattgggatactggagcagcgccagcaatgtctgctcaaggatacaccgattccaatcctctttggacctacactacgaatcttgctcctggcaccacatttgagtataagttcatcaatgtcgctcagtcgggcgcagtgacgtgggagagtgatccgaaccgttctttcacagtttcttcttcttgtgcagcaaaggtcaatgtggagactacatggcgttgattgcaggcgcccggagagaaagactttatcttttgtttcaaagacgtgaacttgccgagtttcaaaggcaaagggtcacggacaagataccaccggcgaagataataaaagtagaactcggaacaatatgtcagaaccttcgatgtctttttgtctcgatatgccctatgctctctgaattctcacaccccgaatggtcacacgcaaagtactgtctagagtaactgaaacaatatatcaatgtgcacatcaatgcggatggctttggggtgtagagttacgagtttcatgacagaagagttgtaaacaagatcgatc

SEQ ID NO: 23590 - DNA, 1866 bp, Muscodor strobelii
  misc_feature: SGI cDNA ID NO. 568028
  misc_feature: Encodes the peptide sequence at SEQ ID NO 23591
atgaagagctacatggccgcaaagattcttggccctctggcacagacagtactagcggctacatccagtactgttctctcgaggcttgatcaatttattgaattacaacgagatacatctctgcagggcgtcttgaacaatatcggacccgatggctctatggtcccgggggctccggctggcatcgtggtggccagtccctcaaagacgaacccgaactattattacacctggggccgtgattcgggactcgcgatgaagatgctggtggacgagctagttctcggaaattcccatgttgagcgttacattgatgattatgttcattcccaggccgttcttcaaaccgtgtcaaatccccttggcacattcttccctgctgggttgtcaattggacaagcgagattcaatatcgatgaaacacgctggattgataagagaccccagaaagatggtcctgcattacgttcaatcgcattgattgcttattgtcattggctgatatctaacggcaaggttgacaaggcaagagatgttgtatggccagtgatctcaaacgacgtcgcgtacacgggtcaatattggaatgagtcgactgtcgagatctgggaagggctggactgctcaaccttctttactacccaagttcaataccgaatgctagtggaagcggaagcgcttgcgagtaccctcagttattcgtgccacagctgcaaggaggcgtcacagatatcctgtttcttgaaatcatattggaatggcaagttcatcctcgccaacatcaatattgttgtcgatccagaaaatcgaacaggcatagacgcgagcacgattctaggctctatcgccgtcttcgatatcaatgcaccttgcaatgactcgagtatccagccttgtaacagcaaagccttggcaaatttcaaaacagtcatcgacattttccgcaacgattcacagtacccgatcaacagcgggattccgaccaatcggggcgttgcagtgggaagattcgcagaagatacatataacgggaacccttggtatttaacaactgcggcagcggctgaattcttatacgatgctatcggacaatggagagcacaacgatacgtcaaaatcgatgaaacgtcactcgcatttttcaaggatctatatccaaatgcgcaagacaagacgtacgttgcacggaatcatgacaaaaattcggaattcgattgcatcatcggagcaatcctcgcatatgcagactcgttcgtgtcagttattcagcaatatacccctgcaaatgggtcattgtcagagcaattcaacaaaacatggcctgggtcgccaacttcggcacacgatctgacatggtcttacacggcattcgtcaccatgtctcggcgacgtgcgcatcaatggggcctgtcatgggtcaagcagccatcgccgcgacggccattcaaatgtgttcacagctctactattggccattattcgccggcgcgagaggcgggcgcaccggacgtaagggaagactgtttgtcgaatattctatttacagtggacgtgccctcttcttcagatgagaatgtgtttctctcgggcaatacggtggacctaggacgttgggatcctaccacatggtggactcttgatgcttctaactacactgctgagcaacctatgtggtccgttagcgttcccatgtcagccggaaagagagtgatatatggctatatcagacaaaagaaatcaagttcacagagagagtcgctggttttcgagtcagtaaatcgaactctgactgttccatcatgtcatgtcgacacagatccagatcagatattatggagaacagatgatacttggaatacttcatag

SEQ ID NO: 23591 - protein, 621 aa, Muscodor strobelii
  misc_feature: SGI Peptide ID NO. 568028
  misc_feature (509)..(608): Pfam Id: PF00686 Pfam Desc: Starch binding domain
  misc_feature (38)..(462): Pfam Id: PF00723 Pfam Desc: Glycosyl hydrolases family 15
  misc_feature (509)..(601): Pfam Id: PF00686 Pfam Desc: Starch binding domain
  misc_feature (7)..(618): NCBI GI: 461509 Blast Desc: AMYG_HORRE RecName: Full=Glucoamylase P; AltName: Full=Glucan 1,4-alpha-glucosidase; AltName: Full=1,4-alpha-D-glucan glucohydrolase; Flags: Precursor 1, P P
  misc_feature (1)..(601): NCBI GI: 156032806 Blast Desc: SS1G_13809 [Sclerotinia sclerotiorum 1980] gi|154699211|gb|EDN98949.1| SS1G_13809 [Sclerotinia sclerotiorum 1980]
  misc_feature (28)..(619): NCBI GI: 171688444 Blast Desc: protein product [Podospora anserina] gi|170944184|emb|CAP70294.1| protein product [Podospora anserina]
  misc_feature (29)..(605): NCBI GI: 261352263 Blast Desc: glucoamylase P [Verticillium albo-atrum VaMs.102]
  misc_feature (29)..(618): NCBI GI: 12666724 Blast Desc: glucoamylase [Talaromyces emersonii]
  misc_feature (29)..(613): NCBI GI: 61658242 Blast Desc: glucoamylase precursor [Thermomyces lanuginosus]
  misc_feature (29)..(613): NCBI GI: 146330532 Blast Desc: glucoamylase [Thermomyces lanuginosus]
  misc_feature (1)..(613): NCBI GI: 240105344 Blast Desc: glucoamylase precursor, [Coccidioides posadasii C735 delta SOWgp]
  misc_feature (1)..(613): NCBI GI: 119194357 Blast Desc: CIMG_01553 [Coccidioides immitis RS]
  misc_feature (29)..(577): NCBI GI: 169624056 Blast Desc: SNOG_15278 [Phaeosphaeria nodorum SN15] gi|111056091|gb|EAT77211.1| SNOG_15278 [Phaeosphaeria nodorum SN15]
  misc_feature (7)..(618): SWISSPROT Homolog: EC 3.2.1.3 Glucan 1,4-alpha-glucosidase
MKSYMAAKILGPLAQTVLAATSSTVLSRLDQFIELQRDTSLQGVLNNIGPDGSMVPGAPAGIVVASPSKTNPNYYYTWGRDSGLAMKMLVDELVLGNSHVERYIDDYVHSQAVLQTVSNPLGTFFPAGLSIGQARFNIDETRWIDKRPQKDGPALRSIALIAYCHWLISNGKVDKARDVVWPVISNDVAYTGQYWNESTVEIWEGLDCSTFFTTQVQYRMLVEAEALASTLSYSCHSCKEASQISCFLKSYWNGKFILANINIVVDPENRTGIDASTILGSIAVFDINAPCNDSSIQPCNSKALANFKTVIDIFRNDSQYPINSGIPTNRGVAVGRFAEDTYNGNPWYLTTAAAAEFLYDAIGQWRAQRYVKIDETSLAFFKDLYPNAQDKTYVARNHDKNSEFDCIIGAILAYADSFVSVIQQYTPANGSLSEQFNKTWPGSPTSAHDLTWSYTAFVTMSRRRAHQWGLSWVKQPSPRRPFKCVHSSTIGHYSPAREAGAPDVREDCLSNILFTVDVPSSSDENVFLSGNTVDLGRWDPTTWWTLDASNYTAEQPMWSVSVPMSAGKRVIYGYIRQKKSSSQRESLVFESVNRTLTVPSCHVDTDPDQILWRTDDTWNTS

SEQ ID NO: 23592 - DNA, 847 bp, Muscodor strobelii
  misc_feature: SGI EST ID NO. CUFF.55521.0
  misc_feature: Variant of the nucleotide sequence at SEQ ID NO 23590
cgagtatccagccttgtaacagcaaagccttggcaaatttcaaaacagtcatcgacattttccgcaacgattcacagtacccgatcaacagcgggattccgaccaatcggggcgttgcagtgggaagattcgcagaagatacatataacgggaacccttggtatttaacaactgcggcagcggctgaattcttatacgatgctatcggacaatggagagcacaacgatacgtcaaaatcgatgaaacgtcactcgcatttttcaaggatctatatccaaatgcgcaagacaagacgtacgttgcacggaatcatgacaaaaattcggaattcgattgcatcatcggagcaatcctcgcatatgcagactcgttcgtgtcagttattcagcaatatacccctgcaaatgggtcattgtcagagcaattcaacaaaacatggcctgggtcgccaacttcggcacacgatctgacatggtcttacacggcattcgtcaccatgtctcggcgacgtgcgcatcaatggggcctgtcatgggtcaagcagccatcgccgcgacggccattcaaatgtgttcacagctctactattggccattattcgccggcgcgagaggcgggcgcaccggacgtaagggaagactgtttgtcgaatattctatttacagtggacgtgccctcttcttcagatgagaatgtgtttctctcgggcaatacggtggacctaggacgttgggatcctaccacatggtggactcttgatgcttctaactacactgctgagcaacctatgtggtccgttagcgttcccatgtcagccggaaagagagtgatatatggctatatcag

SEQ ID NO: 23593 - DNA, 1047 bp, Muscodor strobelii
  misc_feature: SGI cDNA ID NO. 568029
  misc_feature: Encodes the peptide sequence at SEQ ID NO 23594
atgtcttccccgacgatggaatacgtccgcctggggaagagcgggcttaagatttctaaagtgatcctgggctgtatgtcatttgggtcgagtaaatgggagggctctccttggattctcgatgaggaggatagcttgaaggtcgttaaggctgcttgggacagcgggattaatacttgggacacggcagacacttactcaaacggaaaatccgaaatgatacttggcaatgcacttaagaagttcaacatcccacgtagtaaagtcgtcatcatgtctaagatctataaccccgttatggatgatgattcgagaccacattctgtgaacgatggccctcttgttaatcagatgggcttgagcagaaaacatgtgttcgaagcagtggacagatgtctagagcgcctgggtacagattatatcgacgtcctacaaattcatcgcctcgatcgcgagacggaaccggaagagatcatgcgggcgttgcacgagatcgtagtaagtggtaaagtacggtatctcggtgcctctagtatgtacacttgggagttcgcacgcctgcaatacacagctcagttacagggatggaccgagttcatcagtatgcaaccattctacaacttattataccgtgaagaggaacgtgaaatgctccccttctgccgcgctactggtgttggcgttgtgccttggagtcccatcgcgcgtggcatgctagctaagccacgaggggccacaatatctacttccggcgaagcggagagcagtagttcgagaacagatagtgacgcgaagacaaaaaagtggttcgccgatgccaacatggaaattgtcgatgccgtggaaaagatcgcgcgcgacagagacgtcagcatggccgttatatctatagcatgggtcttgaagaaagggtgttggccaattgtgggcttgaacagcgaaagaagggttcaagaagtggtgaaggcgctgagtgtcaagctcacagacgaagagtgtgcctttctcgaggctaaatatcgaccaaggaatgtggagggaatgtga

SEQ ID NO: 23594 - protein, 348 aa, Muscodor strobelii
  misc_feature: SGI Peptide ID NO. 568029
  misc_feature (12)..(341): Pfam Id: PF00248 Pfam Desc: Aldo/keto reductase family
  misc_feature (6)..(347): NCBI GI: 46109854 Blast Desc: FG01809.1 [Gibberella zeae PH-1]
  misc_feature (6)..(348): NCBI GI: 256721048 Blast Desc: [Nectria haematococca mpVI 77-13-4]
  misc_feature (3)..(348): NCBI GI: 145601733 Blast Desc: MGG_08619 [Magnaporthe grisea 70-15] gi|145010242|gb|EDJ94898.1| MGG_08619 [Magnaporthe grisea 70-15]
  misc_feature (3)..(348): NCBI GI: 261360568 Blast Desc: voltage-gated potassium channel subunit beta-2 [Verticillium albo-atrum VaMs.102]
  misc_feature (10)..(347): NCBI GI: 256729201 Blast Desc: NECHADRAFT_95664 [Nectria haematococca mpVI 77-13-4]
  misc_feature (4)..(348): NCBI GI: 115398209 Blast Desc: conserved [Aspergillus terreus NIH2624] gi|114192887|gb|EAU34587.1| conserved [Aspergillus terreus NIH2624]
  misc_feature (4)..(348): NCBI GI: 169765646 Blast Desc: [Aspergillus oryzae RIB40] gi|83765149|dbj|BAE55292.1| protein product [Aspergillus oryzae]
  misc_feature (6)..(348): NCBI GI: 145250885 Blast Desc: An15g04210 [Aspergillus niger] gi|134082481|emb|CAK97288.1| protein product [Aspergillus niger]
  misc_feature (6)..(348): NCBI GI: 238482229 Blast Desc: oxidoreductase, [Aspergillus flavus NRRL3357] gi|220700403|gb|EED56741.1| oxidoreductase, [Aspergillus flavus NRRL3357]
  misc_feature (2)..(348): NCBI GI: 255954987 Blast Desc: Pc21g12150 [Penicillium chrysogenum Wisconsin 54-1255] gi|211589957|emb|CAP96112.1| Pc21g12150 [Penicillium chrysogenum Wisconsin 54-1255]
  misc_feature (15)..(336): SWISSPROT Homolog: EC 1.1.1.91 Aryl-alcohol dehydrogenase (NADP(+))
MSSPTMEYVRLGKSGLKISKVILGCMSFGSSKWEGSPWILDEEDSLKVVKAAWDSGINTWDTADTYSNGKSEMILGNALKKFNIPRSKVVIMSKIYNPVMDDDSRPHSVNDGPLVNQMGLSRKHVFEAVDRCLERLGTDYIDVLQIHRLDRETEPEEIMRALHEIVVSGKVRYLGASSMYTWEFARLQYTAQLQGWTEFISMQPFYNLLYREEEREMLPFCRATGVGVVPWSPIARGMLAKPRGATISTSGEAESSSSRTDSDAKTKKWFADANMEIVDAVEKIARDRDVSMAVISIAWVLKKGCWPIVGLNSERRVQEVVKALSVKLTDEECAFLEAKYRPRNVEGM

SEQ ID NO: 23595 - DNA, 727 bp, Muscodor strobelii
  misc_feature: SGI EST ID NO. CUFF.55528.0
  misc_feature: Variant of the nucleotide sequence at SEQ ID NO 23593
gcacgagatcgtagtaagtggtaaagtacggtatctcggtgcctctagtatgtacacttgggagttcgcacgcctgcaatacacagctcagttacagggatggaccgagttcatcagtatgcaaccattctacaacttattataccgtgaagaggaacgtgaaatgctccccttctgccgcgctactggtgttggcgttgtgccttggagtcccatcgcgcgtggcatgctagctaagccacgaggggccacaatatctacttccggcgaagcggagagcagtagttcgagaacagatagtgacgcgaagacaaaaaagtggttcgccgatgccaacatggaaattgtcgatgccgtggaaaagatcgcgcgcgacagagacgtcagcatggccgttatatctatagcatgggtcttgaagaaagggtgttggccaattgtgggcttgaacagcgaaagaagggttcaagaagtggtgaaggcgctgagtgtcaagctcacagacgaagagtgtgcctttctcgaggctaaatatcgaccaaggaatgtggagggaatgtgaaaatcatgttggcgcttctagcttttcaagaccaattcttgaactcggacgatagcattggcctgatctgtatccgtgaactacccatttgcacggcgcaaagtgcatactattgggactctgggttctctagctagtatctgctagaaggagaatgcgccaaat

SEQ ID NO: 23596 - DNA, 1176 bp, Muscodor strobelii
  misc_feature: SGI cDNA ID NO. 568030
  misc_feature: Encodes the peptide sequence at SEQ ID NO 23597
atgtctactacaacgactcagcaaaacttcacaacgcagaaagttgcttcgtcaattgcaaggatcgatgttctcccatcagccacagtacagtgccatgcctctaatctcctagagcttccggataagacactaatttgtgtttggtttggagggacgcaagagggcacagacgacatctcaatctactcctcccgattggcccccagggaaaattcatggtcacaagctaaacgcgtctcatcagaccctgttcgcagtgagcagaaccctcttctcttccgcgatccagcaactggaaaaatctggctattgcatactgcgcaacctgctggcaaccaagaccaagcagttgttatagcgcgcacgtcagaagacagcggtaacacatggaccgatccgtatgaaccctttccagagaagaagggcctatttattagacagcccatcgtagtgctatctgaccaaacttgggtcctgccaatttggtactgtcgcgtacccgcaggctttcgttggattggtactgatgatatctccggcgtactctcgacaaaggatggcggcaagacgtggactgagactttggttccagagtcaacgggctgtgtgcacatgaatattgtcaccctcactgagggaaagggatatgccgcattctaccgcagccgctgggcggatcatatctatcgctctacatctttagatgcggtgaactggacgacgccggtccaaactagtctgccaaatcccaattctggtatatgcgcagtaacactgtcaaatggagacatcgctatcgtgttcaacgattcgagtgcgacagttgatatggaaaggcgcgagggtctctacgatgatatcactccagcaaacgacacgcgcgtgaaccagcccaatgtcgacgggaaaactgccatctggggcacgccacgaaaggcactctcgctcggattatcatcggacgatggtgtttcgtgggactataaaatacttgaggatggtgacggattctgcatgacaaatgactcaaaggggcggtcaaatcgtgagctcagttatccaagcatatttgttgatgactcgggcaacggcgtacatatcgcttacacattccaccgccagcatatcaaatatgttcgcattgacgatgtacgcgcttttgtaagaacttaa

SEQ ID NO: 23597 - protein, 391 aa, Muscodor strobelii
  misc_feature: SGI Peptide ID NO. 568030
  misc_feature (15)..(389): NCBI GI: 261360572 Blast Desc: glycosyl hydrolase [Verticillium albo-atrum VaMs.102]
  misc_feature (25)..(390): NCBI GI: 256721036 Blast Desc: NECHADRAFT_44471 [Nectria haematococca mpVI 77-13-4]
  misc_feature (25)..(391): NCBI GI: 46109856 Blast Desc: FG01810.1 [Gibberella zeae PH-1]
  misc_feature (17)..(384): NCBI GI: 255954997 Blast Desc: Pc21g12200 [Penicillium chrysogenum Wisconsin 54-1255] gi|211589962|emb|CAP96117.1| Pc21g12200 [Penicillium chrysogenum Wisconsin 54-1255]
  misc_feature (21)..(378): NCBI GI: 169765660 Blast Desc: [Aspergillus oryzae RIB40] gi|83765156|dbj|BAE55299.1| protein product [Aspergillus oryzae]
  misc_feature (1)..(384): NCBI GI: 145250895 Blast Desc: An15g04260 [Aspergillus niger] gi|134082486|emb|CAK97293.1| protein product [Aspergillus niger]
  misc_feature (1)..(382): NCBI GI: 283785231 Blast Desc: ROD_15131 [Citrobacter rodentium ICC168] gi|282948685|emb|CBG88277.1| conserved [Citrobacter rodentium ICC168]
  misc_feature (24)..(382): NCBI GI: 269915231 Blast Desc: glycosyl hydrolase, BNR repeat [Klebsiella variicola At-22] gi|269136543|gb|EEZ66986.1| glycosyl hydrolase, BNR repeat [Klebsiella variicola At-22]
  misc_feature (25)..(382): NCBI GI: 39947670 Blast Desc: MGG_08616 [Magnaporthe grisea 70-15] gi|145010238|gb|EDJ94894.1| MGG_08616 [Magnaporthe grisea 70-15]
  misc_feature (13)..(382): NCBI GI: 238024875 Blast Desc: bglu_2g15160 [Burkholderia glumae BGR1] gi|237879540|gb|ACR31872.1| bglu_2g15160 [Burkholderia glumae BGR1]
MSTTTTQQNFTTQKVASSIARIDVLPSATVQCHASNLLELPDKTLICVWFGGTQEGTDDISIYSSRLAPRENSWSQAKRVSSDPVRSEQNPLLFRDPATGKIWLLHTAQPAGNQDQAVVIARTSEDSGNTWTDPYEPFPEKKGLFIRQPIVVLSDQTWVLPIWYCRVPAGFRWIGTDDISGVLSTKDGGKTWTETLVPESTGCVHMNIVTLTEGKGYAAFYRSRWADHIYRSTSLDAVNWTTPVQTSLPNPNSGICAVTLSNGDIAIVFNDSSATVDMERREGLYDDITPANDTRVNQPNVDGKTAIWGTPRKALSLGLSSDDGVSWDYKILEDGDGFCMTNDSKGRSNRELSYPSIFVDDSGNGVHIAYTFHRQHIKYVRIDDVRAFVRT

SEQ ID NO: 23598 - DNA, 1066 bp, Muscodor strobelii
  misc_feature: SGI EST ID NO. CUFF.55533.0
  misc_feature: Variant of the nucleotide sequence at SEQ ID NO 23596
gtttggagggacgcaagagggcacagacgacatctcaatctactcctcccgattggcccccagggaaaattcatggtcacaagctaaacgcgtctcatcagaccctgttcgcagtgagcagaaccctcttctcttccgcgatccagcaactggaaaaatctggctattgcatactgcgcaacctgctggcaaccaagaccaagcagttgttatagcgcgcacgtcagaagacagcggtaacacatggaccgatccgtatgaaccctttccagagaagaagggcctatttattagacagcccatcgtagtgctatctgaccaaacttgggtcctgccaatttggtactgtcgcgtacccgcaggctttcgttggattggtactgatgatatctccggcgtactctcgacaaaggatggcggcaagacgtggactgagactttggttccagagtcaacgggctgtgtgcacatgaatattgtcaccctcactgagggaaagggatatgccgcattctaccgcagccgctgggcggatcatatctatcgctctacatctttagatgcggtgaactggacgacgccggtccaaactagtctgccaaatcccaattctggtatatgcgcagtaacactgtcaaatggagacatcgctatcgtgttcaacgattcgagtgcgacagttgatatggaaaggcgcgagggtctctacgatgatatcactccagcaaacgacacgcgcgtgaaccagcccaatgtcgacgggaaaactgccatctggggcacgccacgaaaggcactctcgctcggattatcatcggacgatggtgtttcgtgggactataaaatacttgaggatggtgacggattctgcatgacaaatgactcaaaggggcggtcaaatcgtgagctcagttatccaagcatatttgttgatgactcgggcaacggcgtacatatcgcttacacattccaccgccagcatatcaaatatgttcgcattgacgatgtacgcgcttttgtaagaacttaatcctagagcagcaattgaaactaccacgttaccaag

SEQ ID NO: 23599 - DNA, 561 bp, Muscodor strobelii
  misc_feature: SGI cDNA ID NO. 568031
  misc_feature: Encodes the peptide sequence at SEQ ID NO 23600
atgaatattgtcaccctcactgagggaaagggatatgccgcattctaccgcagccgctgggcggatcatatctatcgctctacatctttagatgcggtgaactggacgacgccggtccaaactagtctgccaaatcccaattctggtatatgcgcagtaacactgtcaaatggagacatcgctatcgtgttcaacgattcgagtgcgacagttgatatggaaaggcgcgagggtctctacgatgatatcactccagcaaacgacacgcgcgtgaaccagcccaatgtcgacgggaaaactgccatctggggcacgccacgaaaggcactctcgctcggattatcatcggacgatggtgtttcgtgggactataaaatacttgaggatggtgacggattctgcatgacaaatgactcaaaggggcggtcaaatcgtgagctcagttatccaagcatatttgttgatgactcgggcaacggcgtacatatcgcttacacattccaccgccagcatatcaaatatgttcgcattgacgatgtacgcgcttttgtaagaacttaa

SEQ ID NO: 23600 - protein, 186 aa, Muscodor strobelii
  misc_feature: SGI Peptide ID NO. 568031
  misc_feature (1)..(184): NCBI GI: 261360572 Blast Desc: glycosyl hydrolase [Verticillium albo-atrum VaMs.102]
  misc_feature (1)..(186): NCBI GI: 46109856 Blast Desc: FG01810.1 [Gibberella zeae PH-1]
  misc_feature (1)..(185): NCBI GI: 256721036 Blast Desc: NECHADRAFT_44471 [Nectria haematococca mpVI 77-13-4]
  misc_feature (1)..(179): NCBI GI: 67901886 Blast Desc: AN7930.2 [Aspergillus nidulans FGSC A4] gi|40740394|gb|EAA59584.1| AN7930.2 [Aspergillus nidulans FGSC A4] gi|259480678|tpe|CBF73543.1| TPA: conserved [Aspergillus FGSC
  misc_feature (1)..(179): NCBI GI: 255954997 Blast Desc: Pc21g12200 [Penicillium chrysogenum Wisconsin 54-1255] gi|211589962|emb|CAP96117.1| Pc21g12200 [Penicillium chrysogenum Wisconsin 54-1255]
  misc_feature (12)..(177): NCBI GI: 39947670 Blast Desc: MGG_08616 [Magnaporthe grisea 70-15] gi|145010238|gb|EDJ94894.1| MGG_08616 [Magnaporthe grisea 70-15]
  misc_feature (12)..(179): NCBI GI: 238482243 Blast Desc: conserved [Aspergillus flavus NRRL3357] gi|220700410|gb|EED56748.1| conserved [Aspergillus flavus NRRL3357]
  misc_feature (1)..(179): NCBI GI: 145250895 Blast Desc: An15g04260 [Aspergillus niger] gi|134082486|emb|CAK97293.1| protein product [Aspergillus niger]
  misc_feature (1)..(177): NCBI GI: 269915231 Blast Desc: glycosyl hydrolase, BNR repeat [Klebsiella variicola At-22] gi|269136543|gb|EEZ66986.1| glycosyl hydrolase, BNR repeat [Klebsiella variicola At-22]
  misc_feature (12)..(173): NCBI GI: 169765660 Blast Desc: [Aspergillus oryzae RIB40] gi|83765156|dbj|BAE55299.1| protein product [Aspergillus oryzae]
MNIVTLTEGKGYAAFYRSRWADHIYRSTSLDAVNWTTPVQTSLPNPNSGICAVTLSNGDIAIVFNDSSATVDMERREGLYDDITPANDTRVNQPNVDGKTAIWGTPRKALSLGLSSDDGVSWDYKILEDGDGFCMTNDSKGRSNRELSYPSIFVDDSGNGVHIAYTFHRQHIKYVRIDDVRAFVRT

SEQ ID NO: 23601 - DNA, 1066 bp, Muscodor strobelii; identical to SEQ ID NO: 23598
  misc_feature: SGI EST ID NO. CUFF.55533.0
  misc_feature: Variant of the nucleotide sequence at SEQ ID NO 23599

SEQ ID NO: 23602 - DNA, 1629 bp, Muscodor strobelii
  misc_feature: SGI cDNA ID NO. 568032
  misc_feature: Encodes the peptide sequence at SEQ ID NO 23603
atgggcggtggcacatcaatctgggcttctccagagtggaaatctgatccgaaggagatattcaacaaacgactgtttttcctttcaatcactgttgcccttgctggagcctcatatggattcgacactggcaatattgggggtgtcctgacattgcccagcttcaggagcgccttcggtctaaacaaactctcgcaggcccaggaagacgatcgtgaaggaaccttggcagcattagtggcggccggtggttcgggaggagcattgcttgcggcaccattctcagactttgttggccgaaaacaatcgatgattatctttggcggcttattcctgcttggaggggcatttcaggaaatccctatgctcaaagtattctacgctggccgcctccttgctggcgttgctattggagcaacttcgatgttggcgccgcagtatctcgctgagaactcgccgaagtcgattcgagggtctttgacgacaagctacaatctgtgcattcttctgggtctctctctagcgttctggattaactatggagtttcactttggcctaagtcttcaaatctacagtggcagcttgctctaggcattcaactcattcctggcggtgtcatgtttatactcctcttcttcgtgatcaatacccctcgagcgctcatcgcgaaaggtcaaagagaacgcggtcttacggacttgtgcaagcttcgaaacctgtccccagatcacccattccttcaatcagagtatcttgagatatgcgcccaagtcgatgctgagcaagagatcgccaagggaatgaactactggcaggtcatcaaagatattgcgaccattcgaagtaacacccgacgatttttcctcgccgcgacgttgttcctattccataaatttacgggcactgatagtctcaactactttctacccgagatctttgagcaaatcggcgtttctggaggctcgctacccctattaacaactggcgtatatggcatcgtcaaactgctcactaccgtcctttacgtaactgtcatcgtagatcgagttggccgcagacgcccgcttctccttggcgctgcaatgcaagctacgtcgatgttataccttgccctctatgtcagatttgccccaggcgcgacagagggaactggtacacccgcgggaggcattgtgggtatcattgtcatttatatctacgcttttggttggagctttggctggagcgtagcgccgtatgttgttgccgctgaaatatttcctgctcgtatccgttcgttctctatggccatttgtttcttcatcaattggattgtggattttggtatcaccaaagcgacacctgcattgatgacgcatcttggctggggcacatatctcttgtactcggtgcttacgtatatcggcgtggtgtttgtgtacttctgtatgcctgaattcaaaggacgaagtattgaatcgacggatgatttgttccaacactcgatctggaccatgtaccgtcacgcctatccaacagaggaagagaaagtgcgtcatgatgttaatgaacttatggcacacaaattagagggtgaagagaaggcgccggaactcgttgggacggttcaacacactgaaaaagcttga

SEQ ID NO: 23603 - protein, 542 aa, Muscodor strobelii
  misc_feature: SGI Peptide ID NO. 568032
  misc_feature (32)..(444): Pfam Id: PF07690 Pfam Desc: Major Facilitator Superfamily
  misc_feature (28)..(492): Pfam Id: PF00083 Pfam Desc: Sugar (and other) transporter
  misc_feature (74)..(444): Pfam Id: PF07690 Pfam Desc: Major Facilitator Superfamily
  misc_feature (1)..(540): NCBI GI: 145601727 Blast Desc: MGG_08617 [Magnaporthe grisea 70-15] gi|145010239|gb|EDJ94895.1| MGG_08617 [Magnaporthe grisea 70-15]
  misc_feature (1)..(526): NCBI GI: 261360573 Blast Desc: quinate permease [Verticillium albo-atrum VaMs.102]
  misc_feature (1)..(540): NCBI GI: 115398201 Blast Desc: conserved [Aspergillus terreus NIH2624] gi|114192883|gb|EAU34583.1| conserved [Aspergillus terreus NIH2624]
  misc_feature (1)..(536): NCBI GI: 238482245 Blast Desc: sugar transporter, [Aspergillus flavus NRRL3357] gi|220700411|gb|EED56749.1| sugar transporter, [Aspergillus flavus NRRL3357]
  misc_feature (1)..(536): NCBI GI: 169765662 Blast Desc: [Aspergillus oryzae RIB40] gi|83765157|dbj|BAE55300.1| protein product [Aspergillus oryzae]
  misc_feature (1)..(541): NCBI GI: 145250897 Blast Desc: An15g04270 [Aspergillus niger] gi|134082487|emb|CAK97294.1| protein product [Aspergillus niger]
  misc_feature (1)..(541): NCBI GI: 145601311 Blast Desc: MGG_14136 [Magnaporthe grisea 70-15] gi|145009318|gb|EDJ94029.1| MGG_14136 [Magnaporthe grisea 70-15]
  misc_feature (1)..(517): NCBI GI: 255954999 Blast Desc: Pc21g12210 [Penicillium chrysogenum Wisconsin 54-1255] gi|211589963|emb|CAP96118.1| Pc21g12210 [Penicillium chrysogenum Wisconsin 54-1255]
  misc_feature (1)..(517): NCBI GI: 259480679 Blast Desc: TPA: conserved [Aspergillus nidulans FGSC A4]
  misc_feature (1)..(511): NCBI GI: 67901888 Blast Desc: AN7931.2 [Aspergillus nidulans FGSC A4] gi|40740395|gb|EAA59585.1| AN7931.2 [Aspergillus nidulans FGSC A4]
MGGGTSIWASPEWKSDPKEIFNKRLFFLSITVALAGASYGFDTGNIGGVLTLPSFRSAFGLNKLSQAQEDDREGTLAALVAAGGSGGALLAAPFSDFVGRKQSMIIFGGLFLLGGAFQEIPMLKVFYAGRLLAGVAIGATSMLAPQYLAENSPKSIRGSLTTSYNLCILLGLSLAFWINYGVSLWPKSSNLQWQLALGIQLIPGGVMFILLFFVINTPRALIAKGQRERGLTDLCKLRNLSPDHPFLQSEYLEICAQVDAEQEIAKGMNYWQVIKDIATIRSNTRRFFLAATLFLFHKFTGTDSLNYFLPEIFEQIGVSGGSLPLLTTGVYGIVKLLTTVLYVTVIVDRVGRRRPLLLGAAMQATSMLYLALYVRFAPGATEGTGTPAGGIVGIIVIYIYAFGWSFGWSVAPYVVAAEIFPARIRSFSMAICFFINWIVDFGITKATPALMTHLGWGTYLLYSVLTYIGVVFVYFCMPEFKGRSIESTDDLFQHSIWTMYRHAYPTEEEKVRHDVNELMAHKLEGEEKAPELVGTVQHTEKA

SEQ ID NO: 23604 - DNA, 604 bp, Muscodor strobelii
  misc_feature: SGI EST ID NO. CUFF.55545.0
  misc_feature: Variant of the nucleotide sequence at SEQ ID NO 23602
tagcgttctggattaactatggagtttcactttggcctaagtcttcaaatctacagtggcagcttgctctaggcattcaacgtatgtgatatatcgcgctccttacaatggaacccgtctgcgagagctaacctcgatcccgtgaacatagtcattcctggcggtgtcatgtttatactcctcttcttcgtgatcaatacccctcgagcgctcatcgcgaaaggtcaaagagaacgcggtcttacggacttgtgcaagcttcgaaacctgtccccagatcacccattccttcaatcagagtatcttgagatatgcgcccaagtcgatgctgagcaagagatcgccaagggaatgaactactggcaggtcatcaaagatattgcgaccattcgaagtaacacccgacgatttttcctcgccgcgacgttgttcctattccataaatttacgggcactgatagtctcaactactttctacccgagatctttgagcaaatcggcgtttctggaggctcgctacccctattaacaactggcgtatatggcatcgtcaaactgctcactaccgtcctttacgtaactgtcatcgtagatcgagttggcc

SEQ ID NO: 23605 - DNA, 1695 bp, Muscodor strobelii
  misc_feature: SGI cDNA ID NO. 568033
  misc_feature: Encodes the peptide sequence at SEQ ID NO 23606
atgggcggtggcacatcaatctgggcttctccagagtggaaatctgatccgaaggagatattcaacaaacgactgtttttcctttcaatcactgttgcccttgctggagcctcatatggattcgacactggcaatattgggggtgtcctgacattgcccagcttcaggagcgccttcggtctaaacaaactctcgcaggcccaggaagacgatcgtgaaggaaccttggcagcattagtggcggccggtggttcgggaggagcattgcttgcggcaccattctcagactttgttggccgaaaacaatcgatgattatctttggcggcttattcctgcttggaggggcatttcaggaaatccctatgctcaaagtattctacgctggccgcctccttgctggcgttgctattggagcaacttcgatgttggcgccgcagtatctcgctgagaactcgccgaagtcgattcgagggtctttgacgacaagctacaatctgtgcattcttctgggtctctctctagcgttctggattaactatggagtttcactttggcctaagtcttcaaatctacagtggcagcttgctctaggcattcaactcattcctggcggtgtcatgtttatactcctcttcttcgtgatcaatacccctcgagcgctcatcgcgaaaggtcaaagagaacgcggtcttacggacttgtgcaagcttcgaaacctgtccccagatcacccattccttcaatcagagtatcttgagatatgcgcccaagtcgatgctgagcaagagatcgccaagggaatgaactactggcaggtcatcaaagatattgcgaccattcgaagtaacacccgacgatttttcctcgccgcgacgttgttcctattccataaatttacgggcactgatagtctcaactactttctacccgagatctttgagcaaatcggcgtttctggaggctcgctacccctattaacaactggcgtatatggcatcgtcaaactgctcactaccgtcctttacgtaactgtcatcgtagatcgagttggccgcagacgcccgcttctccttggcgctgcaatgcaagctacgtcgatgttataccttgccctctatgtcagatttgccccaggcgcgacagagggaactggtacacccgcgggaggcattgtgggtatcattgtcatttatatctacgcttttggttggagctttggctggagcgtagcgccgtatgttgttgccgctgaaatatttcctgctcgtatccgttcgttctctatggccatttgtttcttcatcaattggattgtggattttggtatcaccaaagcgacacctgcattgatgacgcatcttggctggggcacatatctcttgtactcggtgcttacgtatatcggcgtggtgtttgtgtacttctgtatgcctgaattcaaaggcaagatatgtcctcgccgtatctcctctcaacttagttttactaacgaaatgttcgcatctataggacgaagtattgaatcgacggatgatttgttccaacactcgatctggaccatgtaccgtcacgcctatccaacagaggaagagaaagtgcgtcatgatgttaatgaacttatggcacacaaattagagggtgaagagaaggcgccggaactcgttgggacggttcaacacactgaaaaagcttga

SEQ ID NO: 23606 - protein, 564 aa, Muscodor strobelii
  misc_feature: SGI Peptide ID NO. 568033
  misc_feature (32)..(444): Pfam Id: PF07690 Pfam Desc: Major Facilitator Superfamily
  misc_feature (28)..(500): Pfam Id: PF00083 Pfam Desc: Sugar (and other) transporter
  misc_feature (74)..(444): Pfam Id: PF07690 Pfam Desc: Major Facilitator Superfamily
  misc_feature (28)..(483): Pfam Id: PF00083 Pfam Desc: Sugar (and other) transporter
  misc_feature (1)..(562): NCBI GI: 145601727 Blast Desc: MGG_08617 [Magnaporthe grisea 70-15] gi|145010239|gb|EDJ94895.1| MGG_08617 [Magnaporthe grisea 70-15]
  misc_feature (1)..(548): NCBI GI: 261360573 Blast Desc: quinate permease [Verticillium albo-atrum VaMs.102]
  misc_feature (1)..(562): NCBI GI: 115398201 Blast Desc: conserved [Aspergillus terreus NIH2624] gi|114192883|gb|EAU34583.1| conserved [Aspergillus terreus NIH2624]
  misc_feature (1)..(558): NCBI GI: 238482245 Blast Desc: sugar transporter, [Aspergillus flavus NRRL3357] gi|220700411|gb|EED56749.1| sugar transporter, [Aspergillus flavus NRRL3357]
  misc_feature (1)..(558): NCBI GI: 169765662 Blast Desc: [Aspergillus oryzae RIB40] gi|83765157|dbj|BAE55300.1| protein product [Aspergillus oryzae]
  misc_feature (1)..(563): NCBI GI: 145250897 Blast Desc: An15g04270 [Aspergillus niger] gi|134082487|emb|CAK97294.1| protein product [Aspergillus niger]
  misc_feature (1)..(563): NCBI GI: 145601311 Blast Desc: MGG_14136 [Magnaporthe grisea 70-15] gi|145009318|gb|EDJ94029.1| MGG_14136 [Magnaporthe grisea 70-15]
  misc_feature (1)..(539): NCBI GI: 255954999 Blast Desc: Pc21g12210 [Penicillium chrysogenum Wisconsin 54-1255] gi|211589963|emb|CAP96118.1| Pc21g12210 [Penicillium chrysogenum Wisconsin 54-1255]
  misc_feature (1)..(539): NCBI GI: 259480679 Blast Desc: TPA: conserved [Aspergillus nidulans FGSC A4]
  misc_feature (1)..(533): NCBI GI: 67901888 Blast Desc: AN7931.2 [Aspergillus nidulans FGSC A4] gi|40740395|gb|EAA59585.1| AN7931.2 [Aspergillus nidulans FGSC A4]
MGGGTSIWASPEWKSDPKEIFNKRLFFLSITVALAGASYGFDTGNIGGVLTLPSFRSAFGLNKLSQAQEDDREGTLAALVAAGGSGGALLAAPFSDFVGRKQSMIIFGGLFLLGGAFQEIPMLKVFYAGRLLAGVAIGATSMLAPQYLAENSPKSIRGSLTTSYNLCILLGLSLAFWINYGVSLWPKSSNLQWQLALGIQLIPGGVMFILLFFVINTPRALIAKGQRERGLTDLCKLRNLSPDHPFLQSEYLEICAQVDAEQEIAKGMNYWQVIKDIATIRSNTRRFFLAATLFLFHKFTGTDSLNYFLPEIFEQIGVSGGSLPLLTTGVYGIVKLLTTVLYVTVIVDRVGRRRPLLLGAAMQATSMLYLALYVRFAPGATEGTGTPAGGIVGIIVIYIYAFGWSFGWSVAPYVVAAEIFPARIRSFSMAICFFINWIVDFGITKATPALMTHLGWGTYLLYSVLTYIGVVFVYFCMPEFKGKICPRRISSQLSFTNEMFASIGRSIESTDDLFQHSIWTMYRHAYPTEEEKVRHDVNELMAHKLEGEEKAPELVGTVQHTEKA

SEQ ID NO: 23607 - DNA, 604 bp, Muscodor strobelii; identical to SEQ ID NO: 23604
  misc_feature: SGI EST ID NO. CUFF.55545.0
  misc_feature: Variant of the nucleotide sequence at SEQ ID NO 23605

SEQ ID NO: 23608 - DNA, 915 bp, Muscodor strobelii
  misc_feature: SGI cDNA ID NO. 568034
  misc_feature: Encodes the peptide sequence at SEQ ID NO 23609
atgaaaatctttagcttattgtctaatctactatggttgggggctatagcagacgtccgaggagccgcaattccccggcggtcacctggcatagtggccaaggctggcaatcccgttgtgatcgactctaacggagtgtatatccgtggcagtcttagcaatgacggtagtctaattgccggctacacagctcacgagaacaatcaggcgatccttcgtctcgttcggtctactaatggcgatgatggtggcaagagcttcagctacctatcacaagtcgaacagcggtcacccgtcccgaacacccccagcggattgtgggagccttttcttcgtcttgctgcagatgggtcgttgcagtgttactattcctccgagaatagtagcagtgaccaagacggcttcatgaagcactcaagcgatggtgggaagacttggtcaagttccatccgcgtatcgggaggcgatcgcgtttcccgtgatggtatgataggtgttgcttctacaggcagctctcaaaacttaatagctgtatttgagaacaccgaaacagggtcgttcacagtcgattacgtcctgtcgcatgatggtggaaacacatggggtcaacgagggcggttgtatacaccacgcaacggcggtatggccggtgcccctcaaatttacaacgttggcggtactttggttgctagttttatgactaatgaggatgttccgggtcttgatgatcttgatggtggtcaaatgaaggttatcactagcacagatggcggccaaagttggagcggaagtgttgttacaggcgagactggctctcactggcccggactcttggctcgggatgctacgcattttcttgcactatattccagaaacgggcagggagccgtgagccagctctatcagctgcagtga

SEQ ID NO: 23609 - protein, 304 aa, Muscodor strobelii
  misc_feature: SGI Peptide ID NO. 568034
  misc_feature (82)..(296): NCBI GI: 164423150 Blast Desc: NCU11396 [Neurospora crassa OR74A] gi|157069969|gb|EDO64941.1| [Neurospora crassa OR74A]
  misc_feature (81)..(296): NCBI GI: 242805758 Blast Desc: conserved [Talaromyces stipitatus ATCC 10500] gi|218715223|gb|EED14645.1| conserved [Talaromyces stipitatus ATCC 10500]
  misc_feature (30)..(303): NCBI GI: 212538733 Blast Desc: conserved [Penicillium marneffei ATCC 18224] gi|210069264|gb|EEA23355.1| conserved [Penicillium marneffei ATCC 18224]
  misc_feature (82)..(304): NCBI GI: 171677370 Blast Desc: protein product [Podospora anserina] gi|170936753|emb|CAP61411.1| protein product [Podospora anserina]
  misc_feature (42)..(302): NCBI GI: 67538122 Blast Desc: AN5231.2 [Aspergillus nidulans FGSC A4] gi|40743222|gb|EAA62412.1| AN5231.2 [Aspergillus nidulans FGSC A4] gi|259484692|tpe|CBF81131.1| TPA: BNR/Asp-box repeat domain
  misc_feature (72)..(293): NCBI GI: 119483134 Blast Desc: BNR/Asp-box repeat protein, [Neosartorya fischeri NRRL 181] gi|119409750|gb|EAW19698.1| BNR/Asp-box repeat protein, [Neosartorya fischeri NRRL 181]
  misc_feature (56)..(293): NCBI GI: 255939346 Blast Desc: Pc16g00170 [Penicillium chrysogenum Wisconsin 54-1255] gi|211585065|emb|CAP92687.1| Pc16g00170 [Penicillium chrysogenum Wisconsin 54-1255]
  misc_feature (72)..(293): NCBI GI: 70986756 Blast Desc: BNR/Asp-box repeat domain protein [Aspergillus fumigatus Af293] gi|66846497|gb|EAL86829.1| BNR/Asp-box repeat domain protein [Aspergillus fumigatus Af293] BNR/Asp-box repeat
  misc_feature (82)..(293): NCBI GI: 121711735 Blast Desc: BNR/Asp-box repeat domain protein [Aspergillus clavatus NRRL 1] gi|119401634|gb|EAW12057.1| BNR/Asp-box repeat domain protein [Aspergillus clavatus NRRL 1]
  misc_feature (82)..(298): NCBI GI: 115401884 Blast Desc: conserved [Aspergillus terreus NIH2624] gi|114190471|gb|EAU32171.1| conserved [Aspergillus terreus NIH2624]
MKIFSLLSNLLWLGAIADVRGAAIPRRSPGIVAKAGNPVVIDSNGVYIRGSLSNDGSLIAGYTAHENNQAILRLVRSTNGDDGGKSFSYLSQVEQRSPVPNTPSGLWEPFLRLAADGSLQCYYSSENSSSDQDGFMKHSSDGGKTWSSSIRVSGGDRVSRDGMIGVASTGSSQNLIAVFENTETGSFTVDYVLSHDGGNTWGQRGRLYTPRNGGMAGAPQIYNVGGTLVASFMTNEDVPGLDDLDGGQMKVITSTDGGQSWSGSVVTGETGSHWPGLLARDATHFLALYSRNGQGAVSQLYQLQ

SEQ ID NO: 23610 - DNA, 528 bp, Muscodor strobelii
  misc_feature: SGI cDNA ID NO. 568035
  misc_feature: Encodes the peptide sequence at SEQ ID NO 23611
atgtcgtcggcagatacttgccccgcttctgcattcaacatcaggactcatctccctggtgatatgggtatgattgtgagccgtcatggctcattgtatgcgcgagaattcggatggggaactgcattcgagagcaagaccgcgcgtctagtcagtgacatccttgacaacttcgaccctgataaagagcgagtgtttataggggaatcaacggagacaaaagagtttcttggttccattgctttgctcaaatacagacaggagacgaacatagcgcagatccgtctgctacttgtcgaccccgcagctaggggcacaggtctgggagctggcctggttcgtggatgtattgcatttgcaagagaaaagggatataagaaaatcattctctggacttttggtgtattggaaggagctagaaggctatacagacgtgagggtttcgaaataacgaatgtagaagcagaaagagatcgctggggcacacctctcgctgaagagacttgggaactgatgttggaagattga

SEQ ID NO: 23611 - protein, 175 aa, Muscodor strobelii
  misc_feature: SGI Peptide ID NO. 568035
  misc_feature (68)..(149): Pfam Id: PF00583 Pfam Desc: Acetyltransferase (GNAT) family
  misc_feature (8)..(175): NCBI GI: 256727970 Blast Desc: NECHADRAFT_46149 [Nectria haematococca mpVI 77-13-4]
  misc_feature (1)..(175): NCBI GI: 70988843 Blast Desc: GNAT family N-acetyltransferase [Aspergillus fumigatus Af293] gi|66846905|gb|EAL87236.1| GNAT family N-acetyltransferase, [Aspergillus fumigatus Af293] GNAT family
  misc_feature (3)..(174): NCBI GI: 46133855 Blast Desc: FG09067.1 [Gibberella zeae PH-1]
  misc_feature (8)..(173): NCBI GI: 116621700 Blast Desc: MarR family transcriptional regulator [Solibacter usitatus Ellin6076] gi|116224862|gb|ABJ83571.1| transcriptional regulator, MarR family with acetyltransferase activity Solibacter
  misc_feature (1)..(174): NCBI GI: 119497883 Blast Desc: GNAT family N-acetyltransferase, [Neosartorya fischeri NRRL 181] gi|119413863|gb|EAW23802.1| GNAT family N-acetyltransferase, [Neosartorya fischeri NRRL 181]
  misc_feature (3)..(173): NCBI GI: 212539446 Blast Desc: GNAT family N-acetyltransferase, [Penicillium marneffei ATCC 18224] gi|210067177|gb|EEA21269.1| GNAT family N-acetyltransferase, [Penicillium marneffei ATCC 18224]
  misc_feature (8)..(173): NCBI GI: 115433334 Blast Desc: ATEG_08183 [Aspergillus terreus NIH2624] gi|114189656|gb|EAU31356.1| ATEG_08183 [Aspergillus terreus NIH2624]
  misc_feature (6)..(170): NCBI GI: 121710922 Blast Desc: GNAT family acetyltransferase, [Aspergillus clavatus NRRL 1] gi|119401227|gb|EAW11651.1| GNAT family acetyltransferase, [Aspergillus clavatus NRRL 1]
  misc_feature (14)..(174): NCBI GI: 239815215 Blast Desc: transcriptional regulator, MarR family with acetyltransferase activity [Variovorax paradoxus S110] gi|239801792|gb|ACS18859.1| transcriptional regulator, MarR with
  misc_feature (8)..(175): NCBI GI: 254396869 Blast Desc: MarR-family transcriptional regulator [Streptomyces pristinaespiralis ATCC 25486] gi|197720581|gb|EDY64489.1| MarR-family transcriptional regulator [Streptomyces ATCC 25486]
MSSADTCPASAFNIRTHLPGDMGMIVSRHGSLYAREFGWGTAFESKTARLVSDILDNFDPDKERVFIGESTETKEFLGSIALLKYRQETNIAQIRLLLVDPAARGTGLGAGLVRGCIAFAREKGYKKIILWTFGVLEGARRLYRREGFEITNVEAERDRWGTPLAEETWELMLED

SEQ ID NO: 23612 - DNA, 729 bp, Muscodor strobelii
  misc_feature: SGI EST ID NO. CUFF.55561.0
  misc_feature: Variant of the nucleotide sequence at SEQ ID NO 23610
tacagcaatcactcgatgctcgtcgcaaactcaaatgcaacacgaagatagtatattgtatatatgtgttaagacacacctagtcgcgttgcagcgaagttgtacgtcaattgtcacacgaattgacgatgtcgtcggcagatacttgccccgcttctgcattcaacatcaggactcatctccctggtgatatgggtatgattgtgagccgtcatggctcattgtatgcgcgagaattcggatggggaactgcattcgagagcaagaccgcgcgtctagtcagtgacatccttgacaacttcgaccctgataaagagcgagtgtttataggggaatcaacggagacaaaagagtttcttggttccattgctttgctcaaatacagacaggagacgaacatagcgcagatccgtctgctacttgtcgaccccgcagctaggggcacaggtctgggagctggcctggttcgtggatgtattgcatttgcaagagaaaagggatataagaaaatcattctctggacttttggtgtattggaaggagctagaaggctatacagacgtgagggtttcgaaataacgaatgtagaagcagaaagagatcgctggggcacacctctcgctgaagagacttgggaactgatgttggaagattgaaacatagttccgtacgtagatcttgttcgatcacgtaatagtatagactcgtgaagttgaaactataccccat

SEQ ID NO: 23613 - DNA, 1476 bp, Muscodor strobelii
  misc_feature: SGI cDNA ID NO. 568036
  misc_feature: Encodes the peptide sequence at SEQ ID NO 23614
atgactggtcttgtcgttcgcatggctcaagcactcggcttgcaacgagatccgtccaacttccataccttctctccattcgaggccgaaatgcggagacgagtctggtgggcgctacttctcctcgacgttcgggcgtctgaagaccagggcaccgatttcaccatccaatatggcagcttcgacacccgaattcctctcaacatcaatgatgctgatatcgacgttcacacaacagaaatgcccgtcgaacgcgaaggtataactgacatgtcgttgccgcttgtcactgcgataacaagcaacatttctagacagatgatgttgccggggactacgatggctgagcaaaaccgccttttggaccaaatctatgccgaattggataagggatacctgaagtattcaaatgaccccggtgatgtcgctgcgtgggttgccgtcgtttccatgcgcgtcatgtgtggcaaattgacacttctcactcatctgcccgttctattctcgtctcccggcgagcacttatcggaggagatacagaataagctgctaattacagcaatcgaagttgcagaattcaatcacgccttgaatgccgagcaagcttgcaggcattggcgctggatatttcagacatatacccaatggcatgctatcgtttacattctcatcgatatatctcgtcgcccctggtcctcaactatcgagcgtgcttggctctcgttgcaaagtccgtggttgattccatcacaatacaatcttgacaagaacctccgaatctgggttccatttcggagcctaatgaataaagctcgtaaatatcgagcgtcagagctcacgagactgcgttgcagtaaatgggttgctcagcagctcgaagaatcagatcggaagctgcctttgccatccacagtcggcccggtgtctgccgaagatggcgctgagatctttcgtaagaaatggcgagatctagtgggtataggcggcggagacaaatctacactgcgagcagataaaccagaacttggtgagccttcgccaatatattctcaaggccaattcaaccaggatggacagccgaagattttggaacaactgactgccgccccagaatcgcggcttagctgcactaccaccgctaatcccatacatgagctgcccggaacaaatactaatgcttcgttactgatgcccactcaaaatattcatccgtacaatcaacagagcgcggatacacttacctacgggtctccttctcagcttgctggtggttgggactacggccagtgtgggctgatgaactggttctgggcaagcccagagaatgaggcagagctagtcgaaaatccaggagcggatacgacagttatggaccttgatctagatcccacgattgattggaacagctgggttgagtcagctaagggccttgagatggatatgcaagctataggcgaaacgcttcatgaacagtga

SEQ ID NO: 23614 - protein, 491 aa, Muscodor strobelii
  misc_feature: SGI Peptide ID NO. 568036
  misc_feature (1)..(72): Pfam Id: PF04082 Pfam Desc: Fungal specific transcription factor domain
  misc_feature (3)..(72): Pfam Id: PF04082 Pfam Desc: Fungal specific transcription factor domain
  misc_feature (1)..(478): NCBI GI: 255947838 Blast Desc: Pc22g06580 [Penicillium chrysogenum Wisconsin 54-1255] gi|211591703|emb|CAP97946.1| Pc22g06580 [Penicillium chrysogenum Wisconsin 54-1255]
  misc_feature (1)..(325): NCBI GI: 256726670 Blast Desc: NECHADRAFT_11213 [Nectria haematococca mpVI 77-13-4]
  misc_feature (1)..(480): NCBI GI: 46115418 Blast Desc: FG03551.1 [Gibberella zeae PH-1]
  misc_feature (1)..(327): NCBI GI: 154311552 Blast Desc: BC1G_06235 [Botryotinia fuckeliana B05.10] gi|150850746|gb|EDN25939.1| BC1G_06235 [Botryotinia fuckeliana B05.10]
  misc_feature (1)..(326): NCBI GI: 171693411 Blast Desc: protein product [Podospora anserina] gi|170946654|emb|CAP73457.1| protein product [Podospora anserina]
  misc_feature (1)..(325): NCBI GI: 85119154 Blast Desc: NCU02896 [Neurospora crassa OR74A] gi|28927389|gb|EAA36342.1| [Neurospora crassa OR74A]
  misc_feature (1)..(352): NCBI GI: 116182784 Blast Desc: CHGG_02020 [Chaetomium globosum CBS 148.51] gi|88186317|gb|EAQ93785.1| CHGG_02020 [Chaetomium globosum CBS 148.51]
  misc_feature (1)..(375): NCBI GI: 171694798 Blast Desc: protein product [Podospora anserina] gi|170947641|emb|CAP59803.1| protein product [Podospora anserina]
  misc_feature (1)..(347): NCBI GI: 256724950 Blast Desc: NECHADRAFT_91416 [Nectria haematococca mpVI 77-13-4]
  misc_feature (1)..(329): NCBI GI: 46121945 Blast Desc: FG05350.1 [Gibberella zeae PH-1]
MTGLVVRMAQALGLQRDPSNFHTFSPFEAEMRRRVWWALLLLDVRASEDQGTDFTIQYGSFDTRIPLNINDADIDVHTTEMPVEREGITDMSLPLVTAITSNISRQMMLPGTTMAEQNRLLDQIYAELDKGYLKYSNDPGDVAAWVAVVSMRVMCGKLTLLTHLPVLFSSPGEHLSEEIQNKLLITAIEVAEFNHALNAEQACRHWRWIFQTYTQWHAIVYILIDISRRPWSSTIERAWLSLQSPWLIPSQYNLDKNLRIWVPFRSLMNKARKYRASELTRLRCSKWVAQQLEESDRKLPLPSTVGPVSAEDGAEIFRKKWRDLVGIGGGDKSTLRADKPELGEPSPIYSQGQFNQDGQPKILEQLTAAPESRLSCTTTANPIHELPGTNTNASLLMPTQNIHPYNQQSADTLTYGSPSQLAGGWDYGQCGLMNWFWASPENEAELVENPGADTTVMDLDLDPTIDWNSWVESAKGLEMDMQAIGETLHEQ

SEQ ID NO: 23615 - DNA, 5047 bp, Muscodor strobelii
  misc_feature: SGI EST ID NO. CUFF.55615.1
  misc_feature: Variant of the nucleotide sequence at SEQ ID NO 23613
taaactacgaagctgtgtagtatgtcggtctcggaaagttcggtgcgataaagagtcgccatgctccaattgtcgtcgggccaatatcccatgcgtctttccatctgccgaccgtcccccgcgttgggcgcgtcgcttagccgcaaatcatggttacggaggagaaaagtcagggtcaactcctgatccgagccccgggtgttggccaggttatggatcgattgaagacactcgagagtcttgttaaggatctcagtggccagctggaacaggcgcatgctgccgctgcgaacttttcgaccgggaactcacccgcaagctcgaatcaagatcgtgatgccgaccacgataaagctactcctccgccgtcaggcccgggagccgttcaggcgcagttcggtaggcttgtgcttggcgacgccaatcgcagccgctacgttagtagtggtttttggtcaaagattaacgatgtgctggatgaacttaagacggagacaaagcatctcgctgaaactgacgttgaatcatctgacgaggaaagaccatctggctcttccccatccacctttgagcttgatcgaagcccatccgagcgtcatgcgtttttgttccgacaaaacctccgtccgggaggtgcagatttgcgagatctgcatcccatgccatcgcaaattccgtttctgcttgacgtcttctcagaaaatgtgaacggcgttattcaaattgtccatatgcctacgataaacaaagttgcacgtcatgcaacccgacataacacgcggggctttgatgtgagccatctttcgccggtgaacgaggctctattgttcgctatatactacgctgcagtgacttcaatggaggaggaagatatcgcaatcaacttcacttcctcaaagaccgagctgaacctcaaatatcggctggggctagaacaagccctggcaaaggccgatttcttgaatgtgccagacctgggactcgtccaagcttttgcaatattcttatttcttgttcgccgtcacgatagcccgaggtttgtttggatgatgactggtcttgtcgttcgcatggctcaagcactcggcttgcaacgagatccgtccaacttccataccttctctccattcgaggccgaaatgcggagacgagtctggtgggcgctacttctcctcgacgttcgggcgtctgaagaccagggcaccgatttcaccatccaatatggcagcttcgacacccgaattcctctcaacatcaatgatgctgatatcgacgttcacacaacagaaatgcccgtcgaacgcgaaggtataactgacatgtcgttgccgcttgtcactgcgataacaagcaacatttctagacagatgatgttgccggggactacgatggctgagcaaaaccgccttttggaccaaatctatgccgaattggataagggatacctgaagtattcaaatgaccccggtgatgtcgctgcgtgggttgccgtcgtttccatgcgcgtcatgtgtggcaaattgacacttctcactcatctgcccgttctattctcgtctcccggcgagcacttatcggaggagatacagaataagctgctaattacagcaatcgaagttgcagaattcaatcacgccttgaatgccgagcaagcttgcaggcattggcgctggatatttcagacatatacccaatggcatgctatcgtttacattctcatcgatatatctcgtcgcccctggtcctcaactatcgagcgtgcttggctctcgttgcaaagtccgtggttgattccatcacaatacaatcttgacaagaacctccgaatctgggttccatttcggagcctaatgaataaagctcgtaaatatcgagcgtcagagctcacgagactgcgttgcagtaaatgggttgctcagcagctcgaagaatcagatcggaagctgcctttgccatccacagtcggcccggtgtctgccgaagatggcgctgagatctttcgtaagaaatggcgagatctagtgggtataggcggcggagacaaatctacactgcgagcagataaaccagaacttggtgagccttcgccaatatattctcaaggccaattcaaccaggatggacagccgaagattttggaacaactgactgccgccccagaatcgcggcttagctgcactaccaccgctaatcccatacatgagctgcccggaacaaatactaatgcttcgttactgatgcccactcaaaatattcatccgtacaatcaacagagcgcggatacacttacctacgggtctccttctcagcttgctggtggttgggactacggccagtgtgggctgatgaactggttctgggcaagcccagagaatgaggcagagctagtcgaaaatccaggagcggatacgacagttatggaccttgatctagatcccacgattgattggaacagctgggttgagtcagctaagggccttgagatggatatgcaagctataggcgaaacgcttcatgaacagtgatttcaagtcctcgtgcaaacaacaaccattgaacgaagcgccttttcgatccgtatttttaccaaatgaggctgcaatatattcgaaacctagatacatgttctcagtatcgccttccccactatagcctcatccattcaatgaagtcgtctatggccgtaatttggaactcataccacttcacgcaaacgtctttgtttctcagctagcttgtacggtcaccgacgcgctctcgagtccatctgaagcggcagatacagtgatggtgcctgaggctccagcggccgcccggacaatggcaagagcatatccactgaaggcctttcgagtcaaggatgggaaagctgtcatatcagccggattaccgttgtcggttgagacaatctcagcagggccgtcaacagaaaagacaattgaattgtcagcacggggcacaactgtgttgttcgcatcaacaactgcgatacttatgtaggacagatcatgtccgtcgccggatatatgagagcgatcggcagttatctttgacaaaagttagcaatgctagcccgttatctcctcccgaataagatgaagagcttggagattacgcacgtttagtccaacagccggcccagcggtgacttttgcatctgttgcccattcctttccatctttataggtaacaaccctcaggtcaccggcttgataggtgacattatcccatcggaagcgatattcggttttggtcctattttgaaggccggcggacttcccgttcacaaaaagctcagcagaatcgccggatgagaagacatggactggggttacttgtccaactcgctccggccaggtccagtgaggcagaatatgagccgcagggtaatctgaacgccaacgagattggtacaggaagaatctgtctttcttgaagcctgccatatcgacaatgccgaaatacgaacttcgggcttcatcatcataaggagtgggctcgccgatgtagtcaaaacctgtccaaacaaattctccagccacttgaattctcgcctgaaccttccccgacgttggcgtgtctgtccggagtcacagggaagaggaatgtcccccgcgaactcactgcggaagatgattcgctgctccatatcatcttgtttggttgtgcgctatggaaaatagggaatgacgaatcgtacgaggtccctcgaccttctccctgatagttgaggccttcaatgtccagcacgcccgctatcgcatctgtccccgttgcatcattgagtgccatggtaaccggtcgggtggggtcttcagaccgcgcaatatcccgaagctcttggcctattgcaaccccagaggcgtcccgctgctctgggatttcgtttccaataccccaagcgatgacggagggatggtttcgatctcgttgaagaaacgagcggaggtcaggctccttccaatccgagaagatcagatggtagtcgtttgccacctttgctacctcccagcaatcgaatatttcatcatagaccaagaaacccaagcggtccgcaatgtccaggaattctgacgctggcggattgtgtgttgtccggagagcgttgcttcccatagactgtaatatctctaattggcgttcggcagctctgttatgaaaagccgcgccgagtgatccctgatcatgatggttgcaggtgccttttacatatacctcttctccattcactgtgtcacctagcgtcaatatttgattggaatagataggggaaatattctacgcaaagcaatgttgggagcagcattttgccatcttacctagtaaccccttattagcgtcatacgtaaccgatcgaatgccaaacttggtagtgtagacgtcgattgtattaccattgctggtcagggttgtgacggcgacatacatgttcggcttctgcgatggtggaggtccccataaagatggactatcgatagttgttgagccgtcaatggattgtgttgaatttggctcggcaacaatctgcttggatccaaaggttgctgccacatcccctgtgctgacccccgtgtcgagatcgatggcatacacaatcgtctctatatcaacggtctttgtttcgttccccttgttctcaacctcgacgacgagattcaccaacgcagcatctgctgcaacatcaggggtggtgatgtaggtaccgtattggcccacatggactggatcaaccttgacgagccaaacatttctatagattcccgctccgggataccagcgtgaggagtctagggcgttgtctaagcgaattgctagctgatttgcaccgtccatcgtgtatggtgttaggtcgagtctgaatgaattatagccgtatggccaaccgccgactaattggccgttaagccagactgccgagtacgacatagcaccgtcaatgtctaaaaagacgtttttgctgagatcatccgaggtcagcgtgacggtctttcgataccagccaacgccgttcgaagggagcttgcccataccaccactctggtagcca

SEQ ID NO: 23616 - DNA, 2550 bp, Muscodor strobelii
  misc_feature: SGI cDNA ID NO. 568037
  misc_feature: Encodes the peptide sequence at SEQ ID NO 23617
atgaattctgaggcgccttcagatgccaataacgagagtgaaggtggtgaagcgggcgagacccgaagcggcccagtctcggtcccagcggccgagaaacacgcgaacacgtcagctagcacggtgaaggggaccgcaccgccgattaaactacgaagctgtgtaccgcaaatcatggttacggaggagaaaagtcagggtcaactcctgatccgagccccgggtgttggccaggttatggatcgattgaagacactcgagagtcttgttaaggatctcagtggccagctggaacaggcgcatgctgccgctgcgaacttttcgaccgggaactcacccgcaagctcgaatcaagatcgtgatgccgaccacgataaagctactcctccgccgtcaggcccgggagccgttcaggcgcagttcggtaggcttgtgcttggcgacgccaatcgcagccgctacgttagtagtggtttttggtcaaagattaacgatgtgctggatgaacttaagacggagacaaagcatctcgctgaaactgacgttgaatcatctgacgaggaaagaccatctggctcttccccatccacctttgagcttgatcgaagcccatccgagcgtcatgcgtttttgttccgacaaaacctccgtccgggaggtgcagatttgcgagatctgcatcccatgccatcgcaaattccgtttctgcttgacgtcttctcagaaaatgtgaacggcgttattcaaattgtccatatgcctacgataaacaaagttgcacgtcatgcaacccgacataacacgcggggctttgatgtgagccatctttcgccggtgaacgaggctctattgttcgctatatactacgctgcagtgacttcaatggaggaggaagatatcgcaatcaacttcacttcctcaaagaccgagctgaacctcaaatatcggctggggctagaacaagccctggcaaaggccgatttcttgaatgtgccagacctgggactcgtccaagcttttgcaatattcttatttcttgttcgccgtcacgatagcccgaggtttgtttggatgatgactggtcttgtcgttcgcatggctcaagcactcggcttgcaacgagatccgtccaacttccataccttctctccattcgaggccgaaatgcggagacgagtctggtgggcgctacttctcctcgacgttcgggcgtctgaagaccagggcaccgatttcaccatccaatatggcagcttcgacacccgaattcctctcaacatcaatgatgctgatatcgacgttcacacaacagaaatgcccgtcgaacgcgaaggtataactgacatgtcgttgccgcttgtcactgcgataacaagcaacatttctagacagatgatgttgccggggactacgatggctgagcaaaaccgccttttggaccaaatctatgccgaattggataagggatacctgaagtattcaaatgaccccggtgatgtcgctgcgtgggttgccgtcgtttccatgcgcgtcatgtgtggcaaattgacacttctcactcatctgcccgttctattctcgtctcccggcgagcacttatcggaggagatacagaataagctgctaattacagcaatcgaagttgcagaattcaatcacgccttgaatgccgagcaagcttgcaggcattggcgctggatatttcagacatatacccaatggcatgctatcgtttacattctcatcgatatatctcgtcgcccctggtcctcaactatcgagcgtgcttggctctcgttgcaaagtccgtggttgattccatcacaatacaatcttgacaagaacctccgaatctgggttccatttcggagcctaatgaataaagctcgtaaatatcgagcgtcagagctcacgagactgcgttgcagtaaatgggttgctcagcagctcgaagaatcagatcggaagctgcctttgccatccacagtcggcccggtgtctgccgaagatggcgctgagatctttcgtaagaaatggcgagatctagtgggtataggcggcggagacaaatctacactgcgagcagataaaccagaacttggtgagccttcgccaatatattctcaaggccaattcaaccaggatggacagccgaagattttggaacaactgactgccgccccagaatcgcggcttagctgcactaccaccgctaatcccatacatgagctgcccggaacaaatactaatgcttcgttactgatgcccactcaaaatattcatccgtacaatcaacagagcgcggatacacttacctacgggtctccttctcagcttgctggtggttgggactacggccagtgtgggctgatgaactggttctgggcaagcccagagaatgaggcagagctagtcgaaaatccaggagcggatacgacagttatggaccttgatctagatcccacgattgattggaacagctgggttgagtcagctaagggccttgagatggatatgcaagctataggcgaaacgcttcatgaacagtga

SEQ ID NO: 23617 - protein, 849 aa, Muscodor strobelii
  misc_feature: SGI Peptide ID NO. 568037
  misc_feature (333)..(430): Pfam Id: PF04082 Pfam Desc: Fungal specific transcription factor domain
  misc_feature (74)..(836): NCBI GI: 255947838 Blast Desc: Pc22g06580 [Penicillium chrysogenum Wisconsin 54-1255] gi|211591703|emb|CAP97946.1| Pc22g06580 [Penicillium chrysogenum Wisconsin 54-1255]
  misc_feature (74)..(683): NCBI GI: 256726670 Blast Desc: NECHADRAFT_11213 [Nectria haematococca mpVI 77-13-4]
  misc_feature (78)..(838): NCBI GI: 46115418 Blast Desc: FG03551.1 [Gibberella zeae PH-1]
  misc_feature (79)..(685): NCBI GI: 154311552 Blast Desc: BC1G_06235 [Botryotinia fuckeliana B05.10] gi|150850746|gb|EDN25939.1| BC1G_06235 [Botryotinia fuckeliana B05.10]
  misc_feature (78)..(683): NCBI GI: 85119154 Blast Desc: NCU02896 [Neurospora crassa OR74A] gi|28927389|gb|EAA36342.1| [Neurospora crassa OR74A]
  misc_feature (2)..(838): NCBI GI: 116182784 Blast Desc: CHGG_02020 [Chaetomium globosum CBS 148.51] gi|88186317|gb|EAQ93785.1| CHGG_02020 [Chaetomium globosum CBS 148.51]
  misc_feature (78)..(733): NCBI GI: 171694798 Blast Desc: protein product [Podospora anserina] gi|170947641|emb|CAP59803.1| protein product [Podospora anserina]
  misc_feature (78)..(689): NCBI GI: 256734805 Blast Desc: NECHADRAFT_65901 [Nectria haematococca mpVI 77-13-4]
  misc_feature (248)..(684): NCBI GI: 171693411 Blast Desc: protein product [Podospora anserina] gi|170946654|emb|CAP73457.1| protein product [Podospora anserina]
  misc_feature (79)..(705): NCBI GI: 256724950 Blast Desc: NECHADRAFT_91416 [Nectria haematococca mpVI 77-13-4]
MNSEAPSDANNESEGGEAGETRSGPVSVPAAEKHANTSASTVKGTAPPIKLRSCVPQIMVTEEKSQGQLLIRAPGVGQVMDRLKTLESLVKDLSGQLEQAHAAAANFSTGNSPASSNQDRDADHDKATPPPSGPGAVQAQFGRLVLGDANRSRYVSSGFWSKINDVLDELKTETKHLAETDVESSDEERPSGSSPSTFELDRSPSERHAFLFRQNLRPGGADLRDLHPMPSQIPFLLDVFSENVNGVIQIVHMPTINKVARHATRHNTRGFDVSHLSPVNEALLFAIYYAAVTSMEEEDIAINFTSSKTELNLKYRLGLEQALAKADFLNVPDLGLVQAFAIFLFLVRRHDSPRFVWMMTGLVVRMAQALGLQRDPSNFHTFSPFEAEMRRRVWWALLLLDVRASEDQGTDFTIQYGSFDTRIPLNINDADIDVHTTEMPVEREGITDMSLPLVTAITSNISRQMMLPGTTMAEQNRLLDQIYAELDKGYLKYSNDPGDVAAWVAVVSMRVMCGKLTLLTHLPVLFSSPGEHLSEEIQNKLLITAIEVAEFNHALNAEQACRHWRWIFQTYTQWHAIVYILIDISRRPWSSTIERAWLSLQSPWLIPSQYNLDKNLRIWVPFRSLMNKARKYRASELTRLRCSKWVAQQLEESDRKLPLPSTVGPVSAEDGAEIFRKKWRDLVGIGGGDKSTLRADKPELGEPSPIYSQGQFNQDGQPKILEQLTAAPESRLSCTTTANPIHELPGTNTNASLLMPTQNIHPYNQQSADTLTYGSPSQLAGGWDYGQCGLMNWFWASPENEAELVENPGADTTVMDLDLDPTIDWNSWVESAKGLEMDMQAIGETLHEQ

SEQ ID NO: 23618 - DNA, 5047 bp, Muscodor strobelii; identical to SEQ ID NO: 23615
  misc_feature: SGI EST ID NO. CUFF.55615.1
  misc_feature: Variant of the nucleotide sequence at SEQ ID NO 23616

SEQ ID NO: 23619 - DNA, 738 bp, Muscodor strobelii
  misc_feature: SGI cDNA ID NO. 568038
  misc_feature: Encodes the peptide sequence at SEQ ID NO 23620
atgacttctagccatcccgaaacagtcgccttccttggtgccagtggtggcgttggactttcagcactcaagcacactttgacaaccggccgcacatgcattgctctctgtcgcaaccctgccaagctcgctgccattctccccgcggaatcccatcccaatctgcaaatcgtgcaggggaatgcgcatgacgttgccgctgtctccaaatgtctcgaagcgcatcctggcgttctagttgattacgtcatttcaaccatcggaggcgccttcgtcgcatccaagctaacacttgacgatcccgaggtctgccaaaaagctatggctaccctgcttgaggctattgcaaacctccgcaagaacggtgcggtgggaaagccacacataatggctttcagcacaacgggtctctcgcgctttggtcgagacatcccgctggccatggtccctctttaccacgttgtactgaaggtgcctcacgaggacaagattatcatggaagatcgcttggtggatagcggagagtcattcaccattgtgcgtgcaagtttgatgtattcggacccggagagtgggaaggaggtttatgttggaatcgaggatcccaaatctgggcgtgagtccaaggctattggttactcgatcacaaagggcgatgcgggcaagtggattgccgaaaacatcatcttcaagcttgacaacaagtacaagaacaagattgcgatgattacgcaataa

SEQ ID NO: 23620 - protein, 245 aa, Muscodor strobelii
  misc_feature: SGI Peptide ID NO. 568038
  misc_feature (7)..(245): NCBI GI: 256726669 Blast Desc: NECHADRAFT_34128 [Nectria haematococca mpVI 77-13-4]
  misc_feature (7)..(244): NCBI GI: 255947840 Blast Desc: Pc22g06590 [Penicillium chrysogenum Wisconsin 54-1255] gi|211591704|emb|CAP97947.1| Pc22g06590 [Penicillium chrysogenum Wisconsin 54-1255]
  misc_feature (3)..(244): NCBI GI: 46122825 Blast Desc: FG05790.1 [Gibberella zeae PH-1]
  misc_feature (7)..(244): NCBI GI: 256725706 Blast Desc: NECHADRAFT_94436 [Nectria haematococca mpVI 77-13-4]
  misc_feature (7)..(229): NCBI GI: 171681126 Blast Desc: protein product [Podospora anserina] gi|170940521|emb|CAP65749.1| protein product [Podospora anserina]
  misc_feature (7)..(212): NCBI GI: 261361043 Blast Desc: fungal specific transcription factor domain-containing protein [Verticillium albo-atrum VaMs.102]
  misc_feature (4)..(244): NCBI GI: 39967480 Blast Desc: MGG_01994 [Magnaporthe grisea 70-15] gi|145012860|gb|EDJ97501.1| MGG_01994 [Magnaporthe grisea 70-15]
  misc_feature (1)..(244): NCBI GI: 115492741 Blast Desc: [Aspergillus terreus NIH2624] gi|114197858|gb|EAU39558.1| [Aspergillus terreus NIH2624]
  misc_feature (1)..(244): NCBI GI: 121711761 Blast Desc: conserved [Aspergillus clavatus NRRL 1] gi|119401647|gb|EAW12070.1| conserved [Aspergillus clavatus NRRL 1]
  misc_feature (1)..(244): NCBI GI: 238498196 Blast Desc: conserved [Aspergillus flavus NRRL3357] gi|220693607|gb|EED49952.1| conserved [Aspergillus flavus NRRL3357]
MTSSHPETVAFLGASGGVGLSALKHTLTTGRTCIALCRNPAKLAAILPAESHPNLQIVQGNAHDVAAVSKCLEAHPGVLVDYVISTIGGAFVASKLTLDDPEVCQKAMATLLEAIANLRKNGAVGKPHIMAFSTTGLSRFGRDIPLAMVPLYHVVLKVPHEDKIIMEDRLVDSGESFTIVRASLMYSDPESGKEVYVGIEDPKSGRESKAIGYSITKGDAGKWIAENIIFKLDNKYKNKIAMITQ

SEQ ID NO: 23621 - DNA, 1634 bp, Muscodor strobelii
  misc_feature: SGI EST ID NO. CUFF.55572.0
  misc_feature: Variant of the nucleotide sequence at SEQ ID NO 23619
cgagactgggccgcttcgggtctcgcccgcttcaccaccttcactctcgttattggcatctgaaggcgcctcagaattcattatgcgactcgaagagctgtgatcattcaaaccggtttgctctattgacccggataacgtcaaagtgaatagcagagtctttcagcatgcaggcagcaatcgtttcagccagcgaccgctattgtatgggcgtaagctcaagtcaatgaatccctgatttagggttaaatgaaaatgtctctttagtataatttctctttagctcatattctgaagcaaaaccggagactcgaatccttcaagttttgatgctgctgttcttttcgacctagacaggcgacaagctacgtaaggtagatactcaggtgagagagagcctttggcacaagccacaattcggattatgctcgcttaggtagatgcgaagcctgggaagtgtggcttatgactttggagacagcctagatccgagaaatgagcgaatcttcaacagcggtattctttcgctcggtcgtcaacatgagggtcattgtcccaagacgaggatataacaagagctcgtcgcttctttatcgtatcctctgaaatcttgttattcactatccccattgacagtttccaatcaattacactaccaacaaccacaagaccaacagtctcgctctgatcatccacctatcctttctcaataatagaaatcgtgtatcagaatgacttctagccatcccgaaacagtcgccttccttggtgccagtggtggcgttggactttcagcactcaagcacactttgacaaccggccgcacatgcattgctctctgtcgcaaccctgccaagctcgctgccattctccccgcggaatcccatcccaatctgcaaatcgtgcaggggaatgcgcatgacgttgccgctgtctccaaatgtctcgaagcgcatcctggcgttctagttgattacgtcatttcaaccatcggaggcgccttcgtcgcatccaagctaacacttgacgatcccgaggtctgccaaaaagctatggctaccctgcttgaggctattgcaaacctccgcaagaacggtgcggtgggaaagccacacataatggctttcagcacaacgggtctctcgcgctttggtcgagacatcccgctggccatggtccctctttaccacgttgtactgaaggtgcctcacgaggacaagattatcatggaagatcgcttggtggatagcggagagtcattcaccattgtgcgtgcaagtttgatgtattcggacccggagagtgggaaggaggtttatgttggaatcgaggatcccaaatctgggcgtgagtccaaggctattggttactcgatcacaaagggcgatgcgggcaagtggattgccgaaaacatcatcttcaagcttgacaacaagtacaagaacaagattgcgatgattacgcaataagagctgatacttcaggtgttgtcgttcctacttctagcgtggcgtacaggattgagcttgttaattatatagacggtcgcatgtcattcatctgctcttagatctcattgtttatactatatcaggacaggcataaatcaaatcatcaaacgaattttcagctca

SEQ ID NO: 23622 - DNA, 630 bp, Muscodor strobelii
  misc_feature: SGI cDNA ID NO. 568039
  misc_feature: Encodes the peptide sequence at SEQ ID NO 23623
atgaaattccaatatcttagtgcggcggtttttgggctggctgctgtccctacggtcttaggtcaaaatgttcttcaagagggacctttttacttacacgtcaagagccaagctcgaaatggttccatcgaaggatacttgagcacattagacctcaacccgatccagtctttgctgcattatcaacccgtcgcttcgccgccaccgtcaaacgaaagttttgagttctatttcaactttactgggaatagtgtgtgggaagacaacctggtcggatacattgtatcaggcccgactcttgatactggcggcggctcgggccttttaggtcacgtgttgggaatgcagtatgagttaaactccaacgtgggcattgcgctcttcggtgctggtgtgtttagctcgggattcgatgcaagcaataaatcgtttggtgctcttcttattgatgatgcgacatttgttcccaatcaaagccctgatctgagcaagaatcacggatactatcactgggccgtgtgctgggagtacttcgccagcacatatattccggcgctatcgtgggtgacatatggcagccctcgcaacccgacttgcgagcttgttgacctcacaaaagtcgccatttag

SEQ ID NO: 23623 - protein, 209 aa, Muscodor strobelii
  misc_feature: SGI Peptide ID NO. 568039
  misc_feature (1)..(199): NCBI GI: 164423958 Blast Desc: NCU07569 [Neurospora crassa OR74A] gi|157070305|gb|EAA29378.2| NCU07569 [Neurospora crassa OR74A]
  misc_feature (26)..(207): NCBI GI: 171686266 Blast Desc: protein product [Podospora anserina] gi|170943094|emb|CAP68747.1| protein product [Podospora anserina]
  misc_feature (7)..(198): NCBI GI: 209570344 Blast Desc: [Glomerella graminicola]
MKFQYLSAAVFGLAAVPTVLGQNVLQEGPFYLHVKSQARNGSIEGYLSTLDLNPIQSLLHYQPVASPPPSNESFEFYFNFTGNSVWEDNLVGYIVSGPTLDTGGGSGLLGHVLGMQYELNSNVGIALFGAGVFSSGFDASNKSFGALLIDDATFVPNQSPDLSKNHGYYHWAVCWEYFASTYIPALSWVTYGSPRNPTCELVDLTKVAI

SEQ ID NO: 23624 - DNA, 292 bp, Muscodor strobelii
  misc_feature: SGI EST ID NO. CUFF.55575.0
  misc_feature: Variant of the nucleotide sequence at SEQ ID NO 23622
cgagacttcatgacataaaagcagttgaaagttcacttgtaaatagatcagacaagatcttcagactcttcgatattgcactcaccgaaatatgttgcatacactttgtaaatcatgaaattccaatatcttagtgcggcggtttttgggctggctgctgtccctacggtcttaggtcaaaatgttcttcaagagggacctttttacttacacgtcaagagccaagctcgaaatggttccatcgaaggatacttgagcacattagacctcaacccgatccagtctttgctgc

SEQ ID NO: 23625 - DNA, 2622 bp, Muscodor strobelii
  misc_feature: SGI cDNA ID NO. 568040
  misc_feature: Encodes the peptide sequence at SEQ ID NO 23626
atgccatcgcgtattgatagctctgtgctttccgactttgaagcctcgttgtattccgaacactctattaccagaaatggattcctccctgccactcagccaatcaaacgactggctgatagctattacgagccttgggaacaagtagctggccggctcccatatctcataaagagcaacacaatcaggagcgcggttgaagtaatgccaagcctatcgacttctagactcagctctgaaagtgagtggcggcgagcttatgtgattttgtccttccttactcatggatatatatggggtggaaatcaaccttcagaaattctgcctccgcagattactataccatatctagaaatcgcggcacaattggacgtaccccccgtagcaacatatgctgctttgaatctatggaacttctcaagcgcctcgggagatgaagatttcaaggagcctgacaatcttcgagcattgcagaccttcacaggaaccgacgacgaatcatggttctacgttctatccgtcgcggtcgaatcacgaggcgctgcgatcattccgcacatgctgcgggcgatagaagctatcaaacaacaggactatgatacagtcacccgcgccctcgtcaaaatggccatctacatccgacggctgacaaagctgctagatcgcatgatcgaaagatgcgatcccgaaatattctatcaccagatacgaccattcctcgctgggactaagaatatggagactgccggtcttcccaggggcgtattcttcgatgaaggccatggtaaaggcgaatggcgacaattaagagggggcagtaacggacaatcctcactcattcagtttttcgacctggtgctgggagttgaccatacctcgagcggcaaccggtcgagccctgatgctgcaggtaacacaacgtctggccagcccgagatgagttttcatgaagaagttcgcttctatatgccgggtccccatcgtcgatttctagagactatctccaaaatggataagatcagagactttgccacgtccactcctatttccagccggtctctcgaacacgatcaagtacgtcaagcctacgaagaggccgcgaaggcgctcggggcgttcagacaaggacacatgcaaatggtcactcgctacatcatcgtgccgtctcgcagatcagcagcgacgccctcgtcggcgttgaatctcgccacggcatcgacgcggtccggcagatccgaactgacgggaaccggcggtacggcactcattcccttcctgaggaccacacgcgacgctacgtatgcggcgggcatgatgagccctgatgcagagtcacgggcgcttccccataccctgcgagagttttcttgcgacgcaaaggggaacatggcggaagatgccatagtattcatcggcccattgggtgagccgcgctgtgctaccatgtcggacgaacagtatcactatctcaaacagcccgcctcgcggtggcagctcctccccgccgacgaaagcagaaaggaccccaatgtgatcaaggacacgacggacgctcgagacattcttctatacctcaagaacgtccccgacacggaagcggggttccaagatcagctcaagcgcgcgatgacacagatacaacagatcggctacaactatgagcgtgcggcggggggcaaggtccgaaagcgacagctgcagggaaacaggtccgcgcaagaccacatgggcgagcacgacgacttgatccgcctcgcgcgaaccatgtggccagactcgtacaatctagaagaccccatcgacgcgcgcctcgacgccaatctgattcgagagccgggagtgccccgacaatcgctggacgtcatcttcagacatgcacgtctcgcctccgagacgcgccttcgatacgtcaacgacgtgatgcgtaaccacccggtccactgtaaccgcgctcgctttgggcagacctacaccaagcgcctgagaatcaacggcgatatacataatgcggatatcctgacggatgcgagcttggtggcgtttggggagaccaacgggaaaggctggagcaatgctgaaagagccttcttcgccgatacatacgagtttagcatcgcgcaaggccagctgttggccaactgcgtggacgccacgtcgatgctaccgcagagtctactcgatgtgttccggtgctgtgtcaacttcaccgactcatacgtagattgggcgtacacagcgacagaccaagcgcggcaaagggtactgacccatcccaacgtgcgcaacttgagtcctgggcacgcgacggtcgaagctgaaatcaaacaaggcaacgcggccaccctggcagaaatacgggacagctacaaggcattccgggagcaagcgatgccggccatagcggcgttgatcgaggacgcgaacacgatgagggcgctccgcgaggtcaacttcaacgggtgcgccaacggtatggacgcgaccatcaacgccatcaatgcttgtgtcttgactcggcgctatcccgggacgtgtcaatccaagttgacgcgcatgaccaacgaacggaacaagctttatccacccacgggcaacgaatggatccgcataggacagaagtga

SEQ ID NO: 23626 - protein, 873 aa, Muscodor strobelii
  misc_feature: SGI Peptide ID NO. 568040
  misc_feature (14)..(438): Pfam Id: PF01231 Pfam Desc: Indoleamine 2,3-dioxygenase
  misc_feature (34)..(438): Pfam Id: PF01231 Pfam Desc: Indoleamine 2,3-dioxygenase
  misc_feature (20)..(439): NCBI GI: 46120362 Blast Desc: FG04828.1 [Gibberella zeae PH-1]
  misc_feature (20)..(437): NCBI GI: 256722634 Blast Desc: [Nectria haematococca mpVI 77-13-4]
  misc_feature (13)..(440): NCBI GI: 261361129 Blast Desc: indoleamine 2,3-dioxygenase [Verticillium albo-atrum VaMs.102]
  misc_feature (11)..(440): NCBI GI: 171681068 Blast Desc: protein product [Podospora anserina] gi|170940492|emb|CAP65720.1| protein product [Podospora anserina]
  misc_feature (9)..(437): NCBI GI: 70993992 Blast Desc: indoleamine 2,3-dioxygenase pyrrole 2,3-dioxygenase) [Aspergillus fumigatus Af293] gi|66849477|gb|EAL89805.1| indoleamine 2,3-dioxygenase pyrrole 2,3-dioxygenase) [Aspergillus
  misc_feature (9)..(437): NCBI GI: 119500548 Blast Desc: indoleamine 2,3-dioxygenase pyrrole 2,3-dioxygenase) [Neosartorya fischeri NRRL 181] gi|119415196|gb|EAW25134.1| indoleamine 2,3-dioxygenase pyrrole 2,3-dioxygenase) [Neosartorya
  misc_feature (19)..(433): NCBI GI: 156049031 Blast Desc: SS1G_08222 [Sclerotinia sclerotiorum 1980] gi|154692621|gb|EDN92359.1| SS1G_08222 [Sclerotinia sclerotiorum 1980]
  misc_feature (20)..(433): NCBI GI: 189191830 Blast Desc: indoleamine 2,3-dioxygenase family protein [Pyrenophora tritici-repentis Pt-1C-BFP] gi|187973860|gb|EDU41359.1| indoleamine 2,3-dioxygenase family
  misc_feature (25)..(436): NCBI GI: 145258522 Blast Desc: An04g07210 [Aspergillus niger] gi|134074689|emb|CAK44721.1| protein product [Aspergillus niger]
  misc_feature (10)..(433): NCBI GI: 154317134 Blast Desc: BC1G_03469 [Botryotinia fuckeliana B05.10] gi|150844886|gb|EDN20079.1| BC1G_03469 [Botryotinia fuckeliana B05.10]
MPSRIDSSVLSDFEASLYSEHSITRNGFLPATQPIKRLADSYYEPWEQVAGRLPYLIKSNTIRSAVEVMPSLSTSRLSSESEWRRAYVILSFLTHGYIWGGNQPSEILPPQITIPYLEIAAQLDVPPVATYAALNLWNFSSASGDEDFKEPDNLRALQTFTGTDDESWFYVLSVAVESRGAAIIPHMLRAIEAIKQQDYDTVTRALVKMAIYIRRLTKLLDRMIERCDPEIFYHQIRPFLAGTKNMETAGLPRGVFFDEGHGKGEWRQLRGGSNGQSSLIQFFDLVLGVDHTSSGNRSSPDAAGNTTSGQPEMSFHEEVRFYMPGPHRRFLETISKMDKIRDFATSTPISSRSLEHDQVRQAYEEAAKALGAFRQGHMQMVTRYIIVPSRRSAATPSSALNLATASTRSGRSELTGTGGTALIPFLRTTRDATYAAGMMSPDAESRALPHTLREFSCDAKGNMAEDAIVFIGPLGEPRCATMSDEQYHYLKQPASRWQLLPADESRKDPNVIKDTTDARDILLYLKNVPDTEAGFQDQLKRAMTQIQQIGYNYERAAGGKVRKRQLQGNRSAQDHMGEHDDLIRLARTMWPDSYNLEDPIDARLDANLIREPGVPRQSLDVIFRHARLASETRLRYVNDVMRNHPVHCNRARFGQTYTKRLRINGDIHNADILTDASLVAFGETNGKGWSNAERAFFADTYEFSIAQGQLLANCVDATSMLPQSLLDVFRCCVNFTDSYVDWAYTATDQARQRVLTHPNVRNLSPGHATVEAEIKQGNAATLAEIRDSYKAFREQAMPAIAALIEDANTMRALREVNFNGCANGMDATINAINACVLTRRYPGTCQSKLTRMTNERNKLYPPTGNEWIRIGQK

SEQ ID NO: 23627 - DNA, 348 bp, Muscodor strobelii
  misc_feature: SGI cDNA ID NO. 568041
  misc_feature: Reduced expression when VOC is produced
  misc_feature: Encodes the peptide sequence at SEQ ID NO 23628
acgtcggactcgtcgacgggctcgacgcccctgcccagccgcacatccgacccacggcccagcggccctctgtcgccccgccgcaccatggagctctcgggccgcagggatggcgccaaggccaaggcaacgacccaggccaagggctactcgcgcgacagcgacgacaccccgagcatgggcagcagcttcagcgacctcgacgacgcctccgtcacgcagtcggccctcgaggaggccctcgccagcaacatgcaggacggcggcaccatcgcgagcctccgcggcaccatcggcaacgccttccggagcagataccagaccaagggcccccagcgccagtcctag

SEQ ID NO: 23628 - protein, 115 aa, Muscodor strobelii
  misc_feature: SGI Peptide ID NO. 568041
  misc_feature (1)..(106): NCBI GI: 145610016 Blast Desc: MGG_02790 [Magnaporthe grisea 70-15] gi|145017396|gb|EDK01759.1| MGG_02790 [Magnaporthe grisea 70-15]
  misc_feature (1)..(106): NCBI GI: 149210123 Blast Desc: MGCH7_ch7g543 [Magnaporthe grisea 70-15] gi|86196498|gb|EAQ71136.1| MGCH7_ch7g543 [Magnaporthe grisea 70-15]
  misc_feature (22)..(114): NCBI GI: 116193607 Blast Desc: CHGG_06521 [Chaetomium globosum CBS 148.51] gi|88182434|gb|EAQ89902.1| CHGG_06521 [Chaetomium globosum CBS 148.51]
  misc_feature (20)..(106): NCBI GI: 156046170 Blast Desc: SS1G_09359 [Sclerotinia sclerotiorum 1980] gi|154693754|gb|EDN93492.1| SS1G_09359 [Sclerotinia sclerotiorum 1980]
  misc_feature (20)..(106): NCBI GI: 238845522 Blast Desc: Atg29p [Microsporum canis CBS 113480]
  misc_feature (19)..(106): NCBI GI: 242812414 Blast Desc: multidomain presynaptic cytomatrix related protein [Talaromyces stipitatus ATCC 10500] gi|218714291|gb|EED13714.1| multidomain presynaptic cytomatrix related protein [Talaromyces
  misc_feature (21)..(106): NCBI GI: 154319776 Blast Desc: BC1G_02369 [Botryotinia fuckeliana B05.10] gi|150856027|gb|EDN31219.1| BC1G_02369 [Botryotinia fuckeliana B05.10]
  misc_feature (19)..(106): NCBI GI: 242812409 Blast Desc: multidomain presynaptic cytomatrix related protein [Talaromyces stipitatus ATCC 10500] gi|218714290|gb|EED13713.1| multidomain presynaptic cytomatrix related protein [Talaromyces
  misc_feature (20)..(106): NCBI GI: 115385134 Blast Desc: conserved [Aspergillus terreus NIH2624] gi|114196806|gb|EAU38506.1| conserved [Aspergillus terreus NIH2624]
  misc_feature (19)..(106): NCBI GI: 212544426 Blast Desc: multidomain presynaptic cytomatrix related protein [Penicillium marneffei ATCC 18224] gi|210065336|gb|EEA19430.1| multidomain presynaptic cytomatrix related protein [Penicillium
  misc_feature: Useful for introducing or modulating the production of volatile compounds
TSDSSTGSTPLPSRTSDPRPSGPLSPRRTMELSGRRDGAKAKATTQAKGYSRDSDDTPSMGSSFSDLDDASVTQSALEEALASNMQDGGTIASLRGTIGNAFRSRYQTKGPQRQS

SEQ ID NO: 23629 - DNA, 4279 bp, Muscodor strobelii
  misc_feature: SGI EST ID NO. CUFF.55587.0
  misc_feature: Variant of the nucleotide sequence at SEQ ID NO 23627
acgtcggactcgtcgacgggctcgacgcccctgcccagccgcacatccgacccacggcccagcggccctctgtcgccccgccgcaccatggagctctcgggccgcagggatggcgccaaggccaaggcaacgacccaggccaagggctactcgcgcgacagcgacgacaccccgagcatgggcagcagcttcagcgacctcgacgacgcctccgtcacgcagtcggccctcgaggaggccctcgccagcaacatgcaggacggcggcaccatcgcgagcctccgcggcaccatcggcaacgccttccggagcagataccagaccaagggcccccagcgccagtcctagccaccctctcgatgccctggaatggcactggcacgatatcagacacgcatcatactatatggagtcactcacgtcgagacagctatactatggacatacggaagatgacgcttgcgatactacaatattgcctgggtagactctacgcaacacgatacactacaaatacaggaaactcgaaatcagctacagtccccgagcccagctacttgcgccctgagagaattgaacatgacactaaagcaccaagcacccaaaaaggcagtcactttgactaggctggcagcggcaatgctttggcctgccagatctcccgcccgactcccccggccgccgacatcctgctttccaccaccacgccctcgggttgcagtcatgtctgcatccttcacttctgtcctatgcggatccattcgttgcccgtgggtggataaagcttgttccgttcgttggtcatgcgcgtcaacttggattgacacgtcccgggatagcgccgagtcaagacacaagcattgatggcgttgatggtcgcgtccataccgttggcgcacccgttgaagttgacctcgcggagcgccctcatcgtgttcgcgtcctcgatcaacgccgctatggccggcatcgcttgctcccggaatgccttgtagctgtcccgtatttctgccagggtggccgcgttgccttgtttgatttcagcttcgaccgtcgcgtgcccaggactcaagttgcgcacgttgggatgggtcagtaccctttgccgcgcttggtctgtcgctgtgtacgcccaatctacgtatgagtcggtgaagttgacacagcaccggaacacatcgagtagactctgcggtagcatcgacgtggcgtccacgcagttggctagtgtcttcaccgtcagtcatgcgacgactacaagagttctcacggctgtcatggcaacttacccaacagctggccttgcgcgatgctaaactcgtatgtatcggcgaagaaggctctttcagcattgctccagcctttcccgttggtctccccaaacgccaccaagctcgcatccgtcaggatatccgcattatgtatatcgccgttgattctcaggcgcttggtgtaggtctgcccaaagcgagcgcggttacagtggaccgggtggttacgcatcacgtcgttgacgtatcgaaggcgcgtctcggaggcgagacgtgcatgtctgaagatgacgtccagcgattgtcggggcactcccggctctcgaatcagattggcgtcgaggcgcgcgtcgatggggtcttctagattgtacgagtctggccacatggttcgcgcgaggcggatcaagtcgtcgtgctcgcccatgtggtcttgcgcggacctgtttccctgcagctgtcgctttcggaccttgccccccgccgcacgctcatagttgtagccgatctgttgtatctgtgtcatcgcgcgcttgagctgatcttggaaccccgcttccgtgtcggggacgttcttgaggtatagaagaatgtctcgagcgtccgtcgtgtccttgatcacattggggtcctttctgctttcgtcggcggggaggagctgccaccgcgaggcgggctgtttgagatagtgatactgttcgtccgacatggtagcacagcgcggctcacccaatgggccgatgaatactatggcctggataattgatgtaatgggcacaccgtaaagcacccattttcacgacacattttatcgtcgcaggggtcgagacaaagggcattgaacaggaatcagacctggtatgctggttccggaaagggtgtctttcagctaccttagctgcgtaaaagaatactcgttctatcagaaatggcatgactgaaatgggatgggttctttatcctcggaaggacctcgacccgaacaatagcgtatcctaaaatcaagaagtatatgcaacttgctgcaagaggatttatagcatcttataagccctttccatcatttcataatgtagaggcgagctgcagccgctatgtatatcagagtaatgcgagcaaagctcaacacgtttggacgtttccatatctgggtcgcaggcattcatgtaagaaagtgctctgcttcgacttgatggtttggtgtggcttgtaagagtgcgtcagatactatacgaaagctgaaggtatcacacaacccaaggacggaggctctggcagacatcaaaatggcaggcaagacacacgatttcatgccaccacatgctacgagacgaatcatcgtcaatccaagttaatgattatgctgattaagtccagccgtttttccatagtacatatgatagactagagcctgaaacatttcttggttgaagacaggcattcagcaacacatcatggctgcgcagattccatcttggcgatcgagtccatagtttgttactcacgtcaggtcgtatctggataggtattctctccatgccgcatccgggacacgcgacgaaatggcgtgagtcgctagatgatcgaacttgctcatcctcggtcgaattctaccaactgcctcgtggctaaggtacatttgtcacctgaattctagctgctaggactgcctacttacatcttccgccatgttcccctttgcgtcgcaagaaaactctcgcagggtatggggaagcgcccgtgactctgcatcagggctcatcatgcccgccgcatacgtagcgtcgcgtgtggtcctcaggaagggaatgagtgccgtaccgccggttcccgtcagttcggatctgccggaccgcgtcgatgccgtggcgagattcaacgccgacgagggcgtcgctgctgatctgcgagacggcacgatgatgtagcgagtgaccatttgcatgtgtccttgtctgaacgccccgagcgccttcgcggcctcttcgtaggcttgacgtacttgatcgtgttcgagagaccggctggaaataggagtggacgtggcaaagtctctgatcttatccattttggagatagtctctagaaatcgacgatggggacccggcatatagaagcgaacttcttcatgaaaactcatctcgggctggccagacgttgtgttacctgcagcatcagggctcgaccggttgccgctcgaggtatggtcaactcccagcaccaggtcgaaaaactgaatgagtgaggattgtccgttactgccccctcttaattgtcgccattcgcctttaccatggccttcatcgaagaatacgcccctgggaagaccggcagtctccatattcttagtcccagcgaggaatggtcgtatctggtgatagaatatttcgggatcgcatctttcgatcatgcgatctagcagctttgtcagccgtcggatgtagatggccattttgacgagggcgcgggtgactgtatcatagtcctgttgtttgatagcttctatcgcccgcagcatgtgcggaatgatcgcagcgcctcgtgattcgaccgcgacggatagaacgtagaaccatgattcgtcgtcggttcctgtgaaggtctgcaatgctcgaagattgtcaggctccttgaaatcttcatctcccgaggcgcttgagaagttccatagattcaaagcagcatatgttgctacggggggtacgtccaattgtgccgcgatttctagatatggtatagtaatctgcggaggcagaatctgggatatgaatgattagattcgcccgcgctttttctcggcccatgttctctgcataaatgctcacttctgaaggttgatttccaccccatatatatccatgagtaaggaaggacaaaatcacataagctcgccgccactcactttcagagctgagtctagaagtcgataggcttggcattacttcaaccgcgctcctgattgtgttgctctttatgagatatgggagccggccagctacttgttccca

SEQ ID NO: 23630 - DNA, 558 bp, Muscodor strobelii
  misc_feature: SGI cDNA ID NO. 568042
  misc_feature: Encodes the peptide sequence at SEQ ID NO 23631
agcttcgacgaccttctcaccgccgtccagcgagttgccaaggaccagggctacggcgtagtcaagctgcgtgccagcaactaccgcgatggcaagcccacgcgctacgatctggtctgtgaccgcggaggcgtcaagtacaacagcaccgccaagaagcgaaaccccagcacgcgcaaggtcgactgcccctggcgtgccaaggctgtctgcgaggtgcagctgaacaaccagtggcgctttgccgtccaagactcccgacacaaccacgaggctcgcgtccctgctgccccgcccggccaggagaacacccccatggcccagagcatacgcagcctgagcaacaagcttgaccgcattggccatgacctcacccaaggcttcatgggcgtcagtcagcggctcgagagtgtagagaagcgattggaagctatggaggccaggatgggcaccatcgaggctcgcatggctggcatggaatcccgtggtgctggcatggatgttcctatggagaacatggacatggagaataatcttctcggcccggccgtcatgtag

SEQ ID NO: 23631 - protein, 185 aa, Muscodor strobelii
  misc_feature: SGI Peptide ID NO. 568042
  misc_feature (13)..(93): Pfam Id: PF03101 Pfam Desc: FAR1 DNA-binding domain
  misc_feature (1)..(185): NCBI GI: 46116610 Blast Desc: FG04147.1 [Gibberella zeae PH-1]
  misc_feature (1)..(185): NCBI GI: 261358074 Blast Desc: conserved [Verticillium albo-atrum VaMs.102]
  misc_feature (1)..(174): NCBI GI: 145601963 Blast Desc: MGG_05295 [Magnaporthe grisea 70-15] gi|145010421|gb|EDJ95077.1| MGG_05295 [Magnaporthe grisea 70-15]
  misc_feature (1)..(176): NCBI GI: 171687118 Blast Desc: protein product [Podospora anserina] gi|170943520|emb|CAP69173.1| protein product [Podospora anserina]
  misc_feature (1)..(169): NCBI GI: 164424163 Blast Desc: NCU07855 [Neurospora crassa OR74A] gi|157070401|gb|EAA33880.2| conserved [Neurospora crassa OR74A]
  misc_feature (1)..(147): NCBI GI: 116191671 Blast Desc: CHGG_05553 [Chaetomium globosum CBS 148.51] gi|88181466|gb|EAQ88934.1| CHGG_05553 [Chaetomium globosum CBS 148.51]
  misc_feature (1)..(173): NCBI GI: 116200325 Blast Desc: CHGG_08318 [Chaetomium globosum CBS 148.51] gi|88179597|gb|EAQ87065.1| CHGG_08318 [Chaetomium globosum CBS 148.51]
  misc_feature (1)..(173): NCBI GI: 116208566 Blast Desc: CHGG_03576 [Chaetomium globosum CBS 148.51] gi|88184173|gb|EAQ91641.1| CHGG_03576 [Chaetomium globosum CBS 148.51]
  misc_feature (1)..(132): NCBI GI: 116179158 Blast Desc: CHGG_00207 [Chaetomium globosum CBS 148.51] gi|88184504|gb|EAQ91972.1| CHGG_00207 [Chaetomium globosum CBS 148.51]
  misc_feature (1)..(97): NCBI GI: 116204135 Blast Desc: CHGG_09951 [Chaetomium globosum CBS 148.51] gi|88176079|gb|EAQ83547.1| CHGG_09951 [Chaetomium globosum CBS 148.51]
SFDDLLTAVQRVAKDQGYGVVKLRASNYRDGKPTRYDLVCDRGGVKYNSTAKKRNPSTRKVDCPWRAKAVCEVQLNNQWRFAVQDSRHNHEARVPAAPPGQENTPMAQSIRSLSNKLDRIGHDLTQGFMGVSQRLESVEKRLEAMEARMGTIEARMAGMESRGAGMDVPMENMDMENNLLGPAVM

SEQ ID NO: 23632 - DNA, 1216 bp, Muscodor strobelii
  misc_feature: SGI EST ID NO. CUFF.55590.0
  misc_feature: Variant of the nucleotide sequence at SEQ ID NO 23630
cttcgacgaccttctcaccgccgtccagcgagttgccaaggaccagggctacggcgtagtcaagctgcgtgccagcaactaccgcgatggcaagcccacgcgctacgatctggtctgtgaccgcggaggcgtcaagtacaacagcaccgccaagaagcgaaaccccagcacgcgcaaggtcgactgcccctggcgtgccaaggctgtctgcgaggtgcagctgaacaaccagtggcgctttgccgtccaagactcccgacacaaccacgaggctcgcgtccctgctgccccgcccggccaggagaacacccccatggcccagagcatacgcagcctgagcaacaagcttgaccgcattggccatgacctcacccaaggcttcatgggcgtcagtcagcggctcgagagtgtagagaagcgattggaagctatggaggccaggatgggcaccatcgaggctcgcatggctggcatggaatcccgtggtgctggcatggatgttcctatggagaacatggacatggagaataatcttctcggcccggccgtcatgtaggacacgaacggtcaagtttaccaccatcaccagcaccagcacggcttacaccacttgcttaaccagcaggatgaccgacgtctccagctgcctcttcctccccacctccaaccaaacaagctagagcaagaggagaaagaagagtcagataggtcttcagccgtttgatccattgacgttgctctcttgaaccgaagggaccgtgaatggtggagagtaatcacgcagtcatctatatcaccaataggctctctcgggcagtaatactggcaccaaacaagtggtaccactctgcacaatgctctaggagaggttttcatcagtttgcactttcggtaataaggtttcatctccgaggcaaaggagatcatgggtcggtttgcttatgggctttgcaaccaaataaaaaagaagatctggcgtacggaggggtggtaatgaacaaggttgtattattgagacgatccctttgtcctggtaaggatctcgcatatagggaaggtgggatgcttttccttcgtgatggtggcatcacattggccaatcaccatgaaaacgatcctgtgcaatagtttagagaagttcctgaagggttcccaacaaactctaacactacaaggatcactttaatagatgccaattacgttagttgtgctttgc

SEQ ID NO: 23633 - DNA, 987 bp, Muscodor strobelii
  misc_feature: SGI cDNA ID NO. 568043
  misc_feature: Encodes the peptide sequence at SEQ ID NO 23634
atgtttcttcgcagtgccatactggttttgccagtcgcctcggcacagctacatcaattagctaaggcggctgggaagctttacttcggctctgcaaccgacaacggggagttgtcagataccagttacgttagcatcttgaaaaatagcgccgaatttgggcaaataacgcccggtaatactcagaagtggcagtgcgggacctggacggtagacactctgacggccgtattgaatactcacatttccaacgaagtcggacattataagggccaatgttatgcttgggatgtcgtgaacgaggcactgaacgatgatggaacataccgcacggatgtgttctataacgtcctcggtactgattatatcccgatcgctttcaaagcagcagctgctgccgacccggctgctaagttgtattacaacgattataacattgagtccacgggctcgaaacaagcagcggccgcaaagattgtaactctgatcaaaaatgctggagcacggattgatggtgttggtcttcaagcgcacttcatcgttggctcaactccgagccagagctcgctccaagctgcaatgaactcatacatcactgctggtgctactgaagtggctatcactgaacttgatatccgattttcttcccttcctgcctctgcatctggactcactcaacaggctactgattacgcaactgtcacgaaagcctgccttgcactggattccatcgacattttccggccaaggcgctgcttgcccttacgacgagaactactcgaagaagccagcttggacagccataagctcggttcttgcagccgctgcaaccggaggaaccggaggaaccagtacgacaacgactatggcaacgagcacgaagactacgaccacagcatctcctacaacaacaggaggatgtacttctgtaaggcaaacccgatcactaccatcccgttcttccttgtcgttagcgtttcgctctaa

SEQ ID NO: 23634 - protein, 328 aa, Muscodor strobelii
  misc_feature: SGI Peptide ID NO. 568043
  misc_feature (16)..(263): Pfam Id: PF00331 Pfam Desc: Glycosyl hydrolase family 10
  misc_feature (72)..(245): Pfam Id: PF00331 Pfam Desc: Glycosyl hydrolase family 10
  misc_feature (16)..(64): Pfam Id: PF00331 Pfam Desc: Glycosyl hydrolase family 10
  misc_feature (7)..(242): NCBI GI: 156040349 Blast Desc: SS1G_12191 [Sclerotinia sclerotiorum 1980] gi|154696247|gb|EDN95985.1| SS1G_12191 [Sclerotinia sclerotiorum 1980]
  misc_feature (7)..(242): NCBI GI: 154320612 Blast Desc: BC1G_01778 [Botryotinia fuckeliana B05.10] gi|150853467|gb|EDN28659.1| BC1G_01778 [Botryotinia fuckeliana B05.10]
  misc_feature (3)..(240): NCBI GI: 115390166 Blast Desc: endo-1,4-beta-xylanase precursor [Aspergillus terreus NIH2624] gi|114194984|gb|EAU36684.1| endo-1,4-beta-xylanase precursor [Aspergillus terreus NIH2624]
  misc_feature (12)..(240): NCBI GI: 119473107 Blast Desc: endo-1,4-beta-xylanase, [Neosartorya fischeri NRRL 181] gi|119406652|gb|EAW16603.1| endo-1,4-beta-xylanase, [Neosartorya fischeri NRRL 181]
  misc_feature (12)..(240): NCBI GI: 70992777 Blast Desc: endo-1,4-beta-xylanase [Aspergillus fumigatus Af293] gi|66848870|gb|EAL89199.1| endo-1,4-beta-xylanase, [Aspergillus fumigatus Af293] gi|159130308|gb|EDP55421.1| [Aspergillus A1163]
  misc_feature (12)..(239): NCBI GI: 121700300 Blast Desc: endo-1,4-beta-xylanase, [Aspergillus clavatus NRRL 1] gi|119396557|gb|EAW06989.1| endo-1,4-beta-xylanase, [Aspergillus clavatus NRRL 1]
  misc_feature (17)..(241): NCBI GI: 145601837 Blast Desc: MGG_14243 [Magnaporthe grisea 70-15] gi|145010321|gb|EDJ94977.1| MGG_14243 [Magnaporthe grisea 70-15]
  misc_feature (1)..(242): NCBI GI: 261357694 Blast Desc: endo-1,4-beta-xylanase Z [Verticillium albo-atrum VaMs.102]
  misc_feature (15)..(240): NCBI GI: 255946720 Blast Desc: Pc22g00820 [Penicillium chrysogenum Wisconsin 54-1255] gi|211591144|emb|CAP97370.1| Pc22g00820 [Penicillium chrysogenum Wisconsin 54-1255]
  misc_feature (2)..(239): NCBI GI: 53747929 Blast Desc: endo-1,4-xylanase D [Penicillium funiculosum]
  misc_feature (1)..(241): SWISSPROT Homolog: EC 3.2.1.8 Endo-1,4-beta-xylanase
MFLRSAILVLPVASAQLHQLAKAAGKLYFGSATDNGELSDTSYVSILKNSAEFGQITPGNTQKWQCGTWTVDTLTAVLNTHISNEVGHYKGQCYAWDVVNEALNDDGTYRTDVFYNVLGTDYIPIAFKAAAAADPAAKLYYNDYNIESTGSKQAAAAKIVTLIKNAGARIDGVGLQAHFIVGSTPSQSSLQAAMNSYITAGATEVAITELDIRFSSLPASASGLTQQATDYATVTKACLALDSIDIFRPRRCLPLRRELLEEASLDSHKLGSCSRCNRRNRRNQYDNDYGNEHEDYDHSISYNNRRMYFCKANPITTIPFFLVVSVSL

SEQ ID NO: 23635 - DNA, 2592 bp, Muscodor strobelii
  misc_feature: SGI cDNA ID NO. 568044
  misc_feature: Reduced expression when VOC is produced
  misc_feature: Encodes the peptide sequence at SEQ ID NO 23636
atgtcaagacctgattggaatcggccttcttacgccgagaattcagctgtgtgtttcgctgggaatataatctacaggcccagacctgaacagcgaagcaatcgccagaataatacattcccaagcccacaaattcgcgctcgctctcgccggcctcagtctgttcaagttgtgtcttaccctgcaggctacattccctcagaggtcagggctgatcttgccagatctaagcggtccactaagccgaccaggaggaaaagtgtgaacgaggccttgaaattagaagatcacactggaaacagcgcatctcgacgggtattcgaaaaggttctagcgcccttcaagctctcgacttcgcatccaaacaccgccgagactcatatctccagtcctccccattcccctactgaggcgacacccatctccgtgcaaccaggaaccgacatcttttccatgctgtctgtacctccaccaaacaccggctccggcctccggggcaccgctttgaataatgtacatcggaacagtatcatatctgtccggtctgccaagtctatcatgagttccgtgacagaagtgccgaaaccagtcgccagtggaagtggagttcaatgttcgataatccttgcggagccaaatatattccttactgggtttgagcatgatggccacccacgacatgagagcgctaattcgactgctcttcttcgggggaagttacagctcgacatctcaaaaaatgtgaaactgaagtcgattactctcaaattacatggtagagccaggactgagtggcctgagggaattcccccaatgaaagtcgagcagttcgaagaggtttccctccgaactcaagtcctcacatttttccacgctacgcacgagacatgggaatccgaatatgggaaccaatgtacagtttctcttcggcaatgcccagataacgcgaataaaggtttatctacgtcaacgcagtctgcactgtccttatctttaaagcgaggcccgacagcaaatattagcgctcgtgattacaaacgactatcgcttcagtctgttcaatccagaagttttgggaaggattctgcaagcattgaggtcgtacaaccaaaaacatacaagatgttttatcctgggaagtacgaatatgcatttgagctaccgatcgatcaccatcagttagaaactactcgacttcaatttggatcagtcaaatgggagttggaagctaccgtagaacgagtcggtgctttcaaacccaatctacatggagccaaggaagtccgtattgttcgagttcccgatcaactgtcgctcgaattaactgagcccatttcgataagtaggcaatgggaagaccagcttcattatgatatcatgatatcagggaaatcatttccaatcggcagtagaatacccattgcattcaagctcactccattggcaaaggttcaagttcataaactcaaggtgtttgtgaccgaatctgttgagtattggactactgaccgaagagttactcggaaggaccctggtcgtaagattttgcttttcgagaaagcagctggcaagccactggacaagcagtatgaatcatctgaaataagagttctcagtggcggcgagctttcgccagaccaaagacaagaggcacgagcagccgcatctagacgcaggagcatagaagcatctcttggacgtaggatccctgagccactgccagagccatcggaaaatattctcggcgacctcgatttaggcttagagtcatattggggaccaaccgagatggaaatgaatgtacagattccgacctgcgaacagatggcaaaggacaaatcactacgactccatccagattgcagctggaaaaacgtcaacgttttccattggataaagattgtaatgcgtatatcaagacttgatccggaagatcctgctggaaagcgacgacgacattttgagatcagtattgattcaccgttcaccgtcctagactgtcgcgcaacacaggccaacacagcgctgcctgaatactcgggctcggagcagccaatgtaccgccaacaagcaagatgtggatgtcctgattcggacatacttgccaccaaccccagtccatcttccagcacgggaacaatccctggaatcgagccaaccgttgaatccccaggtattgcatcaccgccaccagcacatatacagcaacatcctgccgcaagcacacagccactacaaagacctatgcatcttttgcgctatcctagctttaaccccccggcattcgacgcagacgatccgccgccgccaatgccaacaccaccgccccaatacgatcttgttgtcgggactcctagtgttgatggcttagcagattattttgcgaggctagcagattacgatgaggattcagacagcggagacgataatgtttcgatacgaagtagactcacggaacgctctggtcgtgtcaacgtccctcacccgcggacgccaggaggtcgggtcgtacccagcagaagcttagaaatccaacgcccaccgcctagtgaactaagcattgctggtggtctgcaacaacgaagaggctag

SEQ ID NO: 23636 - protein, 863 aa, Muscodor strobelii
  misc_feature: SGI Peptide ID NO. 568044
  misc_feature (20)..(847): NCBI GI: 261359232 Blast Desc: arrestin domain-containing protein [Verticillium albo-atrum VaMs.102]
  misc_feature (22)..(848): NCBI GI: 256726122 Blast Desc: NECHADRAFT_70249 [Nectria haematococca mpVI 77-13-4]
  misc_feature (3)..(847): NCBI GI: 39949302 Blast Desc: MGG_08765 [Magnaporthe grisea 70-15] gi|145009311|gb|EDJ94022.1| MGG_08765 [Magnaporthe grisea 70-15]
  misc_feature (169)..(847): NCBI GI: 46111713 Blast Desc: FG02738.1 [Gibberella zeae PH-1]
  misc_feature (39)..(847): NCBI GI: 85109418 Blast Desc: NCU05721 [Neurospora crassa OR74A] gi|28924550|gb|EAA33671.1| conserved [Neurospora crassa OR74A]
  misc_feature (21)..(847): NCBI GI: 171681182 Blast Desc: protein product [Podospora anserina] gi|170940549|emb|CAP65777.1| protein product [Podospora anserina]
  misc_feature (21)..(801): NCBI GI: 116191187 Blast Desc: CHGG_05311 [Chaetomium globosum CBS 148.51] gi|88181224|gb|EAQ88692.1| CHGG_05311 [Chaetomium globosum CBS 148.51]
  misc_feature (178)..(808): NCBI GI: 256719937 Blast Desc: NECHADRAFT_89483 [Nectria haematococca mpVI 77-13-4]
  misc_feature (21)..(846): NCBI GI: 156040830 Blast Desc: SS1G_11393 [Sclerotinia sclerotiorum 1980] gi|154695777|gb|EDN95515.1| SS1G_11393 [Sclerotinia sclerotiorum 1980]
  misc_feature (21)..(846): NCBI GI: 154303922 Blast Desc: BC1G_08845 [Botryotinia fuckeliana B05.10] gi|150854429|gb|EDN29621.1| BC1G_08845 [Botryotinia fuckeliana B05.10]
  misc_feature: Useful for introducing or modulating the production of volatile compounds
MSRPDWNRPSYAENSAVCFAGNIIYRPRPEQRSNRQNNTFPSPQIRARSRRPQSVQVVSYPAGYIPSEVRADLARSKRSTKPTRRKSVNEALKLEDHTGNSASRRVFEKVLAPFKLSTSHPNTAETHISSPPHSPTEATPISVQPGTDIFSMLSVPPPNTGSGLRGTALNNVHRNSIISVRSAKSIMSSVTEVPKPVASGSGVQCSIILAEPNIFLTGFEHDGHPRHESANSTALLRGKLQLDISKNVKLKSITLKLHGRARTEWPEGIPPMKVEQFEEVSLRTQVLTFFHATHETWESEYGNQCTVSLRQCPDNANKGLSTSTQSALSLSLKRGPTANISARDYKRLSLQSVQSRSFGKDSASIEVVQPKTYKMFYPGKYEYAFELPIDHHQLETTRLQFGSVKWELEATVERVGAFKPNLHGAKEVRIVRVPDQLSLELTEPISISRQWEDQLHYDIMISGKSFPIGSRIPIAFKLTPLAKVQVHKLKVFVTESVEYWTTDRRVTRKDPGRKILLFEKAAGKPLDKQYESSEIRVLSGGELSPDQRQEARAAASRRRSIEASLGRRIPEPLPEPSENILGDLDLGLESYWGPTEMEMNVQIPTCEQMAKDKSLRLHPDCSWKNVNVFHWIKIVMRISRLDPEDPAGKRRRHFEISIDSPFTVLDCRATQANTALPEYSGSEQPMYRQQARCGCPDSDILATNPSPSSSTGTIPGIEPTVESPGIASPPPAHIQQHPAASTQPLQRPMHLLRYPSFNPPAFDADDPPPPMPTPPPQYDLVVGTPSVDGLADYFARLADYDEDSDSGDDNVSIRSRLTERSGRVNVPHPRTPGGRVVPSRSLEIQRPPPSELSIAGGLQQRRG

SEQ ID NO: 23637 - DNA, 4444 bp, Muscodor strobelii
  misc_feature: SGI EST ID NO. CUFF.55730.0
  misc_feature: Variant of the nucleotide sequence at SEQ ID NO 23635
caagcattaaccatagagtctgccagtgcatcgtctagcgtttcaatcattattccgttcttgtttgatatcgacctctcatttaaactgcatgaagatggcgactagatagatcatttaacaccagccgtacatgctgcctcacgtctagctccctacctcttaggatcccacccgcacctccttgtccatgaggttcctctttgcgtcgttttaaccgccgcttctccggcatacgcagaaccagaacggaccatcacgcacctcccttccgcatgtgctgtgtctccggctttctatacgcgacttgcagactctccaaacccccgcattcacagccgagacagcttcatctctcacctgaccgcatcatcagcgtcctgttgtatttgttctttgcaacaaggctaccttaggtagataggcacgctctggccctcgcgccattccacaggctgctcatacagtatctgcccattccagccctcgccgcaaacggccaagcacaggcaagacagggacccttccagttgatcagcgggtctccgatacattggcacgtcgccaggacattttccaatttcgtgccgcctttgcaaactaggtcgtcccctccacttctgttgacgtgtatgtcactccctacgtcgtcgctacagcagggattactttctcccagctgccccagcctacttcccggctttgtcatattgcttgctttttgtccgtcagctgtcttggacacaacacgtccacaacacgcaggccccaagaaacacagatgatctgttggtcctcccgccgagcaccaagactttcctctttgcaacgtcgtaccaccagtgctttgtacctcgtgccggccggttggtaccacacgccgccttcggttctggctggcccatttgactcgctggtatgtcggttttcctattgacctgactgccgcccctgttcgcgcctcctcctagtagcatgttccccacgcaacttcttataccgaaatatcatctcgccgctcgctttgttgtcggctttaaagccttttctctcggcaccacttaaacgtgctcgtgcccagcctattttcagtcatccctgtcctataacttctctgctgtctttgcattgattaattgagtgccttggttttcgactagtgtctttgggagctgaaacatctactttgattatatgatgtcgtacatacttccctgcctgagatgaactgcgtctcctgttcttttcttatgcccaactcctagaattttgttccctcaccatcgaatactcccgtggcgattactctaacatccgcaatgtcaagacctgattggaatcggccttcttacgccgagaattcagctgtgtgtttcgctgggaatataatctacaggcccagacctgaacagcgaagcaatcgccagaataatacattcccaagcccacaaattcgcgctcgctctcgccggcctcagtctgttcaagttgtgtcttaccctgcaggctacattccctcagaggtcagggctgatcttgccagatctaagcggtccactaagccgaccaggaggaaaagtgtgaacgaggccttgaaattagaagatcacactggaaacagcgcatctcgacgggtattcgaaaaggttctagcgcccttcaagctctcgacttcgcatccaaacaccgccgagactcatatctccagtcctccccattcccctactgaggcgacacccatctccgtgcaaccaggaaccgacatcttttccatgctgtctgtacctccaccaaacaccggctccggcctccggggcaccgctttgaataatgtacatcggaacagtatcatatctgtccggtctgccaagtctatcatgagttccgtgacagaagtgccgaaaccagtcgccagtggaagtggagttcaatgttcgataatccttgcggagccaaatatattccttactgggtttgagcatgatggccacccacgacatgagagcgctaattcgactgctcttcttcgggggaagttacagctcgacatctcaaaaaatgtgaaactgaagtcgattactctcaaattacatggtagagccaggactgagtggcctgagggaattcccccaatgaaagtcgagcagttcgaagaggtttccctccgaactcaagtcctcacatttttccacgctacgcacgagacatgggaatccgaatatgggaaccaatgtacagtttctcttcggcaatgcccagataacgcgaataaaggtttatctacgtcaacgcagtctgcactgtccttatctttaaagcgaggcccgacagcaaatattagcgctcgtgattacaaacgactatcgcttcagtctgttcaatccagaagttttgggaaggattctgcaagcattgaggtcgtacaaccaaaaacatacaagatgttttatcctgggaagtacgaatatgcatttgagctaccgatcgatcaccatcagttagaaactactcgacttcaatttggatcagtcaaatgggagttggaagctaccgtagaacgagtcggtgctttcaaacccaatctacatggagccaaggaagtccgtattgttcgagttcccgatcaactgtcgctcgaattaactgagcccatttcgataagtaggcaatgggaagaccagcttcattatgatatcatgatatcagggaaatcatttccaatcggcagtagaatacccattgcattcaagctcactccattggcaaaggttcaagttcataaactcaaggtgtttgtgaccgaatctgttgagtattggactactgaccgaagagttactcggaaggaccctggtcgtaagattttgcttttcgagaaagcagctggcaagccactggacaagcagtatgaatcatctgaaataagagttctcagtggcggcgagctttcgccagaccaaagacaagaggcacgagcagccgcatctagacgcaggagcatagaagcatctcttggacgtaggatccctgagccactgccagagccatcggaaaatattctcggcgacctcgatttaggcttagagtcatattggggaccaaccgagatggaaatgaatgtacagattccgacctgcgaacagatggcaaaggacaaatcactacgactccatccagattgcagctggaaaaacgtcaacgttttccattggataaagattgtaatgcgtatatcaagacttgatccggaagatcctgctggaaagcgacgacgacattttgagatcagtattgattcaccgttcaccgtcctagactgtcgcgcaacacaggccaacacagcgctgcctgaatactcgggctcggagcagccaatgtaccgccaacaagcaagatgtggatgtcctgattcggacatacttgccaccaaccccagtccatcttccagcacgggaacaatccctggaatcgagccaaccgttgaatccccaggtattgcatcaccgccaccagcacatatacagcaacatcctgccgcaagcacacagccactacaaagacctatgcatcttttgcgctatcctagctttaaccccccggcattcgacgcagacgatccgccgccgccaatgccaacaccaccgccccaatacgatcttgttgtcgggactcctagtgttgatggcttagcagattattttgcgaggctagcagattacgatgaggattcagacagcggagacgataatgtttcgatacgaagtagactcacggaacgctctggtcgtgtcaacgtccctcacccgcggacgccaggaggtcgggtcgtacccagcagaagcttagaaatccaacgcccaccgcctagtgaactaagcattgctggtggtctgcaacaacgaagaggctagttaccagtattcgactgtgggctctgccgagttctcatctgtgcctgcatcaacagtattcaccgatggtcttaccgcaaacctgctctgcttgggcaaaactccaagaaaaattgtcgagtaaagggcatatagatctcgcactatgggccaacaaggatcgcacgcctcgtgctacgcgaaaaaaccagtcggcttctatcgatttaggtgttgtggcccatgaggatttgaggacccacctccatgaatcaatttttcttgtctttcttttgtcgtctcgcgtaggttgtatacatattgggcgggtttgcattataagtggctcttttgctatcaagccaaaattggggtttgacatcaaaatcacatgcatgagaggcgtttacttaggaagatgataagatacccatttcatcgtttgcacctgcaactgaatatgatttcttgaccacggcaatgaaactgtgtttcctgtatttgtgaattgttcaacaatgcggataaccccgtctcgcaaaatgtctatcgcg

SEQ ID NO: 23638 - DNA, 1749 bp, Muscodor strobelii
  misc_feature: SGI cDNA ID NO. 568045
  misc_feature: Elevated expression when VOC is produced
  misc_feature: Encodes the peptide sequence at SEQ ID NO 23639
atgcgttccctggccactactctattcgctacggccgctacggcccgattgatggacagcttgccctcaattcccagaggatggacgcaagttaaggaagcggctctgaatgagcccatttcgctcaagattgcattaccccagcagcatgcggccgaattggagcaagcggttctagaaatgtcgacgccctcccatcggaactatggaaaacacatgtcgcggctcgaattgagatcatacacagccccaactaaagaatctcttctgaatgtccttggctggctatctgacagcaaaatcaagtcagttgtcgacaatgattggatcacaatctcgactacagtcgagaaagccaattctttgttgaatacgacttttgcgtggtatcagcttgacggcgacgacaagccaaagttacgaacactagaatacagcgtaccagatgatctcttcgaagacattgacctaatacagccgaccactcgatttggccagttggctgcacgaaggtccaccatctttgacacccaaatccttggacctgccgatgaaacactcaagaccgaggccgctagtgctgtatgcaacgccaaccaaattactcccgactgtattaagcaacagtacgatatcggctatactgcttcggcatcgggtaatctggtcgcttttgcatcatatctggaggaatatgctagatatacagatctgcagacatttgaaaagaactgggtcccatcagccgtaggacaaaactttaccgtgaaaacgacgaatggtgggctcgatagtcagaactcgaacagcgatagcggtgaggcgaacctggatgtgcaatacatcttgggtgtcagccatccaatccctattgtagaatatagcgtgggtggaagaggtccactggttccgacaaaagatgagccgggcccgtcttcttcgaatgaaccatacttggaattcttgacttatttacttggcttggatgatgctgcgttgcctcagaccctatcgacctcatacggagaagaagagcagagcgtaccggcagactatgccatcaaggtctgcaacatgtttatgcagcttggagctcgaggtgtcagtgtcttgttctctagtggcgattctggaccaggcggaagctgtgtcagggtcactgataatgcgccatatttcgagcccaccttccccggagcctgcccatatatcacgagtgtgggcgctactgttggcgtaagccccgaaaaggccgtctcgtacagttcaggaggattctcttcgctccacgcccggccatcatggcaggcagatgccgttggttcttatttgaagtctatcggcactacttactctaagtacttcaacgcttctggtcgtggatttccagatgtcgctgctcttggcacttcctttgctgttgtcgacaagggaagaagtgttttggaatccggtacaagtgcatcagcaccaacattcgctggcgtaattgctctgctgaacgcagcgcggaaggaggcgggccaggcgcccctaggattcctcaatccctggctttatagcgatgccgctgatgctcttactgatatcacagagggatatggatcaggctgtactagcaattcagccttcggtggtcgtggagcgagatggaatgcaactgctggatgggaccctgtgactgggctcggcgtgccaaactttggagctttattaagtgtggccgctcctggcgttgacaatgcgtag

SEQ ID NO: 23639 - protein, 582 aa, Muscodor strobelii
  misc_feature: SGI Peptide ID NO. 568045
  misc_feature (25)..(164): Pfam Id: PF09286 Pfam Desc: Pro-kumamolisin, activation domain
  misc_feature (16)..(582): NCBI GI: 171677241 Blast Desc: protein product [Podospora anserina] gi|170936688|emb|CAP61347.1| protein product [Podospora anserina]
  misc_feature (8)..(582): NCBI GI: 85109979 Blast Desc: NCU08418 [Neurospora crassa OR74A] gi|164424039|ref|XP_001728119.1| NCU10306 [Neurospora crassa OR74A] gi|28924845|gb|EAA33942.1| conserved [Neurospora crassa
  misc_feature (13)..(582): NCBI GI: 145616433 Blast Desc: MGG_07404 [Magnaporthe grisea 70-15] gi|145010150|gb|EDJ94806.1| MGG_07404 [Magnaporthe grisea 70-15]
  misc_feature (17)..(575): NCBI GI: 255933786 Blast Desc: Pc12g14680 [Penicillium chrysogenum Wisconsin 54-1255] gi|211582891|emb|CAP81095.1| Pc12g14680 [Penicillium chrysogenum Wisconsin 54-1255]
  misc_feature (6)..(575): NCBI GI: 121714541 Blast Desc: tripeptidyl-peptidase (TppA), [Aspergillus clavatus NRRL 1] gi|119403035|gb|EAW13455.1| tripeptidyl-peptidase (TppA), [Aspergillus clavatus NRRL 1]
  misc_feature (7)..(575): NCBI GI: 145249068 Blast Desc: An14g02470 [Aspergillus niger] gi|134081548|emb|CAK41984.1| protein product [Aspergillus niger]
  misc_feature (6)..(575): NCBI GI: 119487210 Blast Desc: tripeptidyl-peptidase (TppA), [Neosartorya fischeri NRRL 181] gi|119410617|gb|EAW20563.1| tripeptidyl-peptidase (TppA), [Neosartorya fischeri NRRL 181]
  misc_feature (6)..(575): NCBI GI: 70982015 Blast Desc: tripeptidyl-peptidase (TppA) [Aspergillus fumigatus Af293] gi|74628155|sp|Q70J59.1|SED2_ASPFU RecName: Full=Tripeptidyl-peptidase sed2; AltName: Full=Sedolisin-B;
  misc_feature (18)..(571): NCBI GI: 67541991 Blast Desc: AN7159.2 [Aspergillus nidulans FGSC A4] gi|40742221|gb|EAA61411.1| AN7159.2 [Aspergillus nidulans FGSC A4] gi|259483510|tpe|CBF78959.1| TPA: tripeptidyl-peptidase FGSC
  misc_feature (18)..(575): NCBI GI: 169782882 Blast Desc: [Aspergillus oryzae RIB40] gi|28189087|dbj|BAC56232.1| tripeptidyl peptidase A [Aspergillus oryzae] gi|51832346|gb|AAU10333.1| tripeptidyl aminopeptidase oryzae]
  misc_feature (19)..(572): SWISSPROT Homolog: EC 3.4.14.9 Tripeptidyl-peptidase I
  misc_feature: Useful for introducing or modulating the production of volatile compounds
MRSLATTLFATAATARLMDSLPSIPRGWTQVKEAALNEPISLKIALPQQHAAELEQAVLEMSTPSHRNYGKHMSRLELRSYTAPTKESLLNVLGWLSDSKIKSVVDNDWITISTTVEKANSLLNTTFAWYQLDGDDKPKLRTLEYSVPDDLFEDIDLIQPTTRFGQLAARRSTIFDTQILGPADETLKTEAASAVCNANQITPDCIKQQYDIGYTASASGNLVAFASYLEEYARYTDLQTFEKNWVPSAVGQNFTVKTTNGGLDSQNSNSDSGEANLDVQYILGVSHPIPIVEYSVGGRGPLVPTKDEPGPSSSNEPYLEFLTYLLGLDDAALPQTLSTSYGEEEQSVPADYAIKVCNMFMQLGARGVSVLFSSGDSGPGGSCVRVTDNAPYFEPTFPGACPYITSVGATVGVSPEKAVSYSSGGFSSLHARPSWQADAVGSYLKSIGTTYSKYFNASGRGFPDVAALGTSFAVVDKGRSVLESGTSASAPTFAGVIALLNAARKEAGQAPLGFLNPWLYSDAADALTDITEGYGSGCTSNSAFGGRGARWNATAGWDPVTGLGVPNFGALLSVAAPGVDNA

SEQ ID NO: 23640 - DNA, 3888 bp, Muscodor strobelii
  misc_feature: SGI EST ID NO. CUFF.55651.0
  misc_feature: Variant of the nucleotide sequence at SEQ ID NO 23638
ccagcaaagacccttgacagggatcttgactatcacgacatacgtccacgccctgatcttcctactcaataacaggcagatcaattgcaggtcatgctgtgcgtacataaatagagagggacccccttctgggatcctatctgaactgtccgaccaactgcactcgtttcctcatattgcagtggtctttgatagcgtctgatattgtgaccaatatgcgttccctggccactactctattcgctacggccgctacggcccgattgatggacagcttgccctcaattcccagaggatggacgcaagttaaggaagcggctctgaatgagcccatttcgctcaagattgcattaccccagcagcatgcggccgaattggagcaagcggttctagaaatgtcgacgccctcccatcggaactatggaaaacacatgtcgcggctcgaattgagatcatacacagccccaactaaagaatctcttctgaatgtccttggctggctatctgacagcaaaatcaagtcagttgtcgacaatgattggatcacaatctcgactacagtcgagaaagccaattctttgttgaatacgacttttgcgtggtatcagcttgacggcgacgacaagccaaagttacgaacactagaatacagcgtaccagatgatctcttcgaagacattgacctaatacagccgaccactcgatttggccagttggctgcacgaaggtccaccatctttgacacccaaatccttggacctgccgatgaaacactcaagaccgaggccgctagtgctgtatgcaacgccaaccaaattactcccgactgtattaagcaacagtacgatatcggctatactgcttcggcatcgggtaatctggtcgcttttgcatcatatctggaggaatatgctagatatacagatctgcagacatttgaaaagaactgggtcccatcagccgtaggacaaaactttaccgtgaaaacgacgaatggtgggctcgatagtcagaactcgaacagcgatagcggtgaggcgaacctggatgtgcaatacatcttgggtgtcagccatccaatccctattgtagaatatagcggtaagcagctcccagatccagtatctgcctatatgggatcctttcgggagtccgcttctttatccgggggcgtgctcgtgaaacatgtttcaagactcccgagacctaagcaaactggtagcaaacacgccatcaagagtaattactgatctaatctattgcagtgggtggaagaggtccactggttccgacaaaagatgagccgggcccgtcttcttcgaatgaaccatacttggaattcttgacttatttacttggcttggatgatgctgcgttgcctcagaccctatcgacctcatacggagaagaagagcagagcgtaccggcagactatgccatcaaggtctgcaacatgtttatgcagcttggagctcgaggtgtcagtgtcttgttctctagtggcgattctggaccaggcggaagctgtgtcagggtcactgataatgcgccatatttcgagcccaccttccccggagcctgcccatatatcacgagtgtgggcgctactgttggcgtaagccccgaaaaggccgtctcgtacagttcaggaggattctcttcgctccacgcccggccatcatggcaggcagatgccgttggttcttatttgaagtctatcggcactacttactctaagtacttcaacgcttctggtcgtggatttccagatgtcgctgctcttggcacttcctttgctgttgtcgacaagggaagaagtgttttggaatccggtacaagtgcatcagcaccaacattcgctggcgtaattgctctgctgaacgcagcgcggaaggaggcgggccaggcgcccctaggattcctcaatccctggctttatagcgatgccgctgatgctcttactgatatcacagagggatatggatcaggctgtactagcaattcagccttcggtggtcgtggagcgagatggaatgcaactgctggatgggaccctgtgactgggctcggcgtgccaaactttggagctttattaagtgtggccgctcctggcgttgacaatgcgtagagagttttctcagcatagaaactagatcgaaatagatcgctgttactggccatagcaattttttcagttggctgatttgagtatatgtaaatgcttgaaactacctctcaatccaactgtatagaagaagattcggctcttagatgcaaaagagccagtcttaatctagacaacacgaaaccttagcaatagtgacctgagggttacgttagcaacgaaaattgccatttgctatcacagattcaatccaacgtatgtttgagaaggttgctctgtgacgaaataagataagagattagccactaagtaagtagcttcgtattgactttgtgggttctttttgtgcataattaagccgctacccttgagcttgggtagatatgagtggaatagatatgatagctcattgataagggactgcaaacccattgaagagagcctcgtgctccactacaatagtgattacaatctatgtgcatgccaggtaaggatcctcgattcgaatctgagccacagcggtcgcgtctggcagaacagaggttggtgagacgcagctggtcaccatctgacgcagaaatattcccccgtagcattggtcagactatcttataaaccacctttgttacatcggcatatcattttcgcgctttcgcgtcttcgccacttcgctgcatctaattatctttaccttattgaagagaagggggctctgcagcatcatcaccagacacgacccctatgcagataagatcgggtttgtgccctgtagactagctgagcagccccggcggtaacaaatctcactgcccaatttgactttcatttccgggatacggtcttaccatctgggaaatttcttgaacatgcaagctggcaagttatacgtgtgtaatatactcgccgttcgtcaatgagagctgtgccgaagacctagtgggcaggtagtcaagagcggcccagatccctaaccttggggaaataaacctcaatgactctcccaagttgttggcattcatgaatcatgtccaaatcaacattcactgagcagggaatccatacatcgccagttggcatgcttcgagtacctacatgcatgaacagggctcgtaccgggacatggattactgcgggggtggcccctttgggcatgcttcaagcagcttgactcactaagacaactgaacagttctatatacatgtacctacatattcctgatttcacagttgatgtagacgtcccttattcgagttcgtcatgtcgtttgtatcttgttgttgtgacttctctttaccttttcggaaacaggtgttggacatactcacacgtttcaatgattgggaatgtgagccaatgcttgtgcttacgtccaagaatgttgttagccttgagaaccacaagctgccaagtttacaggaatgtttgcaggatctagccccatatcctttcgttggtattggaatacgtcgtacaattccttcgccctaatatgggactcagtgccactcagttgcgttgctcggctggatctagtggctagactatcgacatgcttgactgtttatcattccaaaattcgctactctagggatgaaagggactcacccgcacgaccatcattgcggcaaacagtacagagtctggttgggtatctagggagcgattgatgcatcagaagaggagtaacctaaaggtctatttaaactgttctattgtcaatggctagatgtactcattttctgtgctctcagctgtgagcctg

SEQ ID NO: 23641 - DNA, 1359 bp, Muscodor strobelii
  misc_feature: SGI cDNA ID NO. 568046
  misc_feature: Encodes the peptide sequence at SEQ ID NO 23642
atgagggtccagcacgccattcttttcgttgcagccctcgtcaccaatggctctcctgaacttggccgcaggtcatacaaggggttcaaagtcttccgcgtgacgcctacggatgacacatccgtcatgcctcagctccaatctctcgctgctattgaaatttctaatacacaaggggtcactggcagacaagttgttgatgttgctatccccccaaatcatatcggcgcattcaatgccctcggtttgataaccgagacactatcggaggatctcggcgcggatatcacactcgaaggagaattcagaccgtttccaggatttgattcaaactcattggttgccgcaacaggtcgtggcctcccgatggcctcatggttccgggactaccatctctatgaagaccacttgacgtttctcaaaggcctgcagcaagcattttcttccaattcgaagctcatcactgctggaacctcttttgaaaaccgcagcatccaaggaattcatatctggggggacggtggccaagactcgaagcctgcaattatcatacgcagtttcatggaaatgtccatgcgagagaatgggattacaagcatgactgtcgagtacattgcatatcaacttatcaacacataccgcaatgatacggttgtaaaagcagtactcgacaatcatgacttctacatattccccatagtcaatcctgacggtaacagcagtggcaatctccggcttcattcgaatctaacattctcggtaggtttcatctactcacagacaagagaccggctttggcgcaaaagcagacaaacacgctctagtagtatagccactattggcacagaccttaatcgaaattggccatatcaatgggatggagtaggctcatcgacatatcccggatcagcgcatggtgaccatctatctcgaacacaaggtatcaaactctacatcgactggcataggttagtaaacgtgactctctaccagtctcacaagcaatttcttcagcgcaagaccgctgactaccgtagctacggacaatatatcttgactccttatggatattcatgcaccgcaaaatcgccgaaccagtctaaacaggatagcttagcagagagcatgagcgttgccatagctacggttcatggcacacatttcattgcaggccccctgtgctctacgctgtatcaagctgcaggctgcagcaccgattacttcacagatatagcgaaagctaatttctcatggggaatcgaacttcgaggctcggggttcgtcctcccaccagctcaaatcctaccaagcggcgaagaaatgtgggctggactcaaggatttatgcacgaagatttga

SEQ ID NO: 23642 - protein, 452 aa, Muscodor strobelii
  misc_feature: SGI Peptide ID NO. 568046
  misc_feature (136)..(444): Pfam Id: PF00246 Pfam Desc: Zinc carboxypeptidase
  misc_feature (346)..(444): Pfam Id: PF00246 Pfam Desc: Zinc carboxypeptidase
  misc_feature (255)..(322): Pfam Id: PF00246 Pfam Desc: Zinc carboxypeptidase
  misc_feature (197)..(238): Pfam Id: PF00246 Pfam Desc: Zinc carboxypeptidase
  misc_feature (136)..(184): Pfam Id: PF00246 Pfam Desc: Zinc carboxypeptidase
  misc_feature (19)..(452): NCBI GI: 171680620 Blast Desc: protein product [Podospora anserina] gi|170939937|emb|CAP65163.1| protein product [Podospora anserina]
  misc_feature (23)..(448): NCBI GI: 256725475 Blast Desc: NECHADRAFT_45775 [Nectria haematococca mpVI 77-13-4]
  misc_feature (25)..(448): NCBI GI: 119184440 Blast Desc: CIMG_07026 [Coccidioides immitis RS]
  misc_feature (1)..(452): NCBI GI: 261358037 Blast Desc: zinc carboxypeptidase A [Verticillium albo-atrum VaMs.102]
  misc_feature (6)..(452): NCBI GI: 284433487 Blast Desc: MCPAL_NANOT RecName: Full=Metallocarboxypeptidase A-like protein MCYG_01475; Flags: Precursor gi|238838994|gb|EEQ28656.1| carboxypeptidase A4 [Microsporum CBS
  misc_feature (25)..(448): NCBI GI: 240109875 Blast Desc: carboxypeptidase A1 precursor, [Coccidioides posadasii C735 delta SOWgp]
  misc_feature (19)..(452): NCBI GI: 240105468 Blast Desc: carboxypeptidase A4 precursor, [Coccidioides posadasii C735 delta SOWgp]
  misc_feature (1)..(452): NCBI GI: 197253670 Blast Desc: carboxypeptidase [Metarhizium anisopliae]
  misc_feature (1)..(452): NCBI GI: 2351566 Blast Desc: carboxypeptidase [Metarhizium anisopliae]
  misc_feature (23)..(452): NCBI GI: 85091739 Blast Desc: NCU07536 [Neurospora crassa OR74A] gi|28920446|gb|EAA29813.1| NCU07536 [Neurospora crassa OR74A]
  misc_feature (23)..(452): SWISSPROT Homolog: EC 3.4.17.15 Carboxypeptidase A2
MRVQHAILFVAALVTNGSPELGRRSYKGFKVFRVTPTDDTSVMPQLQSLAAIEISNTQGVTGRQVVDVAIPPNHIGAFNALGLITETLSEDLGADITLEGEFRPFPGFDSNSLVAATGRGLPMASWFRDYHLYEDHLTFLKGLQQAFSSNSKLITAGTSFENRSIQGIHIWGDGGQDSKPAIIIRSFMEMSMRENGITSMTVEYIAYQLINTYRNDTVVKAVLDNHDFYIFPIVNPDGNSSGNLRLHSNLTFSVGFIYSQTRDRLWRKSRQTRSSSIATIGTDLNRNWPYQWDGVGSSTYPGSAHGDHLSRTQGIKLYIDWHRLVNVTLYQSHKQFLQRKTADYRSYGQYILTPYGYSCTAKSPNQSKQDSLAESMSVAIATVHGTHFIAGPLCSTLYQAAGCSTDYFTDIAKANFSWGIELRGSGFVLPPAQILPSGEEMWAGLKDLCTKI

SEQ ID NO: 23643 - DNA, 1116 bp, Muscodor strobelii
  misc_feature: SGI cDNA ID NO. 568047
  misc_feature: Reduced expression when VOC is produced
  misc_feature: Encodes the peptide sequence at SEQ ID NO 23644
atgcgcgacattatttcagatcacccctcaacaggatcgagttcagctatggctgcgaatgaagatttagttggccacaaactcttgatcctaggtgactacgatctacccgatggttttctcgagcatgttaacaagaaattcccgggtctcgaggttgtgcacctacgcatccatccctggaaatttatagagtcctcaggtatacctgacgaagaatggaagacagtgacggttctcctcacaggtcctctgactcccacaatcgagcaagcaccgaaacttcagctcgtccaacttcaaagcgctggagccaattatatgctggacaaaccgatattcaaagatactaaaattgcattttgtaccgcaaacggcgtccacggcccgcccatctcggaatgggtaatttgcacttatcttgctcatcaacatcgcatcccccgttatctaaacaatatgcgtgacggaaaatgggagagaagttgggacgatatggataccaaagatgctgtaaatcagcgtgtaggcatcctcggatatgggagcattggacgtcaagttgcgcgcgtagcaactgcaatgggcatggaagtcttcgcatataccaataggcctaagcctacgcctgagagccgacatcatcctcctgggcttggtgacccggacggtacgctacccaagaaatggttttcgggcaccacttccgccgagcttgatgaattcttgggctctggactcgacttattagttgttgcggtaccgctaacgccgcagactcgcggtatgcttggcgcggctcaatttgaagtcttagcaaaacggaagacatacgtatctaacatcgggcgtggtgctacgattgtaacgtctgacttgatcactgcgctcgatgagggctggatccgtggagcggctcttgatgttactgatcctgagcctttgcccaaagatcatccgttatggcataaggagaatgttattatcacaccgcatgtgagcggaaactcggatgcctataacgacagactattcgcgattttgaatatcaatctcgagaggcttagtaaaggcaaggacttcatgaaccgtgttagcaaaagtcgcggttactga

SEQ ID NO: 23644 - protein, 371 aa, Muscodor strobelii
  misc_feature: SGI Peptide ID NO. 568047
  misc_feature (137)..(334): Pfam Id: PF02826 Pfam Desc: D-isomer specific 2-hydroxyacid dehydrogenase, NAD binding domain
  misc_feature (17)..(371): NCBI GI: 171688036 Blast Desc: protein product [Podospora anserina] gi|170943980|emb|CAP70090.1| protein product [Podospora anserina]
  misc_feature (20)..(369): NCBI GI: 85091872 Blast Desc: NCU04857 [Neurospora crassa OR74A] gi|28920514|gb|EAA29878.1| conserved [Neurospora crassa OR74A]
  misc_feature (26)..(371): NCBI GI: 39975083 Blast Desc: MGG_00312 [Magnaporthe grisea 70-15] gi|145018804|gb|EDK03083.1| MGG_00312 [Magnaporthe grisea 70-15]
  misc_feature (20)..(371): NCBI GI: 256724980 Blast Desc: NECHADRAFT_34748 [Nectria haematococca mpVI 77-13-4]
  misc_feature (16)..(371): NCBI GI: 145615326 Blast Desc: MGG_05506 [Magnaporthe grisea 70-15] gi|145022175|gb|EDK06195.1| MGG_05506 [Magnaporthe grisea 70-15]
  misc_feature (28)..(371): NCBI GI: 145250931 Blast Desc: An15g04440 [Aspergillus niger] gi|134082505|emb|CAK97311.1| protein product [Aspergillus niger]
  misc_feature (19)..(371): NCBI GI: 46110643 Blast Desc: FG02203.1 [Gibberella zeae PH-1]
  misc_feature (37)..(371): NCBI GI: 261357247 Blast Desc: 2-hydroxyacid dehydrogenase [Verticillium albo-atrum VaMs.102]
  misc_feature (11)..(371): NCBI GI: 85079808 Blast Desc: NCU05050 [Neurospora crassa OR74A] gi|28917488|gb|EAA27188.1| [Neurospora crassa OR74A]
  misc_feature (93)..(371): NCBI GI: 169602729 Blast Desc: SNOG_04368 [Phaeosphaeria nodorum SN15] gi|160706239|gb|EAT88128.2| SNOG_04368 [Phaeosphaeria nodorum SN15]
  misc_feature (129)..(371): SWISSPROT Homolog: EC 1.1.1.81 Hydroxypyruvate reductase
  misc_feature (129)..(371): SWISSPROT Homolog: EC 1.1.1.79 Glyoxylate reductase (NADP(+))
  misc_feature: Useful for introducing or modulating the production of volatile compounds
MRDIISDHPSTGSSSAMAANEDLVGHKLLILGDYDLPDGFLEHVNKKFPGLEVVHLRIHPWKFIESSGIPDEEWKTVTVLLTGPLTPTIEQAPKLQLVQLQSAGANYMLDKPIFKDTKIAFCTANGVHGPPISEWVICTYLAHQHRIPRYLNNMRDGKWERSWDDMDTKDAVNQRVGILGYGSIGRQVARVATAMGMEVFAYTNRPKPTPESRHHPPGLGDPDGTLPKKWFSGTTSAELDEFLGSGLDLLVVAVPLTPQTRGMLGAAQFEVLAKRKTYVSNIGRGATIVTSDLITALDEGWIRGAALDVTDPEPLPKDHPLWHKENVIITPHVSGNSDAYNDRLFAILNINLERLSKGKDFMNRVSKSRGY

SEQ ID NO: 23645 - DNA, 2508 bp, Muscodor strobelii
  misc_feature: SGI EST ID NO. CUFF.55647.2
  misc_feature: Variant of the nucleotide sequence at SEQ ID NO 23643
cgcctgatgtgaatttgaagtaatactacgagatgatatttagtggaaaatcttgatactagccgttgaaaagaatatttgtatttagtcaatgttgagacagagcgactatccagaagcgaacctgaggttgggatgcgtgacgaagaccgacattcggttgctagcatctcaattgcccggagacaatagttcgaactcctcatccatcaaatcatacggtcacccacgaccagaaaaactaagaaatatagagggtaagatgcttcgatttcaccttgccagtgccggtagactgcggactatgcattgtcgctggtataacttatcgttcgtgggtgtttgggcttaattgtgaatttgcatgggatccaccgcgcattaaggttactgtgcttggtgacaactaacggactctcgggatagcttagccaggccggtcgcgcccaccgcctatcgcgtgatcgatcagccggttgcgcaatatcattctataagaactgcactcatactacggcttcaacggagtcgaagaggacgatctcggtcgagctaaccaagcaattgtgcggttctcagctactgtgccaatggtctgtggaaattcaataacaggtcatcataggatccgttcacatttgcgaaagcatgcgcgacattatttcagatcacccctcaacaggatcgagttcagctatggctgcgaatgaagatttagttggccacaaactcttgatcctaggtgactacgatctacccgatggttttctcgagcatgttaacaagaaattcccgggtctcgaggttgtgcacctacgcatccatccctggaaatttatagagtcctcaggtatacctgacgaagaatggaagacagtgacggttctcctcacaggtcctctgactcccacaatcgagcaagcaccgaaacttcagctcgtccaacttcaaagcgctggagccaattatatgctggacaaaccgatattcaaagatactaaaattgcattttgtaccgcaaacggcgtccacggcccgcccatctcggaatgggtaatttgcacttatcttgctcatcaacatcgcatcccccgttatctaaacaatatgcgtgacggaaaatgggagagaagttgggacgatatggataccaaagatgctgtaaatcagcgtgtaggcatcctcggatatgggagcattggacgtcaagttgcgcgcgtagcaactgcaatgggcatggaagtcttcgcatataccaataggcctaagcctacgcctgagagccgacgtgaccactcttggtatggacgaaaagatcccgcgcgacttattttctgaccgcatttcttaagacatcgtgctaacttttacgtagtaagtgatctgaactatgcgttatcatgaaccggccctttgtcttaaaattctggtgcacgtaacggaatattgtgaaaaattaactaacgcgaaacacttgcggctacagatcatcctcctgggcttggtgacccggacggtacgctacccaagaaatggttttcgggcaccacttccgccgagcttgatgaattcttgggctctggactcgacttattagttgttgcggtaccgctaacgccgcagactcgcggtatgcttggcgcggctcaatttgaagtcttagcaaaacggaagacatacgtatctaacatcgggcgtggtgctacgattgtaacgtctgacttgatcactgcgctcgatgagggctggatccgtggagcggctcttgatgttactgatcctgagcctttgcccaaagatcatccgttatggcataaggagaatgttattatcacaccgcatgtgagcggaaactcggatgcctataacgacagactattcgcgattttgaatatcaatctcgagaggcttagtaaaggcaaggacttcatgaaccgtgttagcaaaagtcgcggttactgagggtttgcgatgggaaccggtacttagagaaatgatatcttggtcggcaatggaagaagtaggggaaatctcgtttgcctctgtatcctgcgctcttcgattgagtttcgacaagcgcttcacgctcaaacatactagtaggctcccgaaaggaaataagactctgacctggcctatgaacagtaaattatcacgtcacataacagaacaacatattgtacccatgatggttctgatgaacacgaggcgcgccccgctgtagtctcctacgaatctagtcaacggttcaaaggtatctaacactgtatgcaagatcgatctctaccatctctcctacatctaatggttgcttgggttgcatctcgcggactccctgcattttgaggcacagtggactgttacctaagacatgacccaactgaaagttgtttcttactaaggtaggtacatacgtaagccttgtcgcgcaataggtttttttccgaaataatggaagaccttgacacccagtgcttccttgaggatacctcgcttaggaatttcgac

SEQ ID NO: 23646 - DNA, 1179 bp, Muscodor strobelii
  misc_feature: SGI cDNA ID NO. 568048
  misc_feature: Reduced expression when VOC is produced
  misc_feature: Encodes the peptide sequence at SEQ ID NO 23647
atggcaaccttaaagaactcagaaactatcaaaccggtgatcattgtcggtggcggcttagcaggacttgtcgctgcgttcgagctcacagagcgcaatgtgccggtcattctcatcgaccaagaaggggagcaaaatctaggaggacaagctttctggtcccttggaggcattttctgcgtgaactctaaagagcagcgccgcatgggaattaaagacagtcgcgagctcgccatgcgtgactggttcggctctgcaggattcgatcgagagcatgaagaccactggccgcgccagtgggccgaagcgtttgtgaatttcgctacagacgagatggaagactatgtcaaggcgcgtggtatggggtttttgctcaatgttgggtgggctgaacggggtgacggaaatgctgagggccacggcaattcggtcccccgatttcacattacatggggcgctgggcccgaagtcgtgcgcgtgtttgcagagcctgtgcgggctgcagcagagaaatcacttgttgatttcaagttcagacatatggtcgatgagatgctccttgatgagaacgggcgaatgtcaggtgtacggggaagagtcctcgagaatgaccctgtcgaccgcggcgtgtcatcatcaaggacagtcgtcgataagttcgagatccacggctcagctgtggtcatcgcaacaggtggtatcggcggaaacgtggaacttgttcagaaatgttggccggctgaccgcttcggcggacacattccacagaacttcgtgattggggtccctgctcacgtggatggtcgcatgatcaacatcagcgaatctgcgggtgctaatattatcaaccgtgatcgaatgtggcattatacagagggtttaagaaattggaactctatctggccgtcccatggaatacgagtcctaccagctccttcttctctctggctcgatgcaacaggcaaaagacttccacccttcctgtaccctggaagtgatacactgggtactctcaagtacatctgtagcacaggctatgattacactgtgagtttcattgtcatatattttctatgctgtcttcctagatacgaccaagtctctagagcgtttgcggctaccaacttcatgtatcaaacactttacatggtaccagccactaattttctgcgtttttag

SEQ ID NO: 23647 - protein, 392 aa, Muscodor strobelii
  misc_feature: SGI Peptide ID NO. 568048
  misc_feature (12)..(390): Pfam Id: PF00890 Pfam Desc: FAD binding domain
  misc_feature (12)..(42): Pfam Id: PF01266 Pfam Desc: FAD dependent oxidoreductase
  misc_feature (13)..(326): Pfam Id: PF00890 Pfam Desc: FAD binding domain
  misc_feature (12)..(41): Pfam Id: PF01494 Pfam Desc: FAD binding domain
  misc_feature (12)..(39): Pfam Id: PF01134 Pfam Desc: Glucose inhibited division protein A
  misc_feature (12)..(47): Pfam Id: PF07992 Pfam Desc: Pyridine nucleotide-disulphide oxidoreductase
  misc_feature (6)..(349): NCBI GI: 46111601 Blast Desc: FG02682.1 [Gibberella zeae PH-1]
  misc_feature (11)..(349): NCBI GI: 116205784 Blast Desc: CHGG_02185 [Chaetomium globosum CBS 148.51] gi|88182782|gb|EAQ90250.1| CHGG_02185 [Chaetomium globosum CBS 148.51]
  misc_feature (11)..(349): NCBI GI: 171678163 Blast Desc: protein product [Podospora anserina] gi|170937151|emb|CAP61808.1| protein product [Podospora anserina]
  misc_feature (9)..(349): NCBI GI: 39968011 Blast Desc: MGG_02098 [Magnaporthe grisea 70-15] gi|145012980|gb|EDJ97621.1| MGG_02098 [Magnaporthe grisea 70-15]
  misc_feature (12)..(349): NCBI GI: 212533951 Blast Desc: 3-ketosteroid-delta-1-dehydrogenase, [Penicillium marneffei ATCC 18224] gi|210072496|gb|EEA26585.1| 3-ketosteroid-delta-1-dehydrogenase, [Penicillium marneffei ATCC
  misc_feature (12)..(349): NCBI GI: 261354651 Blast Desc: fumarate reductase/succinate dehydrogenase flavoprotein [Verticillium albo-atrum VaMs.102]
  misc_feature (11)..(349): NCBI GI: 119478145 Blast Desc: 3-ketosteroid-delta-1-dehydrogenase, [Neosartorya fischeri NRRL 181] gi|119407481|gb|EAW17430.1| 3-ketosteroid-delta-1-dehydrogenase, [Neosartorya fischeri NRRL
  misc_feature (11)..(349): NCBI GI: 70997083 Blast Desc: 3-ketosteroid-delta-1-dehydrogenase [Aspergillus fumigatus Af293] gi|66850932|gb|EAL91258.1| 3-ketosteroid-delta-1-dehydrogenase, [Aspergillus fumigatus
  misc_feature (7)..(349): NCBI GI: 242779203 Blast Desc: 3-ketosteroid-delta-1-dehydrogenase, [Talaromyces stipitatus ATCC 10500] gi|218723015|gb|EED22433.1| 3-ketosteroid-delta-1-dehydrogenase, [Talaromyces stipitatus ATCC
  misc_feature (11)..(349): NCBI GI: 159126978 Blast Desc: conserved [Aspergillus fumigatus A1163]
  misc_feature: Useful for introducing or modulating the production of volatile compounds
MATLKNSETIKPVIIVGGGLAGLVAAFELTERNVPVILIDQEGEQNLGGQAFWSLGGIFCVNSKEQRRMGIKDSRELAMRDWFGSAGFDREHEDHWPRQWAEAFVNFATDEMEDYVKARGMGFLLNVGWAERGDGNAEGHGNSVPRFHITWGAGPEVVRVFAEPVRAAAEKSLVDFKFRHMVDEMLLDENGRMSGVRGRVLENDPVDRGVSSSRTVVDKFEIHGSAVVIATGGIGGNVELVQKCWPADRFGGHIPQNFVIGVPAHVDGRMINISESAGANIINRDRMWHYTEGLRNWNSIWPSHGIRVLPAPSSLWLDATGKRLPPFLYPGSDTLGTLKYICSTGYDYTVSFIVIYFLCCLPRYDQVSRAFAATNFMYQTLYMVPATNFLRF

SEQ ID NO: 23648 - DNA, 1596 bp, Muscodor strobelii
  misc_feature: SGI EST ID NO. CUFF.55726.2
  misc_feature: Variant of the nucleotide sequence at SEQ ID NO 23646
tctcactccagagtcctagaatttgccaattagacacttctaacaaagtaatttgaacatggcaaccttaaagaactcagaaactatcaaaccggtgatcattgtcggtggcggcttagcaggacttgtcgctgcgttcgagctcacagagcgcaatgtgccggtcattctcatcgaccaagaaggggagcaaaatctaggaggacaagctttctggtcccttggaggcattttctgcgtgaactctaaagagcagcgccgcatgggaattaaagacagtcgcgagctcgccatgcgtgactggttcggctctgcaggattcgatcgagagcatgaagaccactggccgcgccagtgggccgaagcgtttgtgaatttcgctacagacgagatggaagactatgtcaaggcgcgtggtatggggtttttgctcaatgttgggtgggctgaacggggtgacggaaatgctgagggccacggcaattcggtcccccgatttcacattacatggggcgctgggcccgaagtcgtgcgcgtgtttgcagagcctgtgcgggctgcagcagagaaatcacttgttgatttcaagttcagacatatggtcgatgagatgctccttgatgagaacgggcgaatgtcaggtgtacggggaagagtcctcgagaatgaccctgtcgaccgcggcgtgtcatcatcaaggacagtcgtcgataagttcgagatccacggctcagctgtggtcatcgcaacaggtggtatcggcggaaacgtggaacttgttcagaaatgttggccggctgaccgcttcggcggacacattccacagaacttcgtgattggggtccctgctcacgtggatggtcgcatgatcaacatcagcgaatctgcgggtgctaatattatcaaccgtgatcgaatgtggcattatacagagggtttaagaaattggaactctatctggccgtcccatggaatacgagtcctaccagctccttcttctctctggctcgatgcaacaggcaaaagacttccacccttcctgtaccctggaagtgatacactgggtactctcaagtacatctgtagcacaggctatgattacacttggttcatactaaaccaaacgattattgccagagaattcgcattgtctggatctgaacagaacccggatctatcggaaaagagtatctggcaattgttgaagaaccgaatatttagctcaaagggaaccgtaccggttcaaaattttgtgaaacatggagaggatttcattgttcgagacaatctccaagatctcgttgcggccatgaacgtagagggcaaaaccctcggtggccctgagcttgattacgcccagatacagaagacggttgaattacgcgacggacaactcgataacaattattgtaaagacgctcaaatgtcggtatcgtttgtcccgatcaatggaggattcgatcatagactatgagaagtaatatgaagttagactgacatgtgttattaaccagaatgcttattcgcaacggccgcaattactgggccgatagtcgtagcaggattgcgccaccccataaactacttgatccaaag

SEQ ID NO: 23649 - DNA, 1329 bp, Muscodor strobelii
  misc_feature: SGI cDNA ID NO. 568049
  misc_feature: Reduced expression when VOC is produced
  misc_feature: Encodes the peptide sequence at SEQ ID NO 23650
atggccccgaatacgacggccgccacccccccggcgatggataacttcattgtcggtatcattggtatgggcgacatgggaaagatgtacgcccggaggctcagcgatgctggttggaagatcatggcatgtgataaggaggagcagtacgaagagttgaaggcagagttctccgacaggacaaatatacaaattcttcgtaacggccatctagtgtctcgcgcgagtgactacattatctacagcgttgaggctgctgccatgtctcgtgtcgtcgctctctatggcccttctactaagcagaatgccattgtaggaggccaaacatcctgcaaagatcccgaaatcaaagcgtttgaagaccatttaccagcggacgtcgacatcgtgtcatgccattcgctgcacggtcctaaagtcgacaccaagaatcaaccactggttctcatcaaacatcgtgcttccgactcttcattcgagaaagtcgagaccgttcttaggtgtcttcaatctaaacacgtatatctgaccgcgcacgagcatgatcgaatcaccgcagacacacaggccgtaacgcatgcagcgttcttgagcatgggcaaggcctggcattcatctcgacaatttccatgggaaggcgcccggtatgttggcggcatcgagaatgtcaaaattaatttaatgatgcgcatatacagccaaaagtggcacgtatatgccggtcttgcgattctcaaccccgaagctcgcaaacagatcgatcaatatgccaagtctgtcaccgagctattcaagttgatgctaggcggccatcacgctgagatgcgcgagcgcgtactgggtgctcgggaaaaggtctttggatctggtaataatcccaaatgggctgataaacctcttttgcgcgacgcacttctagatcaattcagtttaggcacgcgtgctgccgacctcgcgcctttaccaaataatcatcttagcctcctcgccatggtcgattgctggagccagctcgggatcgtcccatatgaccatatgatctgcagcacccccttatttcggctctggctcggtgttacggaaaacttatttcgcaactcggagcgactcgaggaagcaatacgagttgcaattgaagacaacacgttcagaagcgacgacctagaatttacgttcgcagcacgaggttgggctgagtgtgttggacttggccatttcgagacttggaaggagagattcgtgaacactcaacggtttttcgaacctagatttgcagaggcgattgaggttggcaatgctatgttgaaagcggtcttagagagtacatga

SEQ ID NO: 23650 - protein, 442 aa, Muscodor strobelii
  misc_feature: SGI Peptide ID NO. 568049
  misc_feature (20)..(287): Pfam Id: PF02153 Pfam Desc: Prephenate dehydrogenase
  misc_feature (15)..(441): NCBI GI: 171686056 Blast Desc: protein product [Podospora anserina] gi|170942989|emb|CAP68642.1| protein product [Podospora anserina]
  misc_feature (11)..(441): NCBI GI: 85081784 Blast Desc: prephenate dehydrogenase [Neurospora crassa OR74A] gi|28917864|gb|EAA27551.1| prephenate dehydrogenase [Neurospora crassa OR74A]
  misc_feature (10)..(442): NCBI GI: 261358085 Blast Desc: prephenate dehydrogenase [Verticillium albo-atrum VaMs.102]
  misc_feature (1)..(439): NCBI GI: 156064163 Blast Desc: SS1G_00089 [Sclerotinia sclerotiorum 1980] gi|154690951|gb|EDN90689.1| SS1G_00089 [Sclerotinia sclerotiorum 1980]
  misc_feature (6)..(442): NCBI GI: 46116594 Blast Desc: FG04139.1 [Gibberella zeae PH-1]
  misc_feature (13)..(441): NCBI GI: 256726153 Blast Desc: [Nectria haematococca mpVI 77-13-4]
  misc_feature (13)..(439): NCBI GI: 154312366 Blast Desc: BC1G_06216 [Botryotinia fuckeliana B05.10] gi|150850179|gb|EDN25372.1| BC1G_06216 [Botryotinia fuckeliana B05.10]
  misc_feature (8)..(441): NCBI GI: 116207526 Blast Desc: conserved [Chaetomium globosum CBS 148.51] gi|88183653|gb|EAQ91121.1| conserved [Chaetomium globosum CBS 148.51]
  misc_feature (11)..(442): NCBI GI: 238837652 Blast Desc: prephenate dehydrogenase [Microsporum canis CBS 113480]
  misc_feature (14)..(442): NCBI GI: 121715468 Blast Desc: prephenate dehydrogenase [Aspergillus clavatus NRRL 1] gi|119403500|gb|EAW13917.1| prephenate dehydrogenase [Aspergillus clavatus NRRL 1]
  misc_feature (14)..(441): SWISSPROT Homolog: EC 1.3.1.13 Prephenate dehydrogenase (NADP(+))
  misc_feature: Useful for introducing or modulating the production of volatile compounds
MAPNTTAATPPAMDNFIVGIIGMGDMGKMYARRLSDAGWKIMACDKEEQYEELKAEFSDRTNIQILRNGHLVSRASDYIIYSVEAAAMSRVVALYGPSTKQNAIVGGQTSCKDPEIKAFEDHLPADVDIVSCHSLHGPKVDTKNQPLVLIKHRASDSSFEKVETVLRCLQSKHVYLTAHEHDRITADTQAVTHAAFLSMGKAWHSSRQFPWEGARYVGGIENVKINLMMRIYSQKWHVYAGLAILNPEARKQIDQYAKSVTELFKLMLGGHHAEMRERVLGAREKVFGSGNNPKWADKPLLRDALLDQFSLGTRAADLAPLPNNHLSLLAMVDCWSQLGIVPYDHMICSTPLFRLWLGVTENLFRNSERLEEAIRVAIEDNTFRSDDLEFTFAARGWAECVGLGHFETWKERFVNTQRFFEPRFAEAIEVGNAMLKAVLEST

SEQ ID NO: 23651 - DNA, 2291 bp, Muscodor strobelii
  misc_feature: SGI EST ID NO. CUFF.55997.2
  misc_feature: Variant of the nucleotide sequence at SEQ ID NO 23649
cttttctctcttcacctacattccttagctaccgtcgcaagctgcagcaccgaagcattgcaactcgctcttcctgctacgagccaatgtttggctaattgtgtgacttgcgacagctacccactcgcaactcgctcacgtcgcagtgctcgtgggagcttcattttgcagcgcactcacatggtctaggtaatcatggccccgaatacgacggccgccacccccccggcgatggataacttcattgtcggtatcattggtatgggcgacatgggaaagatgtacgcccggaggctcagcgatgctggttggaagatcatggcatgtgataaggaggagcagtacgaagagttgaaggcagagttctccgacagggtgattactagtggctgcctgttctcaaagcgaacatatgctgagaaatgcctagacaaatatacaaattcttcgtaacggccatctagtgtctcgcgcgagtgactacattatctacagcgttgaggctgctgccatgtctcgtgtcgtcgctctctatggcccttctactaagcagaatgccattgtaggaggccaaacatcctgcaaagatcccgaaatcaaagcgtttgaagaccatttaccagcggacgtcgacatcgtgtcatgccattcgctgcacggtcctaaagtcgacaccaagaatcaaccactggttctcatcaaacatcgtgcttccgactcttcattcgagaaagtcgagaccgttcttaggtgtcttcaatctaaacacgtatatctgaccgcgcacgagcatgatcgaatcaccgcagacacacaggccgtaacgcatgcagcgttcttgagcatgggcaaggcctggcattcatctcgacaatttccatgggaaggcgcccggtatgttggcggcatcgagaatgtcaaaattaatttaatgatgcgcatatacagccaaaagtggcacgtatatgccggtcttgcgattctcaaccccgaagctcgcaaacagatcgatcaatatgccaagtctgtcaccgagctattcaagttgatgctaggcggccatcacgctgagatgcgcgagcgcgtactgggtgctcgggaaaaggtctttggatctggtaataatcccaaatgggctgataaacctcttttgcgcgacgcacttctagatcaattcagtttaggcacgcgtgctgccgacctcgcgcctttaccaaataatcatcttagcctcctcgccatggtcgattgctggagccagctcgggatcgtcccatatgaccatatgatctgcagcacccccttatttcggctctggctcggtgttacggaaaacttatttcgcaactcggagcgactcgaggaagcaatacgagttgcaattgaagacaacacgttcagaagcgacgacctagaatttacgttcgcagcacgaggttgggctgagtgtgttggacttggccatttcgagacttggaaggagagattcgtgaacactcaacggtttttcgaacctagatttgcagaggcgattgaggttggcaatgctatgttgaaagcggtcttagagagtacatgatcatgaattcaaagcctcttacgtctacatatcgagttcaaccctcgagaaattcgcagcattatatactaaggaaggcgtttcatcgtgctcctgatacaagaaaggtacacagcaaagaacaaacaaatagcagtcttctagcactgttgtaacaagttctccaagcatttcgtcttttctatgttacatacataggtgccttaggaattcagtcaggctaattaacttataacaagagaacgcatattttcaattacataactactctcgctgtttcccaagaacttcatcagccacagcgcgccccgcagcccgtcccgagaagatgcagcctgattaagtgttatcagcaagtcagcctcaagagaccgaaaaaaaacttcgtgaggccattgtagacgaataccgcagtttagaggttatcatctaacttgagtacttacctcctaaaaacgtgccctcgagtgagttgtagccatgaacgccgccacctccaaatccagcaacttcaccagcggcatataggccgggaaacggagtcccatccgccttcattacgttgcttttcaggttcgtctcgattcctccaagtgtctttcgtgtaagcaagttcatgcgcacagcaataagcggtccctagacagagatacatcatatcagctatttcgaggtcgctctacaatgcatatagatggccagcgggtgctca

SEQ ID NO: 23652 - DNA, 1113 bp, Muscodor strobelii
  misc_feature: SGI cDNA ID NO. 568050
  misc_feature: Encodes the peptide sequence at SEQ ID NO 23653
atggacaggctatttgctctgggctctaatggttcgggtcagttgggcttaggtcactgtgaagatgtctcggtacctaaacagctccacgacagcccatgttttgacaatgatcccgtaactcatgtcgccgcgggtggtaatcacaccatcctcattaccgcgtcaggaaatgcatactggagtggagacccaggtgatggacgttgcggcatagttacaaacaatgaagaagaagaacacatttcgaaattccgcaagctacagctttctgattctaccgccacggcccacattgccttcgctgcttgtacatgggattctacaatactagccatccgtgatcaagaaggaagggtcacaagggtatatacttgcggtccggcgagctcaggctccaaacagagttctaatagaccatctttgatcgccggcttccctccagccggaacagcaattatcaatcttgctgctgggtttagacatgtcgtagccatactggacaatggagatgcctacggctggggtgcatgcggaaaaggacaacttggtccagttgacgacacgcctgatgcccacaaatcaatagatgcaccacgaaaaattctgggaatccccttcaaggtgtctcaagctgtgtgctgtcaatacacaacctgcttcgttgccgagcctggcgacggcagaatcgttgttctaggagcagacaagtggaatctgaaaagccacgccccagtcgaaactccaagttggcaggctatcactgcgggttggggagccatctatgttcttatgcgtgatggtacgcttgtggcgtggggacgacgcgatcatggccagttgcctccgcctggcttgccgcaaatatcacaaatcgcagccggcagtgaacatgtcatcgccctcacagactcaggcgaggtattggcctggggttggggtgaacacggaaattgcggtcccaaagtagaggagaaatctggcaacgtcaaagagcgatggaacgttctggcctcgtccaaaactctacctgaggggtcgagagttacaactatcggagctgggtgtgcaacgagttggatcaacattacaacagaaggtgtttacctgtga

SEQ ID NO: 23653 - protein, 370 aa, Muscodor strobelii
  misc_feature: SGI Peptide ID NO. 568050
  misc_feature (3)..(53): Pfam Id: PF00415 Pfam Desc: Regulator of chromosome condensation (RCC1)
  misc_feature (1)..(365): NCBI GI: 261358084 Blast Desc: conserved [Verticillium albo-atrum VaMs.102]
  misc_feature (1)..(366): NCBI GI: 256725748 Blast Desc: [Nectria haematococca mpVI 77-13-4]
  misc_feature (1)..(366): NCBI GI: 46116596 Blast Desc: FG04140.1 [Gibberella zeae PH-1]
  misc_feature (1)..(363): NCBI GI: 85081789 Blast Desc: NCU00469 [Neurospora crassa OR74A] gi|28917865|gb|EAA27552.1| conserved [Neurospora crassa OR74A]
  misc_feature (1)..(363): NCBI GI: 39939926 Blast Desc: MGG_05277 [Magnaporthe grisea 70-15] gi|145010440|gb|EDJ95096.1| MGG_05277 [Magnaporthe grisea 70-15]
  misc_feature (1)..(365): NCBI GI: 154290820 Blast Desc: BC1G_15449 [Botryotinia fuckeliana B05.10] gi|150847400|gb|EDN22593.1| BC1G_15449 [Botryotinia fuckeliana B05.10]
  misc_feature (1)..(320): NCBI GI: 156063997 Blast Desc: SS1G_00006 [Sclerotinia sclerotiorum 1980] gi|154690868|gb|EDN90606.1| SS1G_00006 [Sclerotinia sclerotiorum 1980]
  misc_feature (4)..(364): NCBI GI: 169783446 Blast Desc: [Aspergillus oryzae RIB40] gi|83774929|dbj|BAE65052.1| protein product [Aspergillus oryzae]
  misc_feature (4)..(361): NCBI GI: 71001444 Blast Desc: alpha-tubulin suppressor protein Aats1 [Aspergillus fumigatus Af293] gi|66853041|gb|EAL93365.1| alpha-tubulin suppressor protein Aats1, [Aspergillus fumigatus Af293] protein
  misc_feature (4)..(361): NCBI GI: 261187990 Blast Desc: alpha-tubulin suppressor protein Aats1 [Ajellomyces dermatitidis SLH14081] gi|239593423|gb|EEQ76004.1| alpha-tubulin suppressor protein Aats1 [Ajellomyces dermatitidis SLH14081]
  misc_feature (37)..(325): SWISSPROT Homolog: EC 2.7.11.1 Non-specific serine/threonine protein kinase
MDRLFALGSNGSGQLGLGHCEDVSVPKQLHDSPCFDNDPVTHVAAGGNHTILITASGNAYWSGDPGDGRCGIVTNNEEEEHISKFRKLQLSDSTATAHIAFAACTWDSTILAIRDQEGRVTRVYTCGPASSGSKQSSNRPSLIAGFPPAGTAIINLAAGFRHVVAILDNGDAYGWGACGKGQLGPVDDTPDAHKSIDAPRKILGIPFKVSQAVCCQYTTCFVAEPGDGRIVVLGADKWNLKSHAPVETPSWQAITAGWGAIYVLMRDGTLVAWGRRDHGQLPPPGLPQISQIAAGSEHVIALTDSGEVLAWGWGEHGNCGPKVEEKSGNVKERWNVLASSKTLPEGSRVTTIGAGCATSWINITTEGVYL

SEQ ID NO: 23654 - DNA, 1344 bp, Muscodor strobelii
  misc_feature: SGI cDNA ID NO. 568051
  misc_feature: Encodes the peptide sequence at SEQ ID NO 23655
atggcggtactcaagttcacactcagcgaagacggcgtgagtgtgctgagagatgcactggcatgtcttggtaaatttagcgatgaagtttctctagaggctaagaaggataggttggtcctgacagctcttaacttgtccaagtcagcctatgcctcatttacgtttgccgccaatcgtttcttttcaaagtatcactacgcaggccccggtcaaaatcgagataggttcttctgcgtactttataatcgggcactacagtcccttttccgaagccgtggtggagattcttcgcatgaccgagaaaaagacaccactatcgaccgatgtaacatcacagtcatagatgagccaggtagaaaaagcagattcgtagctaaaatcatctttcgaaatggaatcaccaccaaatatcgcttgccctttgaagtaagcccgccaatacacgccaaattcgataagatgcaggcgccaaacaactgggcaattgcctcaaggacccttcgtcaacttatggatcatttcggtccaggaatcgagtacctcgacatccattcggacgaggaggttgtcaactttacttgctttaccgaaaaggctgccaacggcgatgaggtgctgaagaagccacttcatacgtcgattgccgtagagcgcgatgaatttgaccagttctttgttgaagaggatcaacttcatattatcatcagtgtcaaggacttccgtgctattgttcaacatgcttccatcttgaacagcgatatcttagcaaactactcagtgccggcgaagcctatgcaactaaagtacgaaggcgacggtatcaagtgcgaattcttactcatgactgtaggggagcgaggagccatcggccagaaggctaagaagacccgggtcaacgcgaaggtaccagggagagcggagcttgaggcaacggcgagcagagcaaattcacatgcagcaacgcccgctccttcacgtcctaatgggacctcgcaatttcgtccagattcgatgccttcgttgcggccgcccatagagcggccctctcaacgaccgcctccagctactattgagtctgaatctctttttgtagcccaggataatgatgagcagtgggaaccagttaacgtgaatgaagacgaagacgaagatgaggacgctcggttgggctggaacaccagtggcaatctgaattcatcgacgatgaacatgcggaccatgatgaacaatcaatcttccgtacaagcaagagtcggggcccagccggatctaacccaaacccagctagatccaactcaaccgctctcacaagcacggcgattcggactgtttggcgaatga

SEQ ID NO: 23655 - protein, 447 aa, Muscodor strobelii
  misc_feature: SGI Peptide ID NO. 568051
  misc_feature (16)..(284): Pfam Id: PF04139 Pfam Desc: Rad9
  misc_feature (1)..(397): NCBI GI: 46116598 Blast Desc: FG04141.1 [Gibberella zeae PH-1]
  misc_feature (1)..(439): NCBI GI: 171686060 Blast Desc: protein product [Podospora anserina] gi|170942991|emb|CAP68644.1| protein product [Podospora anserina]
  misc_feature (1)..(396): NCBI GI: 116207522 Blast Desc: CHGG_03054 [Chaetomium globosum CBS 148.51] gi|88183651|gb|EAQ91119.1| CHGG_03054 [Chaetomium globosum CBS 148.51]
  misc_feature (1)..(445): NCBI GI: 145601989 Blast Desc: MGG_05278 [Magnaporthe grisea 70-15] gi|145010439|gb|EDJ95095.1| MGG_05278 [Magnaporthe grisea 70-15]
  misc_feature (1)..(445): NCBI GI: 240276508 Blast Desc: DNA repair protein RAD9 [Ajellomyces capsulatus H143]
  misc_feature (1)..(445): NCBI GI: 225555688 Blast Desc: DNA repair protein rad9 [Ajellomyces capsulatus G186AR]
  misc_feature (1)..(394): NCBI GI: 154271083 Blast Desc: [Ajellomyces capsulatus NAm1] gi|150409618|gb|EDN05062.1| [Ajellomyces capsulatus NAm1]
  misc_feature (1)..(445): NCBI GI: 226279864 Blast Desc: conserved [Paracoccidioides brasiliensis Pb01]
  misc_feature (1)..(445): NCBI GI: 238493233 Blast Desc: DNA repair protein rad9, [Aspergillus flavus NRRL3357] gi|220696347|gb|EED52689.1| DNA repair protein rad9, [Aspergillus flavus NRRL3357]
  misc_feature (1)..(447): NCBI GI: 156063999 Blast Desc: SS1G_00007 [Sclerotinia sclerotiorum 1980] gi|154690869|gb|EDN90607.1| SS1G_00007 [Sclerotinia sclerotiorum 1980]
  misc_feature (4)..(306): SWISSPROT Homolog: EC 3.1.11.2 Exodeoxyribonuclease III
MAVLKFTLSEDGVSVLRDALACLGKFSDEVSLEAKKDRLVLTALNLSKSAYASFTFAANRFFSKYHYAGPGQNRDRFFCVLYNRALQSLFRSRGGDSSHDREKDTTIDRCNITVIDEPGRKSRFVAKIIFRNGITTKYRLPFEVSPPIHAKFDKMQAPNNWAIASRTLRQLMDHFGPGIEYLDIHSDEEVVNFTCFTEKAANGDEVLKKPLHTSIAVERDEFDQFFVEEDQLHIIISVKDFRAIVQHASILNSDILANYSVPAKPMQLKYEGDGIKCEFLLMTVGERGAIGQKAKKTRVNAKVPGRAELEATASRANSHAATPAPSRPNGTSQFRPDSMPSLRPPIERPSQRPPPATIESESLFVAQDNDEQWEPVNVNEDEDEDEDARLGWNTSGNLNSSTMNMRTMMNNQSSVQARVGAQPDLTQTQLDPTQPLSQARRFGLFGE

SEQ ID NO: 23656 - DNA, 2917 bp, Muscodor strobelii
  misc_feature: SGI EST ID NO. CUFF.55676.2
  misc_feature: Variant of the nucleotide sequence at SEQ ID NO 23654
caagccctgacctcatgaatagttcatactacttcgtatatgcgatagatccgcttcactcaacaaactccgatcgcgcccttttgagcgactcaaatgtaacgataatgcaaaggtaaagaatgggactgcattcaagttgtgaaagtaacatcgaatggagaggacaagacagttagtccactagtgctctgatatacagtgtcgttatggcggtactcaagttcacactcagcgaagacggcgtgagtgtgctgagagatgcactggcatgtcttggtaaatttagcgatgaagtttctctagaggctaagaaggataggttggtcctgacagctcttaacttgtccaagtcagcctatgcctcatttacgtttgccgccaatcgtttcttttcaaagtatcactacgcaggccccggtcaaaatcgagataggttcttctgcgtactttataatcgggcactacagtcccttttccgaagccgtggtggagattcttcgcatgaccgagaaaaagacaccactatcgaccgatgtaacatcacagtcatagatgagccaggtagaaaaagcagattcgtagctaaaatcatctttcgaaatggaatcaccaccaaatatcgcttgccctttgaagtaagcccgccaatacacgccaaattcgataagatgcaggcgccaaacaactgggcaattgcctcaaggacccttcgtcaacttatggatcatttcggtccaggaatcgagtacctcgacatccattcggacgaggaggttgtcaactttacttgctttaccgaaaaggctgccaacggcgatgaggtgctgaagaagccacttcatacgtcgattgccgtagagcgcgatgaatttgaccagttctttgttgaagaggatcaacttcatattatcatcagtgtcaaggacttccgtgctattgttcaacatgcttccatcttgaacagcgatatcttagcaaactactcagtgccggcgaagcctatgcaactaaagtacgaaggcgacggtatcaagtgcgaattcttactcatgactgtaggggagcgaggagccatcggccagaaggctaagaagacccgggtcaacgcgaaggtaccagggagagcggagcttgaggcaacggcgagcagagcaaattcacatgcagcaacgcccgctccttcacgtcctaatgggacctcgcaatttcgtccagattcgatgccttcgttgcggccgcccatagagcggccctctcaacgaccgcctccagctactattgagtctgaatctctttttgtagcccaggataatgatgagcagtgggaaccagttaacgtgaatgaagacgaagacgaagatgaggacgctcggttgggctggaacaccagtggcaatctgaattcatcgacgatgaacatgcggaccatgatgaacaatcaatcttccgtacaagcaagagtcggggcccagccggatctaacccaaacccagctagatccaactcaaccgctctcacaagcacggcgattcggactgtttggcgaatgagctgagttgacatacacgacggaactgcacggatactggtggacagcatcacctgatggtatgaaatttcgtcaaggggtagtcgaggcgatttgttttggagtcacaggtaaacaccttctgttgtaatgttgatccaactcgttgcacacccagctccgatagttgtaactctcgacccctcaggtagagttttggacgaggccagaacgttccatcgctctttgacgttgccagatttctcctctactttgggaccgcaatttccgtgttcaccccaaccccaggccaatacctcgcctgagtctgtgagggcgatgacatgttcactgccggctgcgatttgtgatatttgcggcaagccaggcggaggcaactggccatgatcgcgtcgtccccacgccacaagcgtaccatcacgcataagaacatagatggctccccaacccgcagtgatagcctgccaacttggagtttcgactggggcgtggcttttcagattccacttgtctgctcctagaacaacgattctgccgtcgccaggctcggcaacgaagcaggttgtgtattgacagcacacagcttgagacaccttgaaggggattcccagaatttttcgtggtgcatctattgatttgtgggcatcaggcgtgtcgtcaactggaccaagttgtccttttccgcatgcaccccagccgtaggcatctccattgtccagtatggctacgacatgtctaaacccagcagcaagattgataattgctgttccggctggagggaagccggcgatcaaagatggtctattagaactctgtttggagcctgagctcgccggaccgcaagtatatacccttgtgacccttccttcttgatcacggatggctagtattgtagaatcccatgtacaagcagcgaaggcaatgtgggccgtggcggtagaatcagaaagctgtagcttgcggaatttcgaaatgtgttcttcttcttcattgtttgtaactatgccgcaacgtccatcacctgggtctccactccagtatgcatttcctgacgcggtaatgaggatggtgtgattaccacccgcggcgacatgagttacgggatcattgtcaaaacatgggctgtcgtggagctgtttaggtaccgagacatcttcacagtgacctaagcccaactgacccgaaccattagagcccagagcaaatagcctgtccatgttgtcaaaggcttttgaaaattcacctttgcagcaaatttcggaccttggtccttttggtcctggcagccctaatggatgaaatcaacgtctgcagtcgtacgcctattagatagctcacgaccttaggcatttgattaggtattcg

SEQ ID NO: 23657 - DNA, 1458 bp, Muscodor strobelii
  misc_feature: SGI cDNA ID NO. 568052
  misc_feature: Reduced expression when VOC is produced
  misc_feature: Encodes the peptide sequence at SEQ ID NO 23658
atgaatagttcatactacttcgtatatgcgatagatccgcttcactcaacaaactccgatcgcgcccttttgagcgactcaaatgtaacgataatgcaaagatacagtgtcgttatggcggtactcaagttcacactcagcgaagacggcgtgagtgtgctgagagatgcactggcatgtcttggtaaatttagcgatgaagtttctctagaggctaagaaggataggttggtcctgacagctcttaacttgtccaagtcagcctatgcctcatttacgtttgccgccaatcgtttcttttcaaagtatcactacgcaggccccggtcaaaatcgagataggttcttctgcgtactttataatcgggcactacagtcccttttccgaagccgtggtggagattcttcgcatgaccgagaaaaagacaccactatcgaccgatgtaacatcacagtcatagatgagccaggtagaaaaagcagattcgtagctaaaatcatctttcgaaatggaatcaccaccaaatatcgcttgccctttgaagtaagcccgccaatacacgccaaattcgataagatgcaggcgccaaacaactgggcaattgcctcaaggacccttcgtcaacttatggatcatttcggtccaggaatcgagtacctcgacatccattcggacgaggaggttgtcaactttacttgctttaccgaaaaggctgccaacggcgatgaggtgctgaagaagccacttcatacgtcgattgccgtagagcgcgatgaatttgaccagttctttgttgaagaggatcaacttcatattatcatcagtgtcaaggacttccgtgctattgttcaacatgcttccatcttgaacagcgatatcttagcaaactactcagtgccggcgaagcctatgcaactaaagtacgaaggcgacggtatcaagtgcgaattcttactcatgactgtaggggagcgaggagccatcggccagaaggctaagaagacccgggtcaacgcgaaggtaccagggagagcggagcttgaggcaacggcgagcagagcaaattcacatgcagcaacgcccgctccttcacgtcctaatgggacctcgcaatttcgtccagattcgatgccttcgttgcggccgcccatagagcggccctctcaacgaccgcctccagctactattgagtctgaatctctttttgtagcccaggataatgatgagcagtgggaaccagttaacgtgaatgaagacgaagacgaagatgaggacgctcggttgggctggaacaccagtggcaatctgaattcatcgacgatgaacatgcggaccatgatgaacaatcaatcttccgtacaagcaagagtcggggcccagccggatctaacccaaacccagctagatccaactcaaccgctctcacaagcacggcgattcggactgtttggcgaatga

SEQ ID NO: 23658 - protein, 485 aa, Muscodor strobelii
  misc_feature: SGI Peptide ID NO. 568052
  misc_feature (54)..(322): Pfam Id: PF04139 Pfam Desc: Rad9
  misc_feature (39)..(435): NCBI GI: 46116598 Blast Desc: FG04141.1 [Gibberella zeae PH-1]
  misc_feature (39)..(476): NCBI GI: 171686060 Blast Desc: protein product [Podospora anserina] gi|170942991|emb|CAP68644.1| protein product [Podospora anserina]
  misc_feature (39)..(433): NCBI GI: 116207522 Blast Desc: CHGG_03054 [Chaetomium globosum CBS 148.51] gi|88183651|gb|EAQ91119.1| CHGG_03054 [Chaetomium globosum CBS 148.51]
  misc_feature (39)..(483): NCBI GI: 145601989 Blast Desc: MGG_05278 [Magnaporthe grisea 70-15] gi|145010439|gb|EDJ95095.1| MGG_05278 [Magnaporthe grisea 70-15]
  misc_feature (39)..(483): NCBI GI: 240276508 Blast Desc: DNA repair protein RAD9 [Ajellomyces capsulatus H143]
  misc_feature (39)..(483): NCBI GI: 225555688 Blast Desc: DNA repair protein rad9 [Ajellomyces capsulatus G186AR]
  misc_feature (39)..(432): NCBI GI: 154271083 Blast Desc: [Ajellomyces capsulatus NAm1] gi|150409618|gb|EDN05062.1| [Ajellomyces capsulatus NAm1]
  misc_feature (39)..(483): NCBI GI: 226279864 Blast Desc: conserved [Paracoccidioides brasiliensis Pb01]
  misc_feature (39)..(483): NCBI GI: 238493233 Blast Desc: DNA repair protein rad9, [Aspergillus flavus NRRL3357] gi|220696347|gb|EED52689.1| DNA repair protein rad9, [Aspergillus flavus NRRL3357]
  misc_feature (39)..(485): NCBI GI: 156063999 Blast Desc: SS1G_00007 [Sclerotinia sclerotiorum 1980] gi|154690869|gb|EDN90607.1| SS1G_00007 [Sclerotinia sclerotiorum 1980]
  misc_feature (42)..(344): SWISSPROT Homolog: EC 3.1.11.2 Exodeoxyribonuclease III
  misc_feature: Useful for introducing or modulating the production of volatile compounds
MNSSYYFVYAIDPLHSTNSDRALLSDSNVTIMQRYSVVMAVLKFTLSEDGVSVLRDALACLGKFSDEVSLEAKKDRLVLTALNLSKSAYASFTFAANRFFSKYHYAGPGQNRDRFFCVLYNRALQSLFRSRGGDSSHDREKDTTIDRCNITVIDEPGRKSRFVAKIIFRNGITTKYRLPFEVSPPIHAKFDKMQAPNNWAIASRTLRQLMDHFGPGIEYLDIHSDEEVVNFTCFTEKAANGDEVLKKPLHTSIAVERDEFDQFFVEEDQLHIIISVKDFRAIVQHASILNSDILANYSVPAKPMQLKYEGDGIKCEFLLMTVGERGAIGQKAKKTRVNAKVPGRAELEATASRANSHAATPAPSRPNGTSQFRPDSMPSLRPPIERPSQRPPPATIESESLFVAQDNDEQWEPVNVNEDEDEDEDARLGWNTSGNLNSSTMNMRTMMNNQSSVQARVGAQPDLTQTQLDPTQPLSQARRFGLFGE

SEQ ID NO: 23659 - DNA, 2917 bp, Muscodor strobelii; identical to SEQ ID NO: 23656
  misc_feature: SGI EST ID NO. CUFF.55676.2
  misc_feature: Variant of the nucleotide sequence at SEQ ID NO 23657

SEQ ID NO: 23660 - DNA, 1719 bp, Muscodor strobelii
  misc_feature: SGI cDNA ID NO. 568053
  misc_feature: Encodes the peptide sequence at SEQ ID NO 23661
atgagtactcaaactctaccccaagatatctggctattaattgccaaggaacttggcctacgtcgtgaattcgaaaccttattttgttgctctctcgtgagtcgcaaagtctctagccttgccgttgaacaactctatagtatcctccaagtctcggatccttttatagaaggaaaattgcaaagcgcccaattatggcgatctcttattctatcgagtatagaaatcacggcttacccatattgtgcctatggtatgtgtgaaaagattccgcatgatttgttccttgctacactcctaagacaacgtactgacttggtgaaatgtagagttacttacgtgaacctttttggcgaccagatccaggctctatcactcggtagtggcctcggttattttctcgacgatattagatctgatgctcagacgcgcgaattcttctttgatggcccaatgcagcaatttcatgacgatacgaagaccagaaccagaaacaggttcttccgcgaagatttgatgaagatcaatatcaaatgtgccgactctatcacgagatatatcaaggagcttgctgtggacagtggtactgctgttgcactgagacatcttgaagtcggtcaaataacacgtgatactctcgtctcttggatcactcgtcttggtacattgacttttctccagctggaaaacggatcagtactcaattctgaggtggcgagtgcgctctcacagtattgcccaaacttcaaagaattggaatgcttccaatgggcgatctccactacttcggaggaggtcgcttcttttttccaggctcttcgaccaaacagtctgcagagattagcagtcctcagcaggaacttgatcgaagaaccttcacttattgctctgaattcgcaagccgagtctttgacggagttgtgtcttaggagtctatcatcttccgctactaagagcctcggtaaactgtcaaattgcactgctcttgagacaatcgatatcgaaatggttcatggggagccaccaatccatgattcccaagacgaagactcacttcgtactgcatcttggattcgcagttgtaaacagctccgagacctgagcctgtgccacatcggaaatgcactttccatgttgaagattgttctagaagatcccgagatccgtcttaaacaattaaaactacaagactactgtgaagtttggactgcacttggtcaacaagtagcacttgaatctttgacaattgcctcgcaagatggtgtcatcgagggactcaccttgtcgcaacgtcctaagctcacggactcaatttgccgattatcgaacctcacaacgttgaatctcatgcaggcatacgtatcctcagctgaaatccgccgattcacaagctctcttcctcttctagaagatctcagtttcggtggcgatatcattgatgattcagttatcgaacacttgagcaaacttccgcatttggtgtctctctcgattaacgctactactgccttctcctttgaaagcctccagtcctttgcacagaatctcaatcagggagtcaggttggatctgctgaatcagtggtatgacgcgagactgactgacgatcaactcgcatggttagaaactgcctttacggcagtagacggtagacttgtgattaattatactgacaaccctgacgatttacacgagggcgatttttctgacgacgactga

SEQ ID NO: 23661 - protein, 572 aa, Muscodor strobelii
  misc_feature: SGI Peptide ID NO. 568053
  misc_feature (3)..(552): NCBI GI: 154290816 Blast Desc: BC1G_15447 [Botryotinia fuckeliana B05.10] gi|150847398|gb|EDN22591.1| BC1G_15447 [Botryotinia fuckeliana B05.10]
  misc_feature (1)..(552): NCBI GI: 189205168 Blast Desc: conserved [Pyrenophora tritici-repentis Pt-1C-BFP] gi|187986018|gb|EDU51506.1| conserved [Pyrenophora tritici-repentis Pt-1C-BFP]
  misc_feature (2)..(570): NCBI GI: 116207520 Blast Desc: CHGG_03053 [Chaetomium globosum CBS 148.51] gi|88183650|gb|EAQ91118.1| CHGG_03053 [Chaetomium globosum CBS 148.51]
  misc_feature (180)..(552): NCBI GI: 156064001 Blast Desc: SS1G_00008 [Sclerotinia sclerotiorum 1980] gi|154690870|gb|EDN90608.1| SS1G_00008 [Sclerotinia sclerotiorum 1980]
  misc_feature (121)..(570): NCBI GI: 145601959 Blast Desc: MGG_05300 [Magnaporthe grisea 70-15] gi|145010416|gb|EDJ95072.1| MGG_05300 [Magnaporthe grisea 70-15]
  misc_feature (226)..(541): NCBI GI: 169610531 Blast Desc: SNOG_08368 [Phaeosphaeria nodorum SN15] gi|160702091|gb|EAT84644.2| SNOG_08368 [Phaeosphaeria nodorum SN15]
  misc_feature (5)..(550): NCBI GI: 242787445 Blast Desc: conserved [Talaromyces stipitatus ATCC 10500] gi|218721155|gb|EED20574.1| conserved [Talaromyces stipitatus ATCC 10500]
  misc_feature (213)..(550): NCBI GI: 115384644 Blast Desc: conserved [Aspergillus terreus NIH2624] gi|114196561|gb|EAU38261.1| conserved [Aspergillus terreus NIH2624]
  misc_feature (5)..(526): NCBI GI: 67539526 Blast Desc: AN5933.2 [Aspergillus nidulans FGSC A4] gi|40738606|gb|EAA57796.1| AN5933.2 [Aspergillus nidulans FGSC A4] gi|259479895|tpe|CBF70537.1| TPA: conserved [Aspergillus FGSC
  misc_feature (6)..(563): NCBI GI: 212543679 Blast Desc: conserved [Penicillium marneffei ATCC 18224] gi|210066901|gb|EEA20994.1| conserved [Penicillium marneffei ATCC 18224]
MSTQTLPQDIWLLIAKELGLRREFETLFCCSLVSRKVSSLAVEQLYSILQVSDPFIEGKLQSAQLWRSLILSSIEITAYPYCAYGMCEKIPHDLFLATLLRQRTDLVKCRVTYVNLFGDQIQALSLGSGLGYFLDDIRSDAQTREFFFDGPMQQFHDDTKTRTRNRFFREDLMKINIKCADSITRYIKELAVDSGTAVALRHLEVGQITRDTLVSWITRLGTLTFLQLENGSVLNSEVASALSQYCPNFKELECFQWAISTTSEEVASFFQALRPNSLQRLAVLSRNLIEEPSLIALNSQAESLTELCLRSLSSSATKSLGKLSNCTALETIDIEMVHGEPPIHDSQDEDSLRTASWIRSCKQLRDLSLCHIGNALSMLKIVLEDPEIRLKQLKLQDYCEVWTALGQQVALESLTIASQDGVIEGLTLSQRPKLTDSICRLSNLTTLNLMQAYVSSAEIRRFTSSLPLLEDLSFGGDIIDDSVIEHLSKLPHLVSLSINATTAFSFESLQSFAQNLNQGVRLDLLNQWYDARLTDDQLAWLETAFTAVDGRLVINYTDNPDDLHEGDFSDDD

SEQ ID NO: 23662 - DNA, 2288 bp, Muscodor strobelii
  misc_feature: SGI EST ID NO. CUFF.55662.0
  misc_feature: Variant of the nucleotide sequence at SEQ ID NO 23660
caggctctatcactcggtagtggcctcggttattttctcgacgatattagatctgatgctcagacgcgcgaattcttctttgatggcccaatgcagcaatttcatgacgatacgaagaccagaaccagaaacaggttcttccgcgaagatttgatgaagatcaatatcaaatgtgccgactctatcacgagatatatcaaggagcttgctgtggacagtggtactgctgttgcactgagacatcttgaagtcggtcaaataacacgtgatactctcgtctcttggatcactcgtcttggtacattgacttttctccagctggaaaacggatcagtactcaattctgaggtggcgagtgcgctctcacagtattgcccaaacttcaaagaattggaatgcttccaatgggcgatctccactacttcggaggaggtcgcttcttttttccaggctcttcgaccaaacagtctgcagagattagcagtcctcagcaggaacttgatcgaagaaccttcacttattgctctgaattcgcaagccgagtctttgacggagttgtgtcttaggagtctatcatcttccgctactaagagcctcggtaaactgtcaaattgcactgctcttgagacaatcgatatcgaaatggttcatggggagccaccaatccatgattcccaagacgaagactcacttcgtactgcatcttggattcgcagttgtaaacagctccgagacctgagcctgtgccacatcggaaatgcactttccatgttgaagattgttctagaagatcccgagatccgtcttaaacaattaaaactacaagactactggtaagtgtatttcttcgtatgcgagtagctttcgactttactgacctatcatagtaagcgatatacatattagatatcagacgcccccatttcaaaacacaacgtttaacatagtaatgatagataacaatagctaacatgggatatttcaaccgctagattcagcagacgggacaattgagagtgaagtttggactgcacttggtcaacaagtagcacttgaatctttgacaattgcctcgcaagatggtgtcatcgagggactcaccttgtcgcaacgtcctaagctcacggactcaatttgccgattatcgaacctcacaacgttgaatctcatgcaggcatacgtatcctcagctgaaatccgccgattcacaagctctcttcctcttctagaagatctcagtttcggtggcgatatcattgatgattcagttatcgaacacttgagcaaacttccgcatttggtgtctctctcgattaacgctactactgccttctcctttgaaagcctccagtcctttgcacagaatctcaatcagggagtcaggttggatctgctgaatcagtggtatgacgcgagactgactgacgatcaactcgcatggttagaaactgcctttacggcagtagacggtagacttgtgattaattatactgacaaccctgacgatttacacgagggcgatttttctgacgacgactgagaaattgcatcctgttcctagtgcaatagaatacaggacgagggaatgtacttgcgtagcatcttgaaatggattcgatgcgacgctattgctacatatcaatatgactcttggttccatcccacacctttcctatgaactccgaattctgcgtcgggaactcccatttgtcgtaaggtagcatcatttccatcttccgccccgaatgtatttcgacactcccatccacaccatttacctgtgctcactacatgtacattttcgtcgctcggagcgcacgagtcgggccagtcgaatggcagcgctgctctggcatgagccgtattccatgcttccggcttatgtatacgtgacagctcttctgcgactcgcgggcatgagggtcccgccaggaatgtcgaggaatgcccacaaagcgggataaagaggacgtaaaaacacatctcttgccacttttgctactcactaaatcgctatcgactcgatttcttctctgcttgatccgaaattgcgagcggagaaactacgattcgataatagagagagcttctgtctttagaaaggcaaatgaaagagtcgcctcgctgttgatgtcttttgatcgcaatctccaagcacgagactattagccggtcgccagaatgactcaatcaagattatgggtagatattatggttgatcacaaacttgagagtacctgtgtgacaaaggtagttgacggtagtagaggcacaattttctgttgggc

SEQ ID NO: 23663 - DNA, 1752 bp, Muscodor strobelii
  misc_feature: SGI cDNA ID NO. 568054
  misc_feature: Encodes the peptide sequence at SEQ ID NO 23664
atgcctagagacaccactcccctcctcgcccgccgtgattcctctgcccactccgatcgctcctcgtcctcgtccgaagatgctctccgcggctcgtctcacgccacacacaccggccggtcaggcacttcgcgcctccgcgaagctctgctctttgcctgggctcttctcgccacggccggcatcctagtcctagccgtatgggtctctcatcgccagcagacatcgttcaacaaacctgccggaaagcggaatctcatcttcatggtttccgacggcatgggcccagcttccctctctctgacacggagctttcggcagcacaccgaaggcctcgagtatggcgataccctcaccctggacaagcacttttggggcagcagtcggacgaggagcagctcgtcgctcgtcaccgatagcgctgcaggcgcaacagcattcagctgtgcgaaaaagagctacaatggcgccatctccatgctgccagactcaactccttgtgggaccgtgctagaagcggccaagaaggctggctactcgactggactcgttgtcacgaccgacatcacggacgctacgcctgcttgctttgctagccacgttgactaccgcctccagcaagacgagattgcccttcacgaaatcggacacggcccgctcgaacgttctgtggacctaatgctcggaggcggtcgctgtcatttcttgccaaattccacatccggtggctgtcggcaggatagcttagacgtcatcgatctggcacaaaaagactatggctggaattacatcggaaatagatcagcgttcgaccattatgccaaacttggcgccgaagtcccctttccatttcttggcttgttcgcaccgacagatatccccttcgagctcgatcggaggaacatgaatgatgtataccccagtctcagcgagatggcagatatggctctgcgctctcttgagaaggctactgcgaagaccgataagggatttttcttgatgatcgagggcagcagaatcgaccatgcggggcacgagaatgatccctcggcccaggtacgagaagtgttggagtacgataagacctttaaactcgtccttgaattcctggaggagagcaagaccgatggtgtcctcgttgcgaccagtgatcatgaaaccggtggcttgtctgtggcgaggcagctcaatgcggattatcctcagtacctctggtaccctcaggtcctcgctaatgccacggcatcctccgagctactagcccgtcgcctatgggagcacatggctcagtctgattccgacgcgaaatcaccggaaaatttaacgaagtggattaatgaggaattagtcattccaggacttggtatttcggatgccaccgatatcgagttgaaaaacctcgtgatcttccctgagcacgctcagcccttgttcgccaacatgattagcagacgagcccagatcggttggagcacccacggtcactcggctgtagacgtgaatatttatagctcgggagggccgggaacggatgccattcggggtaacgtggagaatacagacgttggtaagttcctcagagactatttagatgtgaatgtggatgatgttaccaaagaactcaacgacaagatgggctcggagaagaaatccaagtttggacagtatgctgcgactcaggagaaggatcattgggtcgctcatgaggctatggagcttaggcggtttgatgacgggtttgagatgtattga

SEQ ID NO: 23664 - protein, 583 aa, Muscodor strobelii
  misc_feature: SGI Peptide ID NO. 568054
  misc_feature (83)..(532): Pfam Id: PF00245 Pfam Desc: Alkaline phosphatase
  misc_feature (1)..(561): NCBI GI: 39939882 Blast Desc: MGG_05299 [Magnaporthe grisea 70-15] gi|145010417|gb|EDJ95073.1| MGG_05299 [Magnaporthe grisea 70-15]
  misc_feature (44)..(557): NCBI GI: 46116620 Blast Desc: FG04152.1 [Gibberella zeae PH-1]
  misc_feature (44)..(545): NCBI GI: 256726157 Blast Desc: [Nectria haematococca mpVI 77-13-4]
  misc_feature (44)..(572): NCBI GI: 85091690 Blast Desc: repressible alkaline phosphatase precursor [Neurospora crassa OR74A] gi|28920421|gb|EAA29789.1| repressible alkaline phosphatase precursor [Neurospora crassa OR74A]
  misc_feature (4)..(545): NCBI GI: 171686304 Blast Desc: protein product [Podospora anserina] gi|170943113|emb|CAP68766.1| protein product [Podospora anserina]
  misc_feature (2)..(563): NCBI GI: 156058398 Blast Desc: alkaline phosphatase [Sclerotinia sclerotiorum 1980] gi|154700998|gb|EDO00737.1| alkaline phosphatase [Sclerotinia sclerotiorum 1980]
  misc_feature (2)..(563): NCBI GI: 154310566 Blast Desc: BC1G_06757 [Botryotinia fuckeliana B05.10] gi|150851297|gb|EDN26490.1| BC1G_06757 [Botryotinia fuckeliana B05.10]
  misc_feature (7)..(557): NCBI GI: 239609620 Blast Desc: alkaline phosphatase [Ajellomyces dermatitidis ER-3]
  misc_feature (7)..(557): NCBI GI: 261196784 Blast Desc: alkaline phosphatase [Ajellomyces dermatitidis SLH14081] gi|239596040|gb|EEQ78621.1| alkaline phosphatase [Ajellomyces dermatitidis SLH14081]
  misc_feature (7)..(542): NCBI GI: 225680464 Blast Desc: alkaline phosphatase [Paracoccidioides brasiliensis Pb03]
  misc_feature (83)..(565): SWISSPROT Homolog: EC 3.1.3.1 Alkaline phosphatase
MPRDTTPLLARRDSSAHSDRSSSSSEDALRGSSHATHTGRSGTSRLREALLFAWALLATAGILVLAVWVSHRQQTSFNKPAGKRNLIFMVSDGMGPASLSLTRSFRQHTEGLEYGDTLTLDKHFWGSSRTRSSSSLVTDSAAGATAFSCAKKSYNGAISMLPDSTPCGTVLEAAKKAGYSTGLVVTTDITDATPACFASHVDYRLQQDEIALHEIGHGPLERSVDLMLGGGRCHFLPNSTSGGCRQDSLDVIDLAQKDYGWNYIGNRSAFDHYAKLGAEVPFPFLGLFAPTDIPFELDRRNMNDVYPSLSEMADMALRSLEKATAKTDKGFFLMIEGSRIDHAGHENDPSAQVREVLEYDKTFKLVLEFLEESKTDGVLVATSDHETGGLSVARQLNADYPQYLWYPQVLANATASSELLARRLWEHMAQSDSDAKSPENLTKWINEELVIPGLGISDATDIELKNLVIFPEHAQPLFANMISRRAQIGWSTHGHSAVDVNIYSSGGPGTDAIRGNVENTDVGKFLRDYLDVNVDDVTKELNDKMGSEKKSKFGQYAATQEKDHWVAHEAMELRRFDDGFEMY

SEQ ID NO: 23665 - DNA, 2207 bp, Muscodor strobelii
  misc_feature: SGI EST ID NO. CUFF.55673.0
  misc_feature: Variant of the nucleotide sequence at SEQ ID NO 23663
gacaaaatcccatgacccagctccgcctcaagcatcagagcgatcaacgactcgtctggctcagtgagtcttggtgacgagatcggatctgtctttccgcatctacatccatcggccgagacttgttggactgtgtcgcgttttctgcatctttggccgatgattttcatacaacatgcctagagacaccactcccctcctcgcccgccgtgattcctctgcccactccgatcgctcctcgtcctcgtccgaagatgctctccgcggctcgtctcacgccacacacaccggccggtcaggcacttcgcgcctccgcgaagctctgctctttgcctgggctcttctcgccacggccggcatcctagtcctagccgtatgggtctctcatcgccagcagacatcgttcaacaaacctgccggaaagcggaatctcatcttcatggtttccgacggcatgggcccagcttccctctctctgacacggagctttcggcagcacaccgaaggcctcgagtatggcgataccctcaccctggacaagcacttttggggcagcagtcggacgaggagcagctcgtcgctcgtcaccgatagcgctgcaggcgcaacagcattcagctgtgcgaaaaagagctacaatggcgccatctccatgctgccagactcaactccttgtgggaccgtgctagaagcggccaagaaggctggctactcgactggactcgttgtcacgaccgacatcacggacgctacgcctgcttgctttgctagccacgttgactaccgcctccagcaagacgagattgcccttcacgaaatcggacacggcccgctcgaacgttctgtggacctaatgctcggaggcggtcgctgtcatttcttgccaaattccacatccggtggctgtcggcaggatagcttagacgtcatcgatctggcacaaaaagactatggctggaattacatcggaaatagatcagcgttcgaccattatgccaaacttggcgccgaagtcccctttccatttcttggcttgttcgcaccgacagatatccccttcgagctcgatcggaggaacatgaatgatgtataccccagtctcagcgagatggcagatatggctctgcgctctcttgagaaggctactgcgaagaccgataagggatttttcttgatgatcgagggcagcagaatcgaccatgcggggcacgagaatgatccctcggcccaggtacgagaagtgttggagtacgataagacctttaaactcgtccttgaattcctggaggagagcaagaccgatggtgtcctcgttgcgaccagtgatcatgaaaccggtggcttgtctgtggcgaggcagctcaatgcggattatcctcagtacctctggtaccctcaggtcctcgctaatgccacggcatcctccgagctactagcccgtcgcctatgggagcacatggctcagtctgattccgacgcgaaatcaccggaaaatttaacgaagtggattaatgaggaattagtcattccaggacttggtatttcggatgccaccgatatcgagttgaaaaacctcgtgatcttccctgagcacgctcagcccttgttcgccaacatgattagcagacgagcccagatcggttggagcacccacggtcactcggctgtagacgtgaatatttatagctcgggagggccgggaacggatgccattcggggtaacgtggagaatacagacgttggtaagttcctcagagactatttagatgtgaatgtggatgatgttaccaaagaactcaacgacaagatgggctcggagaagaaatccaagtttggacagtatgctgcgactcaggagaaggatcattgggtcgctcatgaggctatggagcttaggcggtttgatgacgggtttgagatgtattgaatggagattggtgtataatacctgtgggcatttcgtcttcttttcatcttcagcgtgttgatctgtattgcatatcggcaaaaagtcattggtaattaacagtcatttctggttctctgggtgtggacgtgggttctatctatataatggtcattgaataagacatatttggcgatatgagttcgcgatggctatctttaccacgcgttgacgttgactacactcggatttcgtatgcactggaaggtcaatataaactctacttgccgactagatcagc

SEQ ID NO: 23666 - DNA, 1881 bp, Muscodor strobelii
  misc_feature: SGI cDNA ID NO. 568055
  misc_feature: Reduced expression when VOC is produced
  misc_feature: Encodes the peptide sequence at SEQ ID NO 23667
atgtcgccaagaacatcctcggactcgaccgccactgaggcgtttcctcccgctcccaccctcgatcaacaattgcggccttccgtgcctgaggctacttcgaccgtgagtgcgcccaccgtggtggtgccttcagaaaacccacgcacccaatcgcacgtacactatggaatcggggtcgacaccggcgccgtgccccaatccgcacctcacttgccgcccatgtcgcccaagtcgcccatcgcggggctgcgccgtcgcaacacgcgcgccaacactttcaggactatcgaggagttcgacgagtacgagtatgagagaggcacgggaggtcgtcctggggctgagccagggctggaccctaccaagtcagatgggggccgggatacgaagccaactcttcacgccgagtgccaagtgacggttgtcgacttttcgcaagaccacctccaaatccacgagctcgacaatagccagttgattgacttcgtcatgcgcccccagccctcatgggtcaagtgtcgatggataaatgtaaatggaatatcttgggatgtcattcaggcgctgggaaaatacaaagacctgcaccggctggccatcgaggatgtcatgaacccacgcaaccgaaccaaggcagattggtatcagggacacacattcatggtcttgacttgcatgaaattggttcgtctcattgatgatgacagcgacagcgatagtgacagcgatgacgacgacgacgactacgatagatcgcccattaaacatcgtagcggggttctacatggagctgccaagaaggtccggcgatggataactgggaagaaaaccgataaccccaaagcaaccagtgctctcgagaagggaactccatcgtctttgccgccaaggcccatttcccatcaggcaactgggctatctgatgtcttcaaccccaacacactctgcaccttgcaaagatatcatgccgccccgaatgctgcgcgcacagagtacatggagaaacactcggctttggcctcgagagggctggcggtcatggctgagcaagtagccatgttcatcacgtcggacaataccgtaattgccttctttgagcagtctgccgacgatgtcgaagaaccgattcttgctagactgcaaagtgcaaccaccatattgcggcagtcttgcgatgcttctatggtcgctcaggcaatcattgacgctatcatcgacatggctatacctgtcactgcttgctacgccgatattattggtgatctggaactcgacgtgcttacgcatccaaacgtgaaacacaccaagaacctctacatcatcatttcggaaatcaacaagattttcagcttcgtgaacccgatacagggactcatcaacacgctacgcgatcacaagacgaaactggcgccggagtccgtttctcgcgaactgcaaaacccacttagtagtgtaataattacaccaaagacctatacttacttgggcgatgtgtacgatcactgtgttctaatcacggaaaacttaacacaactcaaagaatcggcaaaccacatgattgacctcatcttcaacaccatagcgacgtaccagaatgagagcatgaagcagctgacgattgcgaccatcatcttcttgcccttgacattcattactggatacttcgggcagaatttcggtacattcccagaggcacagaaagaaagcagcacatacttttggaagatcgctataccagtcgttgtggctaccgccgcggtattgatgagagatgtgatcttccagagcgttgatagattctttacgcggcggagaatactgagcatcaggaagaagaagaagacgaggatgtcaagagcaatgacggggtccatgtag

SEQ ID NO: 23667 - protein, 626 aa, Muscodor strobelii
  misc_feature: SGI Peptide ID NO. 568055
  misc_feature (267)..(594): Pfam Id: PF01544 Pfam Desc: CorA-like Mg2+ transporter protein
  misc_feature (495)..(560): Pfam Id: PF01544 Pfam Desc: CorA-like Mg2+ transporter protein
  misc_feature (49)..(610): NCBI GI: 46116622 Blast Desc: FG04153.1 [Gibberella zeae PH-1]
  misc_feature (77)..(609): NCBI GI: 261359150 Blast Desc: conserved [Verticillium albo-atrum VaMs.102]
  misc_feature (53)..(610): NCBI GI: 256725753 Blast Desc: [Nectria haematococca mpVI 77-13-4]
  misc_feature (133)..(574): NCBI GI: 116191595 Blast Desc: CHGG_05515 [Chaetomium globosum CBS 148.51] gi|88181428|gb|EAQ88896.1| CHGG_05515 [Chaetomium globosum CBS 148.51]
  misc_feature (5)..(563): NCBI GI: 145602041 Blast Desc: MGG_05233 [Magnaporthe grisea 70-15] gi|145010492|gb|EDJ95148.1| MGG_05233 [Magnaporthe grisea 70-15]
  misc_feature (114)..(620): NCBI GI: 171687150 Blast Desc: protein product [Podospora anserina] gi|170943536|emb|CAP69189.1| protein product [Podospora anserina]
  misc_feature (84)..(619): NCBI GI: 239613016 Blast Desc: CorA family metal ion transporter [Ajellomyces dermatitidis ER-3]
  misc_feature (37)..(617): NCBI GI: 242777650 Blast Desc: CorA family metal ion transporter, [Talaromyces stipitatus ATCC 10500] gi|218722696|gb|EED22114.1| CorA family metal ion transporter, [Talaromyces stipitatus ATCC 10500]
  misc_feature (84)..(619): NCBI GI: 261189613 Blast Desc: CorA family metal ion transporter [Ajellomyces dermatitidis SLH14081] gi|239591453|gb|EEQ74034.1| CorA family metal ion transporter [Ajellomyces dermatitidis SLH14081]
  misc_feature (84)..(590): NCBI GI: 226294173 Blast Desc: conserved [Paracoccidioides brasiliensis Pb18]
  misc_feature: Useful for introducing or modulating the production of volatile compounds
MSPRTSSDSTATEAFPPAPTLDQQLRPSVPEATSTVSAPTVVVPSENPRTQSHVHYGIGVDTGAVPQSAPHLPPMSPKSPIAGLRRRNTRANTFRTIEEFDEYEYERGTGGRPGAEPGLDPTKSDGGRDTKPTLHAECQVTVVDFSQDHLQIHELDNSQLIDFVMRPQPSWVKCRWINVNGISWDVIQALGKYKDLHRLAIEDVMNPRNRTKADWYQGHTFMVLTCMKLVRLIDDDSDSDSDSDDDDDDYDRSPIKHRSGVLHGAAKKVRRWITGKKTDNPKATSALEKGTPSSLPPRPISHQATGLSDVFNPNTLCTLQRYHAAPNAARTEYMEKHSALASRGLAVMAEQVAMFITSDNTVIAFFEQSADDVEEPILARLQSATTILRQSCDASMVAQAIIDAIIDMAIPVTACYADIIGDLELDVLTHPNVKHTKNLYIIISEINKIFSFVNPIQGLINTLRDHKTKLAPESVSRELQNPLSSVIITPKTYTYLGDVYDHCVLITENLTQLKESANHMIDLIFNTIATYQNESMKQLTIATIIFLPLTFITGYFGQNFGTFPEAQKESSTYFWKIAIPVVVATAAVLMRDVIFQSVDRFFTRRRILSIRKKKKTRMSRAMTGSM

SEQ ID NO: 23668 - DNA, 4170 bp, Muscodor strobelii
  misc_feature: SGI EST ID NO. CUFF.55920.0
  misc_feature: Variant of the nucleotide sequence at SEQ ID NO 23666
acgccatcgacctgtttcgccgacacacttccgccaccggcttatttggcgttcatcgtcgttgcaacgtcggccaagccagaaccggcaataccactgaaaccaaccacggacatcatattcgtgggcaatccaaccattcgcttcccattgctcgatgctttgcccgcaggcaacgccgtatttgttgatctcgggatcgtatgtcgctgacgtaagataatgctctgccagtccagacgtccattcttccggtagttcgcgccagtcatctgaaatagtcgtcttgaggcgctgtgagtataatggccgccagtatgaaccgccaaaacttccttcgcggataatgctttcaggcgatttgttgggagtaaactccgggtgagatgagaaatgatatgtgccctgatcgtcacgggatggtggacctgctgagggcgtccaagaagaccaacttgcttttagttcttcaagactctgatttggcggtgtattctcatctaatactgccggttctgaatcctcggactgcttctttctccgctgtgcttggcgacgggctgcaggtatatttgaatcatcgtcttctgtgtagactggcttgctcgaggcgcttgcaagacgtgctgatacgcgtgtaggttgcacaatagatgagtgcagcttgcgccgttttgatgcaggctgtcgagctgtggaggatgaggtcttgggcttggctaccaattcaccctgtaaaccgagaccctgcaccaaaccttgattacgtttgatgttttcttgtcgacgactctcgtaggtactcattttcaactacttgctaacctcagaaccttgcagtatacctatgtacctattctttcgcggtagaatgcccaaggtgactggatgtaaattactttcaagcgagctagcttggaagtcgttcaagctacacgccaaacaattacgtcatggagcaaaaaggatgcactttctacaacacgtttcgcttgaagtgacaacctcacaaaatgtgttagatctatgcgcgagcaacgtcaattggacgaagtgtaaggcactacagctttggtctcaatccgcaatggacgcagcaatattgacaaatgacaatggcaagggcgagccaggggctgtctggcatgggaaagtcgaacgaaagtctaaattaagtcgcgacgtttccgataaagctacctgaagaccggtgctagaaatctgaacctcactagccaggtagtttcaactttattcgaatgtctagctgacgcctgctggaccctggacggtatctccgagttctggggtagttgtgagcttctagaaccatttatacgctccgtacgacgaggctagtccccatctcaccgtcaatcctccatcttcaacatcatagtcgacacaaattacttctccaacttccttatcgaccggcttacttcttacaacaacgccattgacattatttaatgaagaaggcgacagtactctgatcctctgagttgctagtttggattgcctattgactcgagtcttctgttacttatggacgagaactcgaatgttgctatccgatctattcgacctcgtggccgtgaacaacgacacaacacttctcgcggcctagtcgtatcgctgctccacggacacgatgtcgccaagaacatcctcggactcgaccgccactgaggcgtttcctcccgctcccaccctcgatcaacaattgcggccttccgtgcctgaggctacttcgaccgtgagtgcgcccaccgtggtggtgccttcagaaaacccacgcacccaatcgcacgtacactatggaatcggggtcgacaccggcgccgtgccccaatccgcacctcacttgccgcccatgtcgcccaagtcgcccatcgcggggctgcgccgtcgcaacacgcgcgccaacactttcaggactatcgaggagttcgacgagtacgagtatgagagaggcacgggaggtcgtcctggggctgagccagggctggaccctaccaagtcagatgggggccgggatacgaagccaactcttcacgccgagtgccaagtgacggttgtcgacttttcgcaagaccacctccaaatccacgagctcgacaatagccagttgattgacttcgtcatgcgcccccagccctcatgggtcaagtgtcgatggataaatgtaaatggaatatcttgggatgtcattcaggcgctgggaaaatacaaagacctgcaccggctggccatcgaggatgtcatgaacccacgcaaccgaaccaaggcagattggtatcagggacacacattcatggtcttgacttgcatgaaattggttcgtctcattgatgatgacagcgacagcgatagtgacagcgatgacgacgacgacgactacgatagatcgcccattaaacatcgtagcggggttctacatggagctgccaagaaggtccggcgatggataactgggaagaaaaccgataaccccaaagcaaccagtgctctcgagaagggaactccatcgtctttgccgccaaggcccatttcccatcaggcaactgggctatctgatgtcttcaaccccaacacactctgcaccttgcaaagatatcatgccgccccgaatgctgcgcgcacagagtacatggagaaacactcggctttggcctcgagagggctggcggtcatggctgagcaagtagccatgttcatcacgtcggacaataccgtaattgccttctttgagcagtctgccgacgatgtcgaagaaccgattcttgctagactgcaaagtgcaaccaccatattgcggcagtcttgcgatgcttctatggtcgctcaggcaatcattgacgctatcatcgacatggctatacctgtcactgcttgctacgccgatattattggtgatctggaactcgacgtgcttacgcatccaaacgtgaaacacaccaagaacctctacatcatcatttcggaaatcaacaagattttcagcttcgtgaacccgatacagggactcatcaacacgctacgcgatcacaagacgaaactggcgccggagtccgtttctcgcgaactgcaaaacccacttagtagtgtaataattacaccaaagacctatacttacttgggcgatgtggtatgtatcacggtgcatcctctgcaatctctcgcgtgcatactgagaactcacgttttagtacgatcactgtgttctaatcacggaaaacttaacacaactcaaagaatcggcaaaccacatgattgacctcatcttcaacaccatagcgacgtaccagaatgagagcatgaagcagctgacgattgcgaccatcatcttcttgcccttgacattcattactggatacttcgggcagaatttcggtacattcccagaggcacagaaagaaagcagcacatacttttggaagatcgctataccagtcgttgtggctaccgccgcggtattgatgagagatgtgatcttccagagcgttgatagattctttacgcggcggagaatactgagcatcaggaagaagaagaagacgaggatgtcaagagcaatgacggggtccatgtaggatatggggctttggacgaagaagacggtttagatacacacattgagaagatgtggctgcgtacgtatatatattaagagcatggtgggaatgggtatagaagtagcagtagatagtatcaataccccttcagcgtctctattaagaagttgttaatcgcataaacagatattcttaatccttgacatggcagcatggagaagggcggtattatgtaaataaactgtgatttcacgatgtcggacggctgcaacgagtgtagagatgatcctcacaatgagatcagactcgattgaaattgaatgttagcaaaatcaccttgtaggctgtcgttcccttgcaatgtagtaagccgacatttttatttgctacatgtacctagcaaagaaaaattgcaagatacatgtagaaacacggcatatcatcatctagtctttgagtgagattaaacaatactttttggagtttcgatgttttggattctggaacgacgtctactcaattgccttgagactatacataaatatatttacctagttgcacttaatacgccagaagcgcgataagaggcgcg

SEQ ID NO: 23669 - DNA, 978 bp, Muscodor strobelii
  misc_feature: SGI cDNA ID NO. 568056
  misc_feature: Encodes the peptide sequence at SEQ ID NO 23670
atgagtacctacgagagtcgtcgacaagaaaacatcaaacgtaatcaaggtttggtgcagggtctcggtttacagggtgaattggtagccaagcccaagacctcatcctccacagctcgacagcctgcatcaaaacggcgcaagctgcactcatctattgtgcaacctacacgcgtatcagcacgtcttgcaagcgcctcgagcaagccagtctacacagaagacgatgattcaaatatacctgcagcccgtcgccaagcacagcggagaaagaagcagtccgaggattcagaaccggcagtattagatgagaatacaccgccaaatcagagtcttgaagaactaaaagcaagttggtcttcttggacgccctcagcaggtccaccatcccgtgacgatcagggcacatatcatttctcatctcacccggagtttactcccaacaaatcgcctgaaagcattatccgcgaaggaagttttggcggttcatactggcggccattatactcacagcgcctcaagacgactatttcagatgactggcgcgaactaccggaagaatggacgtctggactggcagagcattatcttacgtcagcgacatacgatcccgagatcaacaaatacggcgttgcctgcgggcaaagcatcgagcaatgggaagcgaatggttggattgcccacgaatatgatgtccgtggttggtttcagtggtattgccggttctggcttggccgacgttgcaacgacgatgaacgccaaataagccggtggcggaagtgtgtcggcgaaacaggtcgatggcgtagaacgttactgaagaagtacgtccagaataacatccgctcagtgactgatgagggtgacgaggtcgatggccgcaaagatcccagtcctgttgtgcaccagacgtgtcatcattgggcatgggaggttcgacaggaagacttggatcgctactggagcgagtatacctag

SEQ ID NO: 23670 - protein, 325 aa, Muscodor strobelii
  misc_feature: SGI Peptide ID NO. 568056
  misc_feature (4)..(312): NCBI GI: 46138979 Blast Desc: FG11004.1 [Gibberella zeae PH-1]
  misc_feature (131)..(316): NCBI GI: 62955751 Blast Desc: LOC550591 [Danio rerio] gi|62204714|gb|AAH93435.1| Zgc:113208 [Danio rerio] gi|122890786|emb|CAM13639.1| novel protein [Danio rerio]
  misc_feature (129)..(319): NCBI GI: 72159138 Blast Desc: [Strongylocentrotus purpuratus] gi|115977220|ref|XP_001182827.1| [Strongylocentrotus purpuratus]
  misc_feature (131)..(320): NCBI GI: 156399889 Blast Desc: [Nematostella vectensis] gi|156225856|gb|EDO46670.1| [Nematostella vectensis]
  misc_feature (131)..(318): NCBI GI: 221129199 Blast Desc: [Hydra magnipapillata]
  misc_feature (1)..(317): NCBI GI: 116060410 Blast Desc: Zn2+-binding protein Melusin/RAR1, contains CHORD domain (ISS) [Ostreococcus tauri]
  misc_feature (145)..(320): NCBI GI: 224012593 Blast Desc: [Thalassiosira pseudonana CCMP1335] gi|220969388|gb|EED87729.1| [Thalassiosira pseudonana CCMP1335]
  misc_feature (144)..(320): NCBI GI: 219130511 Blast Desc: [Phaeodactylum tricornutum CCAP 1055/1] gi|217403121|gb|EEC43076.1| [Phaeodactylum tricornutum CCAP 1055/1]
  misc_feature (131)..(318): NCBI GI: 221129201 Blast Desc: [Hydra magnipapillata]
  misc_feature (133)..(317): NCBI GI: 226459391 Blast Desc: [Micromonas pusilla CCMP1545]
MSTYESRRQENIKRNQGLVQGLGLQGELVAKPKTSSSTARQPASKRRKLHSSIVQPTRVSARLASASSKPVYTEDDDSNIPAARRQAQRRKKQSEDSEPAVLDENTPPNQSLEELKASWSSWTPSAGPPSRDDQGTYHFSSHPEFTPNKSPESIIREGSFGGSYWRPLYSQRLKTTISDDWRELPEEWTSGLAEHYLTSATYDPEINKYGVACGQSIEQWEANGWIAHEYDVRGWFQWYCRFWLGRRCNDDERQISRWRKCVGETGRWRRTLLKKYVQNNIRSVTDEGDEVDGRKDPSPVVHQTCHHWAWEVRQEDLDRYWSEYT

SEQ ID NO: 23671 - DNA, 5259 bp, Muscodor strobelii
  misc_feature: SGI EST ID NO. CUFF.55919.2
  misc_feature: Variant of the nucleotide sequence at SEQ ID NO 23669
caagtatgtgctgctttctttctgtgcctctgggaatgtaccgaaattctgcccgaagtatccagtaatgaatgtcaagggcaagaagatgatggtcgcaatcgtcagctgcttcatgctctcattctggtacgtcgctatggtgttgaagatgaggtcaatcatgtggtttgccgattcctaccataatgcagttagtgaccattatttacccaatgcaacgttcccgattccactcaaacatgcgtatctgtctgggcatgacgccgtggaaaatgatccatctccgtatagtgagcaagacaaaaagattgcagcttactttgagttgtgttaagttttccgtgattagaacacagtgatcgtactaaaacgtgagttctcagtatgcacgcgagagattgcagaggatgcaccgtgatacataccacatcgcccaagtaagtataggtctttggtgtaatctagatttacgccaaggtcagtaaacaagataagaaacgggtaggaaaccaagacttggtgaggattggaagaactcactattacactactaagtgggttttgcagttcgcgagaaacggactccggcgccagtttcgtcttgtgatcgcgtagcgtgttgatgagtccctgtatcgggttcacgaagctgaaaatcttgttgatttccgaaatgatgatgtagaggttcttggtgtgtttcacgtttggatgcgtaagcacgtcgagttccagatcaccaataatatcggcgtagcaagcagtgacaggtatagccatgtcgatgatagcgtcaatgattgcctgagcgaccatagaagcatcgcaagactgccgcaatatggtggttgcactttgcagtctagcaagaatcggttcttcgacatcgtcggcagactgctcaaagaaggcaattacggtattgtccgacgtgatgaacatggctacttgctcagccatgaccgccagccctctcgaggccaaagccgagtgtttctccatgtactctgtgcgcgcagcattcggggcggcatgatatctttgcaaggtgcagagtgtgttggggttgaagacatcagatagcccagttgcctgatgggaaatgggccttggcggcaaagacgatggagttcccttctcgagagcactggttgctttggggttatcggttttcttcccagttatccatcgccggaccttcttggcagctccatgtagaaccccgctacgatgtttaatgggcgatctatcgtagtcgtcgtcgtcgtcatcgctgtcactatcgctgtcgctgtcatcatcaatgagacgaaccaatttcatgcaagtcaagaccatgaatgtgtgtccctgataccaatctgccttggttcggttgcgtgggttcatgacatcctcgatggccagccggtgcaggtctttgtattttcccagcgcctgaatgacatcccaagatattccatttacatttatccatcgacacttgacccatgagggctgggggcgcatgacgaagtcaatcaactggctattgtcgagctcgtggatttggaggtggtcttgcgaaaagtcgacaaccgtcacttggcactcggcgtgaagagttggcttcgtatcccggcccccatctgacttggtagggtccagccctggctcagccccaggacgacctcccgtgcctctctcatactcgtactcgtcgaactcctcgatagtcctgaaagtgttggcgcgcgtgttgcgacggcgcagccccgcgatgggcgacttgggcgacatgggcggcaagtgaggtgcggattggggcacggcgccggtgtcgaccccgattccatagtgtacgtgcgattgggtgcgtgggttttctgaaggcaccaccacggtgggcgcactcacggtcgaagtagcctcaggcacggaaggccgcaattgttgatcgagggtgggagcgggaggaaacgcctcagtggcggtcgagtccgaggatgttcttggcgacatcgtgtccgtggagcagcgatacgactaggccgcgagaagtgttgtgtcgttgttcacggccacgaggtcgaatagatcggatagcaacattcgagttctcgtccataagtaacagaagactcgagtcaataggcaatccaaactagcaactcagaggatcagagtactgtcgccttcttcattaaataatgtcaatggcgttgttgtaagaagtaagccggtcgataaggaagttggagaagtaatttgtgtcgactatgatgttgaagatggaggattgacggtgagatggggactagcctcgtcgtacggagcgtataaatggttctagaagctcacaactaccccagaactcggagataccgtccagggtccagcaggcgtcagctagacattcgaataaagttgaaactacctggctagtgaggttcagatttctagcaccggtcttcaggtagctttatcggaaacgtcgcgacttaatttagactttcgttcgactttcccatgccagacagcccctggctcgcccttgccattgtcatttgtcaatattgctgcgtccattgcggattgagaccaaagctgtagtgccttacacttcgtccaattgacgttgctcgcgcatagatctaacacattttgtgaggttgtcacttcaagcgaaacgtgttgtagaaagtgcatcctttttgctccatgacgtaattgtttggcgtgtagcttgaacgacttccaagctagctcgcttgaaagtaatttacatccagtcaccttgggcattctaccgcgaaagaataggtacataggtatactgcaaggttctgaggttagcaagtagttgaaaatgagtacctacgagagtcgtcgacaagaaaacatcaaacgtaatcaaggtttggtgcagggtctcggtttacagggtgaattggtagccaagcccaagacctcatcctccacagctcgacagcctgcatcaaaacggcgcaagctgcactcatctattgtgcaacctacacgcgtatcagcacgtcttgcaagcgcctcgagcaagccagtctacacagaagacgatgattcaaatatacctgcagcccgtcgccaagcacagcggagaaagaagcagtccgaggattcagaaccggcagtattagatgagaatacaccgccaaatcagagtcttgaagaactaaaagcaagttggtcttcttggacgccctcagcaggtccaccatcccgtgacgatcagggcacatatcatttctcatctcacccggagtttactcccaacaaatcgcctgaaagcattatccgcgaaggaagttttggcggttcatactggcggccattatactcacagcgcctcaagacgactatttcagatgactggcgcgaactaccggaagaatggacgtctggactggcagagcattatcttacgtcagcgacatacgatcccgagatcaacaaatacggcgttgcctgcgggcaaagcatcgagcaatgggaagcgaatggttggattgcccacgaatatgatgtccgtggttggtttcagtggtattgccggttctggcttggccgacgttgcaacgacgatgaacgccaaataagccggtggcggaagtgtgtcggcgaaacaggtcgatggcgtagaacgttactgaagaagtacgtccagaataacatccgctcagtgactgatgagggtgacgaggtcgatggccgcaaagatcccagtcctgttgtgcaccagacgtgtcatcattgggcatgggaggttcgacaggaagacttggatcgctactggagcgagtatacctaggagcccacctattctgtttctcagaacgaacttggcatacgcgattcaagacatatctaataggtccaagtctttcaaagcaataaacatggatgcaaggatgaggcccagacaagcggcaaagtgtattagagatattacattatatacgagtgagaattggccgctcggtatcgtgagaatgtgtcatcaaactacaatgatctgcacctttcttcatgcaatatcgcgcactactttttactcctcgtagccatatgacaagaaactggaaactggccacccgttctgcacatcgtactcatcgggtctggtcgttccatgaagaatcttgaaatgaggcatatttccacacccgatggtcgtggcattgttgcactgttcctcatttggacgaactttcttcaactgcccggcgatgcgctgcgcaacatcgcggccctcataatacgcgccctgtaagaacccgaaatattctgctgacgtaccctcaccagcgaaccaaaggcggccgagatttgcgcgaatgttttgatgcttttcgagggtcataccgacaggccagtttgagtaggagccaaaagcccacctgcacatctggttagcagccgttcgagtggatatgaccaaggcacataatatttgactcactcttccgtgctccatcgggggtacataaaatcaataggctctgggatgtctttgtccgggaacatcgttctgagaactgccagagcttccgcttttgtcacttcgtcgtgttgttcttcgactctataagactctcttccaacaaccgtaacgaaaattatatttgatccctccagaaaccctgggccggacaaactctgccacacaggatagtatccacgctcgttgtcgtcggcgtagaggaagtattgcgtctcggggtcccagaacgtttcattaaattggaagaaaatttttgtgtacgtgcccatttgatactgctcgatagcttcccgcttccattgtggtagcttcggctggaagtccaccacatcgttttgcagaacaccaatagaaaatgtcgcaattgcatctagatatcattagaaacaggtgcgatcaaagatctcaataatgtcatgcgaagatacactcacgttcagcttccacgcaaccaccatcttcgaatttcaccgtgacgcactctgaaccatactcaatggatttcaccgtagtgtttagcatgagacgcgggtcatttttcttgagaaacgtgttcgcttcgccaatgataaacgcattgaagcctctctgatcccacacaaaattgttttcgtcactccactggtagaaggttaggttgtacccagtgataccgaagagaagcccgctgttctctggcggccaagccgtttcgaaatcccagtaccaccattcaaccgcttgagccttgatgtcct

SEQ ID NO: 23672 - DNA, 1611 bp, Muscodor strobelii
  misc_feature: SGI cDNA ID NO. 568057
  misc_feature: Encodes the peptide sequence at SEQ ID NO 23673
atgaaagtcacacttctccaactcgttgcaggggcctttgctctgagcccatctatcatcgcttctcccactgccgataaatacaaaacatgtcgtaagacgaaagttgcaattctcggtgctggagcggctggcattacagctgcacaaactctcacaaatgcttcaattacagacttcctcataattgacaggaacgattacattggtggtagagtaaagcacactgagttcggcaagaagagtgatggcacgccatacacggtcgagctgggtgccaattgggtacaaggtctaggaactgaaggcggaccagaaaacccaatctggacgctggcaaagaaatatggaatcaataatacgtactccgactacgactccattctgacttacgatacctccggagccgcagactacgggactctgttcgacgagatggatgaagcatacacggccacagaggaggccgcaggttacatcctgactcaaaacttgcaagattcgagcatgcgcgcaggatatagcgtcgctggctggaaaccaaagaaggacatcaaggctcaagcggttgaatggtggtactgggatttcgaaacggcttggccgccagagaacagcgggcttctcttcggtatcactgggtacaacctaaccttctaccagtggagtgacgaaaacaattttgtgtgggatcagagaggcttcaatgcgtttatcattggcgaagcgaacacgtttctcaagaaaaatgacccgcgtctcatgctaaacactacggtgaaatccattgagtatggttcagagtgcgtcacggtgaaattcgaagatggtggttgcgtggaagctgaacatgcaattgcgacattttctattggtgttctgcaaaacgatgtggtggacttccagccgaagctaccacaatggaagcgggaagctatcgagcagtatcaaatgggcacgtacacaaaaattttcttccaatttaatgaaacgttctgggaccccgagacgcaatacttcctctacgccgacgacaacgagcgtggatactatcctgtgtggcagagtttgtccggcccagggtttctggagggatcaaatataattttcgttacggttgttggaagagagtcttatagagtcgaagaacaacacgacgaagtgacaaaagcggaagctctggcagttctcagaacgatgttcccggacaaagacatcccagagcctattgattttatgtacccccgatggagcacggaagagtgggcttttggctcctactcaaactggcctgtcggtatgaccctcgaaaagcatcaaaacattcgcgcaaatctcggccgcctttggttcgctggtgagggtacgtcagcagaatatttcgggttcttacagggcgcgtattatgagggccgcgatgttgcgcagcgcatcgccgggcagttgaagaaagttcgtccaaatgaggaacagtgcaacaatgccacgaccatcgggtgtggaaatatgcctcatttcaagattcttcatggaacgaccagacccgatgagtacgatgtgcagaacgggtggccagtttccagtttcttgtcatatggctacgaggagtaa

SEQ ID NO: 23673 - protein, 536 aa, Muscodor strobelii
  misc_feature: SGI Peptide ID NO. 568057
  misc_feature (43)..(479): Pfam Id: PF01593 Pfam Desc: Flavin containing amine oxidoreductase
  misc_feature (256)..(479): Pfam Id: PF01593 Pfam Desc: Flavin containing amine oxidoreductase
  misc_feature (43)..(98): Pfam Id: PF01593 Pfam Desc: Flavin containing amine oxidoreductase
  misc_feature (29)..(524): NCBI GI: 256735673 Blast Desc: NECHADRAFT_31528 [Nectria haematococca mpVI 77-13-4]
  misc_feature (7)..(534): NCBI GI: 242783912 Blast Desc: flavin containing polyamine oxidase, [Talaromyces stipitatus ATCC 10500] gi|242783917|ref|XP_002480282.1| flavin containing polyamine oxidase, [Talaromyces stipitatus ATCC 10500]
  misc_feature (29)..(534): NCBI GI: 212527476 Blast Desc: flavin containing polyamine oxidase, [Penicillium marneffei ATCC 18224] gi|210073293|gb|EEA27380.1| flavin containing polyamine oxidase, [Penicillium marneffei ATCC 18224]
  misc_feature (1)..(529): NCBI GI: 169785785 Blast Desc: [Aspergillus oryzae RIB40] gi|83776101|dbj|BAE66220.1| protein product [Aspergillus oryzae]
  misc_feature (1)..(529): NCBI GI: 238506679 Blast Desc: flavin containing polyamine oxidase, [Aspergillus flavus NRRL3357] gi|220689254|gb|EED45605.1| flavin containing polyamine oxidase, [Aspergillus flavus NRRL3357]
  misc_feature (5)..(528): NCBI GI: 256722252 Blast Desc: NECHADRAFT_52373 [Nectria haematococca mpVI 77-13-4]
  misc_feature (1)..(535): NCBI GI: 121713372 Blast Desc: polyamine oxidase [Aspergillus clavatus NRRL 1] gi|119402450|gb|EAW12871.1| polyamine oxidase [Aspergillus clavatus NRRL 1]
  misc_feature (1)..(528): NCBI GI: 255942601 Blast Desc: Pc18g02250 [Penicillium chrysogenum Wisconsin 54-1255] gi|211586802|emb|CAP94449.1| Pc18g02250 [Penicillium chrysogenum Wisconsin 54-1255]
  misc_feature (8)..(529): NCBI GI: 115386548 Blast Desc: conserved [Aspergillus terreus NIH2624] gi|114190813|gb|EAU32513.1| conserved [Aspergillus terreus NIH2624]
  misc_feature (30)..(528): NCBI GI: 67540976 Blast Desc: AN6658.2 [Aspergillus nidulans FGSC A4] gi|40738997|gb|EAA58187.1| AN6658.2 [Aspergillus nidulans FGSC A4] gi|259480240|tpe|CBF71190.1| TPA: flavin containing polyamine
  misc_feature (20)..(476): SWISSPROT Homolog: EC 1.5.3.11 Polyamine oxidase
MKVTLLQLVAGAFALSPSIIASPTADKYKTCRKTKVAILGAGAAGITAAQTLTNASITDFLIIDRNDYIGGRVKHTEFGKKSDGTPYTVELGANWVQGLGTEGGPENPIWTLAKKYGINNTYSDYDSILTYDTSGAADYGTLFDEMDEAYTATEEAAGYILTQNLQDSSMRAGYSVAGWKPKKDIKAQAVEWWYWDFETAWPPENSGLLFGITGYNLTFYQWSDENNFVWDQRGFNAFIIGEANTFLKKNDPRLMLNTTVKSIEYGSECVTVKFEDGGCVEAEHAIATFSIGVLQNDVVDFQPKLPQWKREAIEQYQMGTYTKIFFQFNETFWDPETQYFLYADDNERGYYPVWQSLSGPGFLEGSNIIFVTVVGRESYRVEEQHDEVTKAEALAVLRTMFPDKDIPEPIDFMYPRWSTEEWAFGSYSNWPVGMTLEKHQNIRANLGRLWFAGEGTSAEYFGFLQGAYYEGRDVAQRIAGQLKKVRPNEEQCNNATTIGCGNMPHFKILHGTTRPDEYDVQNGWPVSSFLSYGYEE

SEQ ID NO: 23674 - DNA, 3068 bp, Muscodor strobelii
  misc_feature: SGI EST ID NO. CUFF.55920.3
  misc_feature: Variant of the nucleotide sequence at SEQ ID NO 23672
tggatctgcaaaccctgaaccgcctcagactctgagcaccatgttttcatcagattggagacttgtgagatgctgcggtcctccgagacttgattggcgacgggatcatattagcaattgcggtgtcgatgaggttcggttagtctgttcaaatgcaaacgcgacttgtcttggcccggagcattttctgggttggcccaacctggacatactgcatctgtggctactcttatgccgtttggcatgaatgcgcagaggtcctgcatcagcgtaacatttacactcattttgttatttcaatgaagcagtgatcgtttgaatgtattataggtcatgagctcgagcctcgaatgcgtgggcgatgtaaactaccgaagaatgaactaggtttgcgaaggtgaatgagctaattggctgacaacgatgttgcgattgtgattcaaatttcaaagagacaataggcatagagatagctcgacacaccaggatcctagccgacgtgagagtatttatcgtgtttgtaccatgtagcgcaggatcatcgtggcagatcgagtgacgttagacatgtagaactatcttctagtattctgctttttgccgaatggagttgtccgatggacctgcaactgttcattgcgcgttgcatgtcttattagtttaagcctcaattccagcttctgtaaattgcctagttgtacgccagggatgcgaaagcggagctcattttaatccatcgctttgatatgggggatatccccctgctggctgggcagcttagtcgagctcgcacagcacggttatcaccgtgcatattagtgattcttcgtcctaaccgattgacttaggagagagataagtgacgcttcagcagctcgacatgggttaagagcacttgttcgctccccgatttgctctcatcgcagagcttatgtgagctctttgcaatatacgaaaagcttgagaatagcttcctgtctatttggtgggcaatcaatttcggtaattgagcttgcaggatgaaagtcacacttctccaactcgttgcaggggcctttgctctgagcccatctatcatcgcttctcccactgccgataaatacaaaacatgtcgtaagacgaaagttgcaattctcggtgctggagcggctggcattacagctgcacaaactctcacaaatgcttcaattacagacttcctcataattgacaggaacgattacattggtggtagagtaaagcacactgagttcggcaagaagagtgatggcacgccatacacggtcgagctgggtgccaattgggtacaaggtctaggaactgaaggcggaccagaaaacccaatctggacgctggcaaagaaatatggaatcaataatacgtactccgactacgactccattctgacttacgatacctccggagccgcagactacgggactctgttcgacgagatggatgaagcatacacggccacagaggaggccgcaggttacatcctgactcaaaacttgcaagattcgagcatgcgcgcaggatatagcgtcgctggctggaaaccaaagaaggacatcaaggctcaagcggttgaatggtggtactgggatttcgaaacggcttggccgccagagaacagcgggcttctcttcggtatcactgggtacaacctaaccttctaccagtggagtgacgaaaacaattttgtgtgggatcagagaggcttcaatgcgtttatcattggcgaagcgaacacgtttctcaagaaaaatgacccgcgtctcatgctaaacactacggtgaaatccattgagtatggttcagagtgcgtcacggtgaaattcgaagatggtggttgcgtggaagctgaacatgcaattgcgacattttctattggtgttctgcaaaacgatgtggtggacttccagccgaagctaccacaatggaagcgggaagctatcgagcagtatcaaatgggcacgtacacaaaaattttcttccaatttaatgaaacgttctgggaccccgagacgcaatacttcctctacgccgacgacaacgagcgtggatactatcctgtgtggcagagtttgtccggcccagggtttctggagggatcaaatataattttcgttacggttgttggaagagagtcttatagagtcgaagaacaacacgacgaagtgacaaaagcggaagctctggcagttctcagaacgatgttcccggacaaagacatcccagagcctattgattttatgtacccccgatggagcacggaagagtgggcttttggctcctactcaaactggcctgtcggtatgaccctcgaaaagcatcaaaacattcgcgcaaatctcggccgcctttggttcgctggtgagggtacgtcagcagaatatttcgggttcttacagggcgcgtattatgagggccgcgatgttgcgcagcgcatcgccgggcagttgaagaaagttcgtccaaatgaggaacagtgcaacaatgccacgaccatcgggtgtggaaatatgcctcatttcaagattcttcatggaacgaccagacccgatgagtacgatgtgcagaacgggtggccagtttccagtttcttgtcatatggctacgaggagtaaaaagtagtgcgcgatattgcatgaagaaaggtgcagatcattgtagtttgatgacacattctcacgataccgagcggccaattctcactcgtatataatgtaatatctctaatacactttgccgcttgtctgggcctcatccttgcatccatgtttattgctttgaaagacttggacctattagatatgtcttgaatcgcgtatgccaagttcgttctgagaaacagaataggtgggctcctaggtatactcgctccagtagcgatccaagtcttcctgtcgaacctcccatgcccaatgatgacacgtcttaacgacacattagccatctagctctgtcagactccgatccagagaagtgggactcacctggtgcacaacaggactgggatctttgcggccatcgacctcgtcaccctcatcagtcactgagcggat

SEQ ID NO: 23675 - DNA, 1638 bp, Muscodor strobelii
  misc_feature: SGI cDNA ID NO. 568058
  misc_feature: Encodes the peptide sequence at SEQ ID NO 23676
atgtgtgggatcgttgcagtgatatctggcaacgtagaatgcgatgctgctgccgtcgatttacacgaagctctttacgcacttcaacatcgtggtcaggatgcatgcggtattgcaacctctcacagatctgggaggatccattcttgcaaaggcaaaggtttagcctccaaagtatttcgtgatggtctcataattccagaactacctggtttcatgggcctcggacatctgaggtaccctaccgctggtacctcttccaacgcagaaactcagcctttctacgtcagctcaccatatggtcttttgttctcgcacaatggaaatcttctcgataccgagaaacttaaggagtacttggattgcaaagcacatcgccacattaatacggacagcgattcggagatcatgctgcagatttttgcctcccagctccttcaaactgataagagacgtgtggaacccgaagatctcttcacaggtctgagtaacatgttcaatatgacagttggaggcttcgccttctgtggaatggtcgccggcgctgccatctttggcgctagagatccacacggtattcggcccctagttattggttcgcgcttgaacccagatggtaaaggcatagactatatgcttgcatctgaatctgtagccttggatcaacttggcttcaccggaattcaagacattcagcctggtcaggccgtgataattcctaaaggggggtcaccaattttccgccaagtgcactctcaattgagttacactcctgatatctttgaatattgttacttcagtcgtccggattcagtcatcgatggaatttccgtatacgagagtcgacaaaggatgggcgtaaagctcgcccatactattctgagaactttgggccagacatttatcgagaccattgatattgttgttcctgttccggaatccggcattggattcacactaatatccatcacagtcgctgcattgtcagttgccgaaaccctaaaactaccataccgacacgctctgtcaagaaatcgctatgtcttccgaactttcattatgccaagccaaggaaaacgcgtgaagggtgttcagtcaaagctcaatgctctgaaaagtgaatttaggggcaaaaacgtactgcttgttgatgacaccattgtacgaggtacgaccagtctccaagtatgcaacatagcccgagaagccggcgcaaagaaagtgtattttgcgtgttctgctccaccggtgacgcatcctcacatctacggcattgacttagcaacatcagcagaattggttgcacacaaccgtgaccgcaaagcaattgcttcgtcaatcaacgcggacgacgtcattttcttgaacctagaagacctcgaggctgcgtgtgctgaactcagccctcgcaacaatcaacaattcgagaatggcgtcttctctggcaaatacgtaacgcctctttctcacggatatctcgagaatctggaaagaagccgcagcaagctaagagctgccgagaaccaccatgatggtgcattcgtcacagtcggggacagcgtgacaagacgcttgaccggatatgaggcttcggacatcagtctgcataacgtgaccagtgatttgccacaacattga

SEQ ID NO: 23676 - protein, 545 aa, Muscodor strobelii
  misc_feature: SGI Peptide ID NO. 568058
  misc_feature (2)..(217): Pfam Id: PF00310 Pfam Desc: Glutamine amidotransferases class-II
  misc_feature (274)..(434): Pfam Id: PF00156 Pfam Desc: Phosphoribosyl transferase domain
  misc_feature (73)..(217): Pfam Id: PF00310 Pfam Desc: Glutamine amidotransferases class-II
  misc_feature (2)..(42): Pfam Id: PF00310 Pfam Desc: Glutamine amidotransferases class-II
  misc_feature (327)..(434): Pfam Id: PF00156 Pfam Desc: Phosphoribosyl transferase domain
  misc_feature (1)..(504): NCBI GI: 154277580 Blast Desc: amidophosphoribosyltransferase [Ajellomyces capsulatus NAm1] gi|150413215|gb|EDN08598.1| amidophosphoribosyltransferase [Ajellomyces capsulatus NAm1]
  misc_feature (1)..(504): NCBI GI: 225561041 Blast Desc: amidophosphoribosyltransferase [Ajellomyces capsulatus G186AR]
  misc_feature (1)..(504): NCBI GI: 189199614 Blast Desc: amidophosphoribosyltransferase [Pyrenophora tritici-repentis Pt-1C-BFP] gi|187983243|gb|EDU48731.1| amidophosphoribosyltransferase [Pyrenophora tritici-repentis
  misc_feature (1)..(538): NCBI GI: 169608456 Blast Desc: SNOG_07306 [Phaeosphaeria nodorum SN15] gi|111063652|gb|EAT84772.1| SNOG_07306 [Phaeosphaeria nodorum SN15]
  misc_feature (1)..(504): NCBI GI: 261196299 Blast Desc: amidophosphoribosyltransferase [Ajellomyces dermatitidis SLH14081] gi|239587686|gb|EEQ70329.1| amidophosphoribosyltransferase [Ajellomyces dermatitidis ER-3]
  misc_feature (1)..(507): NCBI GI: 226293222 Blast Desc: amidophosphoribosyltransferase [Paracoccidioides brasiliensis Pb18]
  misc_feature (1)..(507): NCBI GI: 225683839 Blast Desc: amidophosphoribosyltransferase [Paracoccidioides brasiliensis Pb03]
  misc_feature (1)..(507): NCBI GI: 226277947 Blast Desc: amidophosphoribosyltransferase [Paracoccidioides brasiliensis Pb01]
  misc_feature (19)..(504): NCBI GI: 240111790 Blast Desc: amidophosphoribosyltransferase, [Coccidioides posadasii C735 delta SOWgp]
  misc_feature (1)..(504): NCBI GI: 154302366 Blast Desc: BC1G_09967 [Botryotinia fuckeliana B05.10] gi|150855455|gb|EDN30647.1| BC1G_09967 [Botryotinia fuckeliana B05.10]
  misc_feature (1)..(542): SWISSPROT Homolog: EC 2.4.2.14 Amidophosphoribosyltransferase
MCGIVAVISGNVECDAAAVDLHEALYALQHRGQDACGIATSHRSGRIHSCKGKGLASKVFRDGLIIPELPGFMGLGHLRYPTAGTSSNAETQPFYVSSPYGLLFSHNGNLLDTEKLKEYLDCKAHRHINTDSDSEIMLQIFASQLLQTDKRRVEPEDLFTGLSNMFNMTVGGFAFCGMVAGAAIFGARDPHGIRPLVIGSRLNPDGKGIDYMLASESVALDQLGFTGIQDIQPGQAVIIPKGGSPIFRQVHSQLSYTPDIFEYCYFSRPDSVIDGISVYESRQRMGVKLAHTILRTLGQTFIETIDIVVPVPESGIGFTLISITVAALSVAETLKLPYRHALSRNRYVFRTFIMPSQGKRVKGVQSKLNALKSEFRGKNVLLVDDTIVRGTTSLQVCNIAREAGAKKVYFACSAPPVTHPHIYGIDLATSAELVAHNRDRKAIASSINADDVIFLNLEDLEAACAELSPRNNQQFENGVFSGKYVTPLSHGYLENLERSRSKLRAAENHHDGAFVTVGDSVTRRLTGYEASDISLHNVTSDLPQH

SEQ ID NO: 23677 - DNA, 237 bp, Muscodor strobelii
  misc_feature: SGI cDNA ID NO. 568059
  misc_feature: Encodes the peptide sequence at SEQ ID NO 23678
atgggcttgagacgatctacagctccacctccaatgcctctcgataagtcatcagcatctcgtcgacaggacagcttcggttctgatacctcggataaggaaatccgtcgttctagcacctccaaatcgcgttcgcctactgccaacgtctatactcattgcggtcgccatactgatcagtacctcttcggcggccgatcggtgtcggacatctggcgatctttcaagaagaattaa

SEQ ID NO: 23678 - protein, 78 aa, Muscodor strobelii
  misc_feature: SGI Peptide ID NO. 568059
  misc_feature (48)..(77): NCBI GI: 171686328 Blast Desc: protein product [Podospora anserina] gi|170943125|emb|CAP68778.1| protein product [Podospora anserina]
MGLRRSTAPPPMPLDKSSASRRQDSFGSDTSDKEIRRSSTSKSRSPTANVYTHCGRHTDQYLFGGRSVSDIWRSFKKN

SEQ ID NO: 23679 - DNA, 1190 bp, Muscodor strobelii
  misc_feature: SGI EST ID NO. CUFF.55691.0
  misc_feature: Variant of the nucleotide sequence at SEQ ID NO 23677
tttcgaccccaccaagagactcaagtcaatgccagataatggtttctccaatgcggatgcctgtgccggtcgtgagcatggcatgaccaagggtagccggcatctcactcactgagacccaatgggcgatatgcaagtatgactaccaagaccaggcatcaagtagtatataaccaagagctcagctcaggcagcacaacttctgtcctttccccaaaaaagagtcacggatttcaatctgaccagaaagtgtaccgcctctgatcaaaatcgcacctggcgtgcaattcagctaccctggtgggctttctttgaactatatcttcaatcaattacgtcgccgacatctttgttcggctcacacacatttcggatctatcacataatctcgatagtcgtatcctgctatcacccagttacttgaaacagagagctcagacaacaaccctcctatcgactacctcacccaatatcagccatgggcttgagacgatctacagctccacctccaatgcctctcgataagtcatcagcatctcgtcgacaggacagcttcggttctgatacctcggataaggaaatccgtcgttctagcacctccaaatcgcgttcgcctactgccaacgtctatactcattgcggtcgccatactgatcagtacctcttcggcggccgatcggtgtcggacatctggcgatctttcaagaagaattaaacgggttagaagagggtgattgctatgctattatggtcaatgatattatgacagattctttagttcagataccccttgcttttatgttgatctatgtggtagcactagttaccaggtcatcattgtttttaattacaacttccgaggagttcaggttcatagcctatgcacgataggtatttggagattattccaataccatgttgaattaaagaaggaaattaatctattactcctgactgtccgtgttctcttacctttttaattgatcgacgcgaattgataaaacacaattacaataccagttgaggctattccgcccgttagtgtttctaatttcaaaaagattataaccgatatctcaattccttagcaataacatttgtttccttgcgtatctttgtcttgtagcgtttcaatggttcagtggaaattgtcaagatgttgcattgagtgactgatcaactgcatcggg

SEQ ID NO: 23680 - DNA, 4812 bp, Muscodor strobelii
  misc_feature: SGI cDNA ID NO. 568060
  misc_feature: Reduced expression when VOC is produced
  misc_feature: Encodes the peptide sequence at SEQ ID NO 23681
atggcgcccaagcgtggaaggcatgccgatgaggtcttgcaatataatttccaacaatctgatcccgacgatgacaacttcgacccctccgctgacgatgagcggcaacacccgcgaaagagaccacgcggggctcgtaaatcccgacctggtggtggtcgtcgccaaaaccgctatgatgactccgatatcgacgatgacgacgacgacgaactcggtgagagcgaggatgagggttcattccacggcgatgacgacgatgaagaagagtcgcctgtcgccgagggcggccgtcatcggaggaaggtagccaagaagcaggtcaattacaaagagagcaccgatgaggatgaatccgactcagaggaaaaaattgctcgcggctctcccaagagcaagatagtcacgatcaaggtcccaggtggtctacagaagaaacaaacagcacttggcacaaccgccgcgatgggaaccaggagatcaacacgagcccgcacagccgacggagaaggcgacggcgatctagagctagtcgaactgtccaactcgggcaggcatgccagggctgctgctggttccaagagtagaagcccggaagcgattggtcgccgccgagcaacgcgcggcgcaaaaggcctcaaacaacctgctgttcttccagacgtcgaagaggatgtacaggatggagatgatgcaaacgatgatgggtcggtccaggataaaatggatgttgaaatgaatgaagagaccaagtccaatgccaacgaagacgaagaggtcgctgaggatgcgcctattgaaaccgtagagactgtggaagatgccgacgaagacgatgacatgcctatcactcggcgaactcgtggtggtcgccatgctgctggcgctgacgcggacgtggacgcggaagctccggtcgaacctccgccagacgagaaccaagctggatctcgtcgccggctgacccggggatcaaaggctagaaaatcggctcaagaagctagcagcgactttgagccaggcaatgattctgacgacgatgccgatggccaagatgatgggccagacgaggacgatggtgatacaagtccaagtggccgaggtgcaaagtctccatcaaagagccggagatcatccaggaggcctcggcgagatgaggcctctggcgatgaggaacaacttgatagagaagaaatggcagaggagcttgaggatctccgcgaagactctcagtcaaggcgaaccagacggcggcgatcacctgagatcctgttcgagagaaaagagcgacgacgagtgaaaaaggtcgactactccattccccctttaaatcaagccaacttcgagatggaggaagacgagggagctatgccaatttcaacacctgcacgccgtcgcggccgtataactgctctttcctacaactcccgtgctctgcacacccttgccggaccctttggcggcgcatctggagaggggtcacttgctgacggtccttggggcaatggctctggtcagcctgctggtggttatggttctgacagcagtgacgatgaaatgaatgcacgctccggggcagtgcacccacccactacccctcgcggtctttcaagtgcgaacgctcaacttactggcggcgatggtcatggtagcagggtcggcgctttggcacccaatgttggaaagctgaaagatcagaaggcccttgctgacgctgatccgctgggcgtagacttgaccgtggatttcaatcaagtgggaggcatgcaaggccatatcgagcagctgaaagagatggtccaactgccgctcttgtatccagaaatgtttgcaaggtttcatgtcactccaccaagaggtgtgctattccatggtcccccgggaaccggaaagacgcttcttgcccgcgcactcgccaattccattggctttggtggcaaaaaaatcactttctacatgcgaaagggtgcagatgctttgagcaagtgggttggtgaggctgagaaacagttgcgtttactttttgaggaagctcggaaaacccagcccagtataatcttcttcgatgagattgatggactggcccccgtccgttccagcaagcaggaacaaattcacgcttccatcgtttcaaccttgttagcattgatggatggaatggatggtcggggccaagtaatcgtcatcggagctaccaatcgccctgataatatcgacccagctcttcgtcgccctggtcgtttcgatcgcgaattctatttcccacttcctgatgtcgacgcacgaaaagcaatcttggatatccacaccaaagactggggtctgtcagattctttcaagatgtccatggcgaaagacaccaaggggtatggtggtgcagatctgcgcgctttgtgtaccgaggccgctctaaactccattcaacgtacttaccctcagatatacacgtcaaaagagaagctgctcgtcgaccctaaaaaggtgaatgtgcagacgcgcgacttcaccattgcaaagcagaagattatcccctcatctgagcgatcatctgcgtctggtgcagcgcctattccgaaggatgtagagcccctgttgcggcgtcaattcaagtccatcatagagaggatcgataaattctttccacgcaaacccaaagtcacggccttgcaagaagctatgttcgaaccctatgatgacgccgatggcggctttgagcgtgaagagctcgctcaagagtttgacagaagccgcatctttagaccacgacttctactcacggcgatgcaaggtatgggtcaaaattacctagtaaaagctataaagcaccatcttgaaggcgtaagcataatcgacttcgatctggctactattcttggggattctcggtctcccgaacaattcttaacaagtggttttgtcgaagctaagcgccggaaaccaagtgtcatctgcattcccaacgtggaaacatggtactcagtcatccagggtcctgcactcatcgcgttcttgggcatgctaagatcgatcgaccctacggagccaattatggtcctggctactgctgaggttccattcaaagaactcaacgcagacctcagacgtgatctattcggattttcaaaattgaattctttcgaaatcagtcgcccatccaaggaaaatcgtcaagagtatttttcaaggatcattgcccacatccgaaggctgcccaaagactcaccagatacgaatcgcaagaagcgtattctagaggaactgccggttgctcccccacctcccccaaggaaattaacgaaagaggagattcacgaggaagatatccagtatcgaagggcattgaacatgatgaaagttcacttacagcctatcatggatcagattgccaaaaaataccagaaattccgccatccagtcatatccgaggatcagtaccaatatctattagatgaggcagaacccggctacattcggccggatgtcgcggacctccctgcacgtccttttgaacttgccaaagacaaggacgggtaccctggtcttcgtgcgactgagaacaataagtttttctacaatctggacgtcaacatcatcgaaacaagactcgccaacgggtactactggcgaccatatgaatttctgaaggatgtccgaggtttgaagagtgatgccgaagctattggcgacagagcacgctggctaaaagcttcagagcttctccaaaacgtcgaggttgacgttctcgatgttgatgaaaagcttcgaaacaccggtatcaactgggaggctatgtacgagaatcacaagaaacggagggaggagcgagaagagcgagctcgtaaaaagaaagcaatgcagcctgttcctgaagaggctcattctggcctcagcaacggcggccaaaacggcacagatagtgctcacacaaccactgtcgcccaatttcaagtcataggagatctgcccaatgggacgacggaggcatcatcatcaagtggtgcaactaacgggaccaccataccatctagaggtacggacgaagacgtctcgatggctgatgtcagcatactaccaggtcatcttgtatcacccatgcatccaccatcgcagtggccgcgtatgcctccacattctctgaacacgtccacgagggtgaccacgggaggaacagcccaactgtcccatatatcgaccgtccaatccctcccatcagacatgtccccaccaatgccaaacgacaattcaattcgaacttcagatccatctactcggtcttcgaatttcagcacacagttgacgaatggtggtttacatgagcaatccggccttcttgagaatataccagacacgcaatcgtatgctggtgctagtcagaccacatcgagtgatgaaccatggcctcattcgcaagcacatggcatcatgcgagggtatattcaacagcctgcactttcgcaaagttcgcaacatcagatgtccccctcagcgcctagatcttcgcaagcccctagtatggcgaacctgttgaatgatccatcaccagatgagccctcgtcacaatcccaaagcaactcacaacaagttgagttggatgacaattcggctgaccagttcatcgaacacttgatccaaggcagctccggctgcacgatcgaacagctggaacagctcaacagcgttttaatgacgaagctcggtgatactcgaggagaacataatcgttttaagattctgaacactgtcactcgagtttttaacgaaacaatcgaggacattgatcagatgcagcaaattcagccgcagagtcagtaa

SEQ ID NO: 23681 - protein, 1603 aa, Muscodor strobelii
  misc_feature: SGI Peptide ID NO. 568060
  misc_feature (620)..(808): Pfam Id: PF00004 Pfam Desc: ATPase family associated with various cellular activities (AAA)
  misc_feature (621)..(651): Pfam Id: PF07726 Pfam Desc: ATPase family associated with various cellular activities (AAA)
  misc_feature (153)..(1596): NCBI GI: 154285966 Blast Desc: conserved [Ajellomyces capsulatus NAm1] gi|150407419|gb|EDN02960.1| conserved [Ajellomyces capsulatus NAm1]
  misc_feature (153)..(1596): NCBI GI: 239611901 Blast Desc: AAA family ATPase [Ajellomyces dermatitidis ER-3]
  misc_feature (153)..(1596): NCBI GI: 261201754 Blast Desc: AAA family ATPase [Ajellomyces dermatitidis SLH14081] gi|239590188|gb|EEQ72769.1| AAA family ATPase [Ajellomyces dermatitidis SLH14081]
  misc_feature (559)..(1603): NCBI GI: 169784402 Blast Desc: [Aspergillus oryzae RIB40] gi|83775409|dbj|BAE65529.1| protein product [Aspergillus oryzae]
  misc_feature (97)..(1598): NCBI GI: 238845363 Blast Desc: YTA7 protein [Microsporum canis CBS 113480]
  misc_feature (354)..(1344): NCBI GI: 115490997 Blast Desc: ATEG_00040 [Aspergillus terreus NIH2624] gi|114196986|gb|EAU38686.1| ATEG_00040 [Aspergillus terreus NIH2624]
  misc_feature (153)..(1596): NCBI GI: 240277256 Blast Desc: YTA7 protein [Ajellomyces capsulatus H143]
  misc_feature (153)..(1596): NCBI GI: 225558300 Blast Desc: YTA7 protein [Ajellomyces capsulatus G186AR]
  misc_feature (1)..(1057): NCBI GI: 116192029 Blast Desc: CHGG_05732 [Chaetomium globosum CBS 148.51] gi|88181645|gb|EAQ89113.1| CHGG_05732 [Chaetomium globosum CBS 148.51]
  misc_feature (373)..(1598): NCBI GI: 258575569 Blast Desc: UREG_01482 [Uncinocarpus reesii 1704] gi|237902232|gb|EEP76633.1| UREG_01482 [Uncinocarpus reesii 1704]
  misc_feature: Useful for introducing or modulating the production of volatile compounds
MAPKRGRHADEVLQYNFQQSDPDDDNFDPSADDERQHPRKRPRGARKSRPGGGRRQNRYDDSDIDDDDDDELGESEDEGSFHGDDDDEEESPVAEGGRHRRKVAKKQVNYKESTDEDESDSEEKIARGSPKSKIVTIKVPGGLQKKQTALGTTAAMGTRRSTRARTADGEGDGDLELVELSNSGRHARAAAGSKSRSPEAIGRRRATRGAKGLKQPAVLPDVEEDVQDGDDANDDGSVQDKMDVEMNEETKSNANEDEEVAEDAPIETVETVEDADEDDDMPITRRTRGGRHAAGADADVDAEAPVEPPPDENQAGSRRRLTRGSKARKSAQEASSDFEPGNDSDDDADGQDDGPDEDDGDTSPSGRGAKSPSKSRRSSRRPRRDEASGDEEQLDREEMAEELEDLREDSQSRRTRRRRSPEILFERKERRRVKKVDYSIPPLNQANFEMEEDEGAMPISTPARRRGRITALSYNSRALHTLAGPFGGASGEGSLADGPWGNGSGQPAGGYGSDSSDDEMNARSGAVHPPTTPRGLSSANAQLTGGDGHGSRVGALAPNVGKLKDQKALADADPLGVDLTVDFNQVGGMQGHIEQLKEMVQLPLLYPEMFARFHVTPPRGVLFHGPPGTGKTLLARALANSIGFGGKKITFYMRKGADALSKWVGEAEKQLRLLFEEARKTQPSIIFFDEIDGLAPVRSSKQEQIHASIVSTLLALMDGMDGRGQVIVIGATNRPDNIDPALRRPGRFDREFYFPLPDVDARKAILDIHTKDWGLSDSFKMSMAKDTKGYGGADLRALCTEAALNSIQRTYPQIYTSKEKLLVDPKKVNVQTRDFTIAKQKIIPSSERSSASGAAPIPKDVEPLLRRQFKSIIERIDKFFPRKPKVTALQEAMFEPYDDADGGFEREELAQEFDRSRIFRPRLLLTAMQGMGQNYLVKAIKHHLEGVSIIDFDLATILGDSRSPEQFLTSGFVEAKRRKPSVICIPNVETWYSVIQGPALIAFLGMLRSIDPTEPIMVLATAEVPFKELNADLRRDLFGFSKLNSFEISRPSKENRQEYFSRIIAHIRRLPKDSPDTNRKKRILEELPVAPPPPPRKLTKEEIHEEDIQYRRALNMMKVHLQPIMDQIAKKYQKFRHPVISEDQYQYLLDEAEPGYIRPDVADLPARPFELAKDKDGYPGLRATENNKFFYNLDVNIIETRLANGYYWRPYEFLKDVRGLKSDAEAIGDRARWLKASELLQNVEVDVLDVDEKLRNTGINWEAMYENHKKRREEREERARKKKAMQPVPEEAHSGLSNGGQNGTDSAHTTTVAQFQVIGDLPNGTTEASSSSGATNGTTIPSRGTDEDVSMADVSILPGHLVSPMHPPSQWPRMPPHSLNTSTRVTTGGTAQLSHISTVQSLPSDMSPPMPNDNSIRTSDPSTRSSNFSTQLTNGGLHEQSGLLENIPDTQSYAGASQTTSSDEPWPHSQAHGIMRGYIQQPALSQSSQHQMSPSAPRSSQAPSMANLLNDPSPDEPSSQSQSNSQQVELDDNSADQFIEHLIQGSSGCTIEQLEQLNSVLMTKLGDTRGEHNRFKILNTVTRVFNETIEDIDQMQQIQPQSQ

SEQ ID NO: 23682 - DNA, 6001 bp, Muscodor strobelii
  misc_feature: SGI EST ID NO. CUFF.55701.0
  misc_feature: Variant of the nucleotide sequence at SEQ ID NO 23680
gttccccttggcctcgcagctcgactcttccttcacacttcgacagcaatctaatccaacggtgattcatctgcatctcccttcggtattcgacgccggatcatcgcgaggtgggggaagctgctcagcaatgtttggttgaagctgctccaacttgtgcccgtactctgacatccacaatctccaagctcgccgtgcactcctcgaccagccgcatcctagctctgctcgccatccctactgtccaccgcactcgtgtgcctgcccctcgcactatctccttctatccttccatcttcgtcgtcgaacgagaattccaactgcctccatagccccgtcgtcgcctttgcgctttcgagtttcctgatcttccgcctcagccgtgcttcggcttacagaactgcccagtgcgcgttcgtgccaatacgacatggaatagtcggcatattgcctccagagtcaagatcgcaggccagcatccaagctccaatgaagctgtccgagcctgtttcttgccgtcaatagctggtcttccaacgcagcccaccaaatcgtccatagagaatttggttctctacgaggctatctagtcgagtgtcgtggcgacggcgaatcatcctcctcctattcaacccagcagtaaatcgaatagatccatcctcttcgcccataactgagccatggcgcccaagcgtggaaggcatgccgatgaggtcttgcaatataatttccaacaatctgatcccgacgatgacaacttcgacccctccgctgacgatgagcggcaacacccgcgaaagagaccacgcggggctcgtaaatcccgacctggtggtggtcgtcgccaaaaccgctatgatgactccgatatcgacgatgacgacgacgacgaactcggtgagagcgaggatgagggttcattccacggcgatgacgacgatgaagaagagtcgcctgtcgccgagggcggccgtcatcggaggaaggtagccaagaagcaggtcaattacaaagagagcaccgatgaggatgaatccgactcagaggaaaaaattgctcgcggctctcccaagagcaagatagtcacgatcaaggtcccaggtggtctacagaagaaacaaacagcacttggcacaaccgccgcgatgggaaccaggagatcaacacgagcccgcacagccgacggagaaggcgacggcgatctagagctagtcgaactgtccaactcgggcaggcatgccagggctgctgctggttccaagagtagaagcccggaagcgattggtcgccgccgagcaacgcgcggcgcaaaaggcctcaaacaacctgctgttcttccagacgtcgaagaggatgtacaggatggagatgatgcaaacgatgatgggtcggtccaggataaaatggatgttgaaatgaatgaagagaccaagtccaatgccaacgaagacgaagaggtcgctgaggatgcgcctattgaaaccgtagagactgtggaagatgccgacgaagacgatgacatgcctatcactcggcgaactcgtggtggtcgccatgctgctggcgctgacgcggacgtggacgcggaagctccggtcgaacctccgccagacgagaaccaagctggatctcgtcgccggctgacccggggatcaaaggctagaaaatcggctcaagaagctagcagcgactttgagccaggcaatgattctgacgacgatgccgatggccaagatgatgggccagacgaggacgatggtgatacaagtccaagtggccgaggtgcaaagtctccatcaaagagccggagatcatccaggaggcctcggcgagatgaggcctctggcgatgaggaacaacttgatagagaagaaatggcagaggagcttgaggatctccgcgaagactctcagtcaaggcgaaccagacggcggcgatcacctgagatcctgttcgagagaaaagagcgacgacgagtgaaaaaggtcgactactccattccccctttaaatcaagccaacttcgagatggaggaagacgagggagctatgccaatttcaacacctgcacgccgtcgcggccgtataactgctctttcctacaactcccgtgctctgcacacccttgccggaccctttggcggcgcatctggagaggggtcacttgctgacggtccttggggcaatggctctggtcagcctgctggtggttatggttctgacagcagtgacgatgaaatgaatgcacgctccggggcagtgcacccacccactacccctcgcggtctttcaagtgcgaacgctcaacttactggcggcgatggtcatggtagcagggtcggcgctttggcacccaatgttggaaagctgaaagatcagaaggcccttgctgacgctgatccgctgggcgtagacttgaccgtggatttcaatcaagtgggaggcatgcaaggccatatcgagcagctgaaagagatggtccaactgccgctcttgtatccagaaatgtttgcaaggtttcatgtcactccaccaagaggtgtgctattccatggtcccccgggaaccggaaagacgcttcttgcccgcgcactcgccaattccattggctttggtggcaaaaaaatcactttctacatgcgaaagggtgcagatgctttgagcaagtgggttggtgaggctgagaaacagttgcgtttactttttgaggaagctcggaaaacccagcccagtataatcttcttcgatgagattgatggactggcccccgtccgttccagcaagcaggaacaaattcacgcttccatcgtttcaaccttgttagcattgatggatggaatggatggtcggggccaagtaatcgtcatcggagctaccaatcgccctgataatatcgacccagctcttcgtcgccctggtcgtttcgatcgcgaattctatttcccacttcctgatgtcgacgcacgaaaagcaatcttggatatccacaccaaagactggggtctgtcagattctttcaagatgtccatggcgaaagacaccaaggggtatggtggtgcagatctgcgcgctttgtgtaccgaggccgctctaaactccattcaacgtacttaccctcagatatacacgtcaaaagagaagctgctcgtcgaccctaaaaaggtgaatgtgcagacgcgcgacttcaccattgcaaagcagaagattatcccctcatctgagcgatcatctgcgtctggtgcagcgcctattccgaaggatgtagagcccctgttgcggcgtcaattcaagtccatcatagagaggatcgataaattctttccacgcaaacccaaagtcacggccttgcaagaagctatgttcgaaccctatgatgacgccgatggcggctttgagcgtgaagagctcgctcaagagtttgacagaagccgcatctttagaccacgacttctactcacggcgatgcaaggtatgggtcaaaattacctagtaaaagctataaagcaccatcttgaaggcgtaagcataatcgacttcgatctggctactattcttggggattctcggtctcccgaacaattcttaacaagtggttttgtcgaagctaagcgccggaaaccaagtgtcatctgcattcccaacgtggaaacatggtactcagtcatccagggtcctgcactcatcgcgttcttgggcatgctaagatcgatcgaccctacggagccaattatggtcctggctactgctgaggttccattcaaagaactcaacgcagacctcagacgtgatctattcggattttcaaaattgaattctttcgaaatcagtcgcccatccaaggaaaatcgtcaagagtatttttcaaggatcattgcccacatccgaaggctgcccaaagactcaccagatacgaatcgcaagaagcgtattctagaggaactgccggttgctcccccacctcccccaaggaaattaacgaaagaggagattcacgaggaagatatccagtatcgaagggcattgaacatgatgaaagttcacttacagcctatcatggatcagattgccaaaaaataccagaaattccgccatccagtcatatccgaggatcagtaccaatatctattagatgaggcagaacccggctacattcggccggatgtcgcggacctccctgcacgtccttttgaacttgccaaagacaaggacgggtaccctggtcttcgtgcgactgagaacaataagtttttctacaatctggacgtcaacatcatcgaaacaagactcgccaacgggtactactggcgaccatatgaatttctgaaggatgtccgaggtttgaagagtgatgccgaagctattggcgacagagcacgctggctaaaagcttcagagcttctccaaaacgtcgaggttgacgttctcgatgttgatgaaaagcttcgaaacaccggtatcaactgggaggctatgtacgagaatcacaagaaacggagggaggagcgagaagagcgagctcgtaaaaagaaagcaatgcagcctgttcctgaagaggctcattctggcctcagcaacggcggccaaaacggcacagatagtgctcacacaaccactgtcgcccaatttcaagtcataggagatctgcccaatgggacgacggaggcatcatcatcaagtggtgcaactaacgggaccaccataccatctagaggtacggacgaagacgtctcgatggctgatgtcagcatactaccaggtcatcttgtatcacccatgcatccaccatcgcagtggccgcgtatgcctccacattctctgaacacgtccacgagggtgaccacgggaggaacagcccaactgtcccatatatcgaccgtccaatccctcccatcagacatgtccccaccaatgccaaacgacaattcaattcgaacttcagatccatctactcggtcttcgaatttcagcacacagttgacgaatggtggtttacatgagcaatccggccttcttgagaatataccagacacgcaatcgtatgctggtgctagtcagaccacatcgagtgatgaaccatggcctcattcgcaagcacatggcatcatgcgagggtatattcaacagcctgcactttcgcaaagttcgcaacatcagatgtccccctcagcgcctagatcttcgcaagcccctagtatggcgaacctgttgaatgatccatcaccagatgagccctcgtcacaatcccaaagcaactcacaacaagttgagttggatgacaattcggctgaccagttcatcgaacacttgatccaaggcagctccggctgcacgatcgaacagctggaacagctcaacagcgttttaatgacgaagctcggtgatactcgaggagaacataatcgttttaagattctgaacactgtcactcgagtttttaacgaaacaatcgaggacattgatcagatgcagcaaattcagccgcagagtcagtaatcaggaagacctgtccttacggacaaagatatggaattgtaagtagaggggaagtgctggtctgcaaatggtagatgaagaggtcacaactggcacatagagagaatttaccaccacaaggccaagcgtcttgattgtttgctttagcgttcaggaagttgctgtgggcatggctttgtctcttacctgtaatatttctacggatttcgttcaagggaggaagcataagagacaggagacagaaccatgtggataaaacggcgttttttgcttccttccttcatgtcttgtctagcaatgtcgtctgcatataaaatgactgctctccgagacttgagaatatcgccgatgcttgtcatgatcctggaataaagcaagtagatatataccagatcgattctagtacaatcagtagaacgtcattttgatcatcggagtgctgactcaagtcttctgtgcattcgatccaactttgctgatgaagtgtggctggttgggagagcgaggag

SEQ ID NO: 23683 - DNA, 1875 bp, Muscodor strobelii
  misc_feature: SGI cDNA ID NO. 568061
  misc_feature: Elevated expression when VOC is produced
  misc_feature: Encodes the peptide sequence at SEQ ID NO 23684
atggagggtaagttccagagtcttggcgtgactgggatatttgtaaagcccctcgagggcctctcagcggcggaagctgaacggttgcccgccatggaacaccaccacaacaggtcgaccgactcttcggcccatgaccataaggaacccttgggcttccaagatgtcggcttcgaacaccagcatattcgtggtctcgagacctccgccgagacatctttgcaccgtggactcaaggctcgccatatttctatgattgccatcggtggtgctattggaactggcttgctcattggtacgggtagtgcgcttgcccatggtggtccggcgtccatcctgatatcttactctctcatcggctttgtcgtcttccttgtaatggctggtcttggagaaatggctgcgtggctgcctatgtctgctggtttcactggttacgcaactcgattctgtgacccttcgcttggcttcgctctcggctggacttattggctgaagtatatcatcctacccgctaaccaactgactgcggcaactcttgtcattcgatattggctgtctcctgagcgcgttaatcccggagtttgggttgctatcctccttgtactgattgttgccatcaactactttggcgttcgatttttcggtgaatttgagttctggctgtcgagtttcaaagttgtcgtcatcgtcggcgtgatttttgtaacactcattatttcggccggaggtggcccggaccaccacgcacgcggcttcgaatattggcgaaacccaggtgcatttgcgccgtatctcatcggagcatctgcaagcaaaggagctgctgcaacttcccaagttcccctttgggattttgttggaaacaagtcactcgcacagtttattggcttctattccaccttggtcaacgccgtattcgccttcctaggtactgagttggttggtgttaccgtcggcgaggcccaaaatcctcgcaagacgatccctcgcgccatcaagctcaccttcttccgtatcgtcttcttctatgtcattgccattttcctcgtcggcatgtgtgtcccttacactctcaaggaccttacatcttcgaaggtcgccaacgcagctgcgtctcctttcgtcgctgccatcaagcaagccggtattcctgttctggaccatattctgaatgcttcgttgctcctcttcgtgttctccgctgccaactccgatctctacattgccagccgcaccttgtatggtcttgcctccgatggttcagctcccagcatcttccgaaagacggacaaccgtggtgttccaatttacgcactgggcctttcgtccgtctttggcttactcgccttcttgtccgtgaacgaagattccagaaaggttttcacatactttgtcaacgtagtcacagtcttgggtctcatggcatggatctccattcttacgacacacatctggttcgttcgtgcccgaaaggcgcagaacatcaccaacgatgcgatgccctacacagcacccttcggcatctggggctcctatgttgcccttggcgtctgtatcctggtcgccatcaccaagaacttcgatgctttcattccttcgcctggcaaaggtgttctccaggagaaagataaatacgaggcattcatcactggttacatcggcatccccgtctaccttgcactcattttcggccacaaattcttgacaaagagcaagggtgttcgccctcatgaatgtgacttctacaccggcaaggacatcatcgaccgcgaggaggaggaattcctggccatgcaggcctctgagaaagctgctggccactccgacaagggccgctctttctacaatcgctatgtatcttggttgttctaa

SEQ ID NO: 23684 - protein, 624 aa, Muscodor strobelii
  misc_feature: SGI Peptide ID NO. 568061
  misc_feature (82)..(579): Pfam Id: PF00324 Pfam Desc: Amino acid permease
  misc_feature (76)..(624): NCBI GI: 256730705 Blast Desc: NECHADRAFT_102931 [Nectria haematococca mpVI 77-13-4]
  misc_feature (37)..(624): NCBI GI: 226287107 Blast Desc: dicarboxylic amino acid permease [Paracoccidioides brasiliensis Pb18]
  misc_feature (37)..(624): NCBI GI: 226277568 Blast Desc: dicarboxylic amino acid permease [Paracoccidioides brasiliensis Pb01]
  misc_feature (66)..(624): NCBI GI: 115443072 Blast Desc: dicarboxylic amino acid permease [Aspergillus terreus NIH2624] gi|114188212|gb|EAU29912.1| dicarboxylic amino acid permease [Aspergillus terreus NIH2624]
  misc_feature (66)..(624): NCBI GI: 159129301 Blast Desc: amino acid permease (Dip5), [Aspergillus fumigatus A1163]
  misc_feature (66)..(624): NCBI GI: 71001066 Blast Desc: amino acid permease (Dip5) [Aspergillus fumigatus Af293] gi|66852852|gb|EAL93176.1| amino acid permease (Dip5), [Aspergillus fumigatus Af293]
  misc_feature (66)..(624): NCBI GI: 238839570 Blast Desc: dicarboxylic amino acid permease [Microsporum canis CBS 113480]
  misc_feature (46)..(624): NCBI GI: 255935573 Blast Desc: Pc13g03760 [Penicillium chrysogenum Wisconsin 54-1255] gi|211583433|emb|CAP91445.1| Pc13g03760 [Penicillium chrysogenum Wisconsin 54-1255]
  misc_feature (71)..(624): NCBI GI: 145246486 Blast Desc: An12g04180 [Aspergillus niger] gi|134080208|emb|CAK46188.1| protein product [Aspergillus niger]
  misc_feature (67)..(624): NCBI GI: 154285560 Blast Desc: amino acid permease Dip5 [Ajellomyces capsulatus NAm1] gi|150407216|gb|EDN02757.1| amino acid permease Dip5 [Ajellomyces capsulatus NAm1]
  misc_feature: Useful for introducing or modulating the production of volatile compounds
MEGKFQSLGVTGIFVKPLEGLSAAEAERLPAMEHHHNRSTDSSAHDHKEPLGFQDVGFEHQHIRGLETSAETSLHRGLKARHISMIAIGGAIGTGLLIGTGSALAHGGPASILISYSLIGFVVFLVMAGLGEMAAWLPMSAGFTGYATRFCDPSLGFALGWTYWLKYIILPANQLTAATLVIRYWLSPERVNPGVWVAILLVLIVAINYFGVRFFGEFEFWLSSFKVVVIVGVIFVTLIISAGGGPDHHARGFEYWRNPGAFAPYLIGASASKGAAATSQVPLWDFVGNKSLAQFIGFYSTLVNAVFAFLGTELVGVTVGEAQNPRKTIPRAIKLTFFRIVFFYVIAIFLVGMCVPYTLKDLTSSKVANAAASPFVAAIKQAGIPVLDHILNASLLLFVFSAANSDLYIASRTLYGLASDGSAPSIFRKTDNRGVPIYALGLSSVFGLLAFLSVNEDSRKVFTYFVNVVTVLGLMAWISILTTHIWFVRARKAQNITNDAMPYTAPFGIWGSYVALGVCILVAITKNFDAFIPSPGKGVLQEKDKYEAFITGYIGIPVYLALIFGHKFLTKSKGVRPHECDFYTGKDIIDREEEEFLAMQASEKAAGHSDKGRSFYNRYVSWLF

SEQ ID NO: 23685 - DNA, 2203 bp, Muscodor strobelii
  misc_feature: SGI EST ID NO. CUFF.55700.0
  misc_feature: Variant of the nucleotide sequence at SEQ ID NO 23683
gaggaacaccaagaccccttggcgtgcttagtactaaaagataaccccctccctgtcaaggcgtgcagctcctccttctcttttgaagttcgcattgcgcgcgcattcggtttggattcaacttcagttctgtttttgctcgtcgtttggtgtcgtgtgttggccgtttcgcgaatattggtatcgacgttcatgatttaggacctcacaacatcgtgctgctacgaatacgagtaagcagcagtattcacaccaagtagcgagggcctctcagcggcggaagctgaacggttgcccgccatggaacaccaccacaacaggtcgaccgactcttcggcccatgaccataaggaacccttgggcttccaagatgtcggcttcgaacaccagcatattcgtggtctcgagacctccgccgagacatctttgcaccgtggactcaaggctcgccatatttctatgattgccatcggtggtgctattggaactggcttgctcattggtacgggtagtgcgcttgcccatggtggtccggcgtccatcctgatatcttactctctcatcggctttgtcgtcttccttgtaatggctggtcttggagaaatggctgcgtggctgcctatgtctgctggtttcactggttacgcaactcgattctgtgacccttcgcttggcttcgctctcggctggacttattggctgaagtatatcatcctacccgctaaccaactgactgcggcaactcttgtcattcgatattggctgtctcctgagcgcgttaatcccggagtttgggttgctatcctccttgtactgattgttgccatcaactactttggcgttcgatttttcggtgaatttgagttctggctgtcgagtttcaaagttgtcgtcatcgtcggcgtgatttttgtaacactcattatttcggccggaggtggcccggaccaccacgcacgcggcttcgaatattggcgaaacccaggtgcatttgcgccgtatctcatcggagcatctgcaagcaaaggagctgctgcaacttcccaagttcccctttgggattttgttggaaacaagtcactcgcacagtttattggcttctattccaccttggtcaacgccgtattcgccttcctaggtactgagttggttggtgttaccgtcggcgaggcccaaaatcctcgcaagacgatccctcgcgccatcaagctcaccttcttccgtatcgtcttcttctatgtcattgccattttcctcgtcggcatgtgtgtcccttacactctcaaggaccttacatcttcgaaggtcgccaacgcagctgcgtctcctttcgtcgctgccatcaagcaagccggtattcctgttctggaccatattctgaatgcttcgttgctcctcttcgtgttctccgctgccaactccgatctctacattgccagccgcaccttgtatggtcttgcctccgatggttcagctcccagcatcttccgaaagacggacaaccgtggtgttccaatttacgcactgggcctttcgtccgtctttggcttactcgccttcttgtccgtgaacgaagattccagaaaggttttcacatactttgtcaacgtagtcacagtcttgggtctcatggcatggatctccattcttacgacacacatctggttcgttcgtgcccgaaaggcgcagaacatcaccaacgatgcgatgccctacacagcacccttcggcatctggggctcctatgttgcccttggcgtctgtatcctggtcgccatcaccaagaacttcgatgctttcattccttcgcctggcaaaggtgttctccaggagaaagataaatacgaggcattcatcactggttacatcggcatccccgtctaccttgcactcattttcggccacaaattcttgacaaagagcaagggtgttcgccctcatgaatgtgacttctacaccggcaaggacatcatcgaccgcgaggaggaggaattcctggccatgcaggcctctgagaaagctgctggccactccgacaagggccgctctttctacaatcgctatgtatcttggttgttctaagcgtgcagatatcaacatcaaaatcaatatcagcgtgtatatgatggaacgagtagaagattttggacatctatagatagagggggctctctaacaaataaattctcttcgtattttcaac

SEQ ID NO: 23686 - DNA, 1281 bp, Muscodor strobelii
  misc_feature: SGI cDNA ID NO. 568062
  misc_feature: Reduced expression when VOC is produced
  misc_feature: Encodes the peptide sequence at SEQ ID NO 23687
atggtgtcgacggcctcagacgccagtacgtctggatggcgagatggggtcgaatggaaacagcaggtctggagtaggtggatggagcccgttgttatcgtcatcgtcctcctgacagccatgtacgctacgagacggaagaactactctatattccgcaagtcatccgacgaaagcgcccagtccctgctcggcgccagctcacagcgatcatccgacagtgattgggacgacgcctctccctcatacccccccaagacacgtcgaatcttcggccgctgggtcgttaagacgcccaactccagtcgattcgcccgccactaccactcgaggatcctgcagaagttcccctttctcatcgagatgttctactgggccattgccctggtggtctatcgtggcgtcttgttgatcaccaaccacttttatggtggcagtcagggtctatgggacatcgcccagggccacggcacctctatcctgaataccgaggcatgggtcacaggctatggcggagtcgaaagcaacgctagatacgtcgaatggaggatccagcagttctttttgaccggtgaagctgctggggactggagtggtactgctctccagattctgaaccggtgctatgctctcattcacatcccaggaaccgcagctttcatcgcctactactacggcaccgccccaacccacagacgattttgcatagcccggcgcactctgtcattgtccaactttgtagcatttgttgtcttcacattctacccctgcatgcctccacgtcttttgcccaaagagtacggctttgtcgacacggtggaagccgaggacgccggcagtgtctggcaaaaaggagattacgtcaacgccctcgccgccatgcccagcatgcactttggttacgcatttgcaatcggttgcaccttcgtctacgaaagtggattcttgcgtcatttgcatcccctcggcgaatcgatggacgatgacctcgaagtcaatggcattctcaaaccagaggagaagagtggagacgtgcctcgatctgtcgtctcgcgcatgttccttctattcgtcggcattttctacccagcgttgattctgctcgctatcctcgccacggccaaccactacgtcctcgatgcctttgccggtgcgctagtggtcggtttctcattcctcaccaaccggttcctgctgaacttcctgatctttgaggactggctcctatgggctttgcggctggagaagcccgcgcctacgacgggatacgtcccgcggtaa

SEQ ID NO: 23687 - protein, 426 aa, Muscodor strobelii
  misc_feature: SGI Peptide ID NO. 568062
  misc_feature (1)..(426): NCBI GI: 145609079 Blast Desc: MGG_13347 [Magnaporthe grisea 70-15] gi|145016518|gb|EDK00948.1| MGG_13347 [Magnaporthe grisea 70-15]
  misc_feature (1)..(422): NCBI GI: 156048420 Blast Desc: SS1G_08941 [Sclerotinia sclerotiorum 1980] gi|154693338|gb|EDN93076.1| SS1G_08941 [Sclerotinia sclerotiorum 1980]
  misc_feature (27)..(422): NCBI GI: 154300636 Blast Desc: BC1G_10906 [Botryotinia fuckeliana B05.10] gi|150856513|gb|EDN31705.1| BC1G_10906 [Botryotinia fuckeliana B05.10]
  misc_feature (32)..(422): NCBI GI: 169618928 Blast Desc: SNOG_12656 [Phaeosphaeria nodorum SN15] gi|160703708|gb|EAT79954.2| SNOG_12656 [Phaeosphaeria nodorum SN15]
  misc_feature (29)..(422): NCBI GI: 189210531 Blast Desc: integral membrane protein [Pyrenophora tritici-repentis Pt-1C-BFP] gi|187977690|gb|EDU44316.1| integral membrane protein [Pyrenophora tritici-repentis Pt-1C-BFP]
  misc_feature (27)..(422): NCBI GI: 225559513 Blast Desc: integral membrane protein [Ajellomyces capsulatus G186AR]
  misc_feature (82)..(422): NCBI GI: 256723202 Blast Desc: NECHADRAFT_16413 [Nectria haematococca mpVI 77-13-4]
  misc_feature (27)..(422): NCBI GI: 119483702 Blast Desc: NFIA_094770 [Neosartorya fischeri NRRL 181] gi|119409910|gb|EAW19857.1| conserved [Neosartorya fischeri NRRL 181]
  misc_feature (27)..(422): NCBI GI: 121715091 Blast Desc: conserved [Aspergillus clavatus NRRL 1] gi|119403311|gb|EAW13729.1| conserved [Aspergillus clavatus NRRL 1]
  misc_feature (32)..(422): NCBI GI: 70983097 Blast Desc: conserved [Aspergillus fumigatus Af293] gi|66844701|gb|EAL85038.1| conserved [Aspergillus fumigatus Af293] gi|159123962|gb|EDP49081.1| conserved [Aspergillus A1163]
  misc_feature: Useful for introducing or modulating the production of volatile compounds
MVSTASDASTSGWRDGVEWKQQVWSRWMEPVVIVIVLLTAMYATRRKNYSIFRKSSDESAQSLLGASSQRSSDSDWDDASPSYPPKTRRIFGRWVVKTPNSSRFARHYHSRILQKFPFLIEMFYWAIALVVYRGVLLITNHFYGGSQGLWDIAQGHGTSILNTEAWVTGYGGVESNARYVEWRIQQFFLTGEAAGDWSGTALQILNRCYALIHIPGTAAFIAYYYGTAPTHRRFCIARRTLSLSNFVAFVVFTFYPCMPPRLLPKEYGFVDTVEAEDAGSVWQKGDYVNALAAMPSMHFGYAFAIGCTFVYESGFLRHLHPLGESMDDDLEVNGILKPEEKSGDVPRSVVSRMFLLFVGIFYPALILLAILATANHYVLDAFAGALVVGFSFLTNRFLLNFLIFEDWLLWALRLEKPAPTTGYVPR

SEQ ID NO: 23688 - DNA, 1754 bp, Muscodor strobelii
  misc_feature: SGI EST ID NO. CUFF.56034.0
  misc_feature: Variant of the nucleotide sequence at SEQ ID NO 23686
tatctcgctccaatgccaacctaaattacctaagtggactcctcttcaagaccttttcatgcggcgacgttgtacgacttctcccatctcgaatttcattttactgtacatgtcttgtttacgactgttgtaattcccacaactcccattctgcggtaccgtcgttcgtgcaccacctcgcgctgctggttttgacgtgcagattttggtgtttcccgtcgcatccaccagcgagcacgcgacctcgaacgtcgcaagccgactgccacgatggtgtcgacggcctcagacgccagtacgtctggatggcgagatggggtcgaatggaaacagcaggtctggagtaggtggatggagcccgttgttatcgtcatcgtcctcctgacagccatgtacgctacgagacggaagaactactctatattccgcaagtcatccgacgaaagcgcccagtccctgctcggcgccagctcacagcgatcatccgacagtgattgggacgacgcctctccctcatacccccccaagacacgtcgaatcttcggccgctgggtcgttaagacgcccaactccagtcgattcgcccgccactaccactcgaggatcctgcagaagttcccctttctcatcgagatgttctactgggccattgccctggtggtctatcgtggcgtcttgttgatcaccaaccacttttatggtggcagtcagggtctatgggacatcgcccagggccacggcacctctatcctgaataccgaggcatgggtcacaggctatggcggagtcgaaagcaacgctagatacgtcgaatggaggatccagcagttctttttgaccggtgaagctgctggggactggagtggtactgctctccagattctgaaccggtgctatgctctcattcacatcccaggaaccgcagcgtaagtttcatactactaactcttagtggcagagaacatgctattgacctcgtccagtttcatcgcctactactacggcaccgccccaacccacagacgattttgcatagcccggcgcactctgtcattgtccaactttgtagcatttgttgtcttcacattctacccctgcatgcctccacgtcttttgcccaaagagtacggctttgtcgacacggtggaagccgaggacgccggcagtgtctggcaaaaaggagattacgtcaacgccctcgccgccatgcccagcatgcactttggttacgcatttgcaatcggttgcaccttcgtctacgaaagtggattcttgcgtcatttgcatcccctcggcgaatcgatggacgatgacctcgaagtcaatggcattctcaaaccagaggagaagagtggagacgtgcctcgatctgtcgtctcgcgcatgttccttctattcgtcggcattttctacccagcgttgattctgctcgctatcctcgccacggccaaccactacgtcctcgatgcctttgccggtgcgctagtggtcggtttctcattcctcaccaaccggttcctgctgaacttcctgatctttgaggactggctcctatgggctttgcggctggagaagcccgcgcctacgacgggatacgtcccgcggtaatgatagacatgatgagatcccgacatgaacatagtatttgggaaatgcattggggcattgacaaaagttaacatagggtaatttaatagcgtccatacgtggctaatagaagacttcattttcatccatttctgtgctttcttcgc

SEQ ID NO: 23689 - DNA, 882 bp, Muscodor strobelii
  misc_feature: SGI cDNA ID NO. 568063
  misc_feature: Encodes the peptide sequence at SEQ ID NO 23690
atgccaacttacgttgtttctggagcctcccgcggtctgggttatgcctttgtcaagctgttagcctcgaatttctcgaacaccgttatcggccttgcaagagacaagaaagccacagaggaccgtcttaagaaagatggaatacaagacgtacatataatctctgttgacatcaccgacaatacagctttgaagcttgctgctgaggaaagccgacgtattgtcggcaacaaggggattgatgtactcatcaacaacgctgcatatgtcagcgcgtcaacagctctgaagtcgctcagcgattttgaagatgatgatgctggggagcttctagcggacacccacaagagtttcagtatcaacgtgttagggatagttcagaccattttcgcattcttgcctctggtccaagacggaacacttaagaaggtcgtatccatatcaagtgggatgagtgatcttgatttcattaacgaggtacagctgtccaacgcagcgccatatgcatctagcaaggctgctataaatgtcttcatgtcaaagtttcaggcgtcttaccgagatcaaggaatactcttcatgtccctgtgccccggactggtcgatacagccgagaagacactcgagcgcaagttggcaccgttcttgtatttgaatcttggaactaagccaaacaaagctaacctgatatcagtatccaatgaagactcaaaacgttttcaagccattaacgcgagatttcagaactacgcaccgggctcccttccgatggcgccccaagaggcggcacagaagtgtcttgctgcgattgatcaatcatcgttgtctaagggatatgggggatcatttctcagccataatggaacgaagcgttggatgtga

SEQ ID NO: 23690 - protein, 293 aa, Muscodor strobelii
  misc_feature: SGI Peptide ID NO. 568063
  misc_feature (2)..(187): Pfam Id: PF00106 Pfam Desc: short chain dehydrogenase
  misc_feature (2)..(88): Pfam Id: PF00106 Pfam Desc: short chain dehydrogenase
  misc_feature (1)..(293): NCBI GI: 255941240 Blast Desc: Pc16g10830 [Penicillium chrysogenum Wisconsin 54-1255] gi|211586012|emb|CAP93753.1| Pc16g10830 [Penicillium chrysogenum Wisconsin 54-1255]
  misc_feature (1)..(293): NCBI GI: 256730666 Blast Desc: NECHADRAFT_29697 [Nectria haematococca mpVI 77-13-4]
  misc_feature (1)..(293): NCBI GI: 46114388 Blast Desc: FG03036.1 [Gibberella zeae PH-1]
  misc_feature (1)..(293): NCBI GI: 242772417 Blast Desc: short chain dehydrogenase (AtsC), [Talaromyces stipitatus ATCC 10500] gi|218721654|gb|EED21072.1| short chain dehydrogenase (AtsC), [Talaromyces stipitatus ATCC 10500]
  misc_feature (1)..(293): NCBI GI: 242779300 Blast Desc: short-chain dehydrogenases/reductase, [Talaromyces stipitatus ATCC 10500] gi|218723035|gb|EED22453.1| short-chain dehydrogenases/reductase, [Talaromyces stipitatus ATCC 10500]
  misc_feature (1)..(293): NCBI GI: 119473497 Blast Desc: short chain dehydrogenase (AtsC), [Neosartorya fischeri NRRL 181] gi|119406777|gb|EAW16727.1| short chain dehydrogenase (AtsC), [Neosartorya fischeri NRRL 181]
  misc_feature (1)..(293): NCBI GI: 256724719 Blast Desc: NECHADRAFT_48385 [Nectria haematococca mpVI 77-13-4]
  misc_feature (1)..(293): NCBI GI: 67540978 Blast Desc: AN6659.2 [Aspergillus nidulans FGSC A4] gi|40738998|gb|EAA58188.1| AN6659.2 [Aspergillus nidulans FGSC A4] gi|259480241|tpe|CBF71192.1| TPA: short chain dehydrogenase
  misc_feature (1)..(293): NCBI GI: 226281597 Blast Desc: conserved [Paracoccidioides brasiliensis Pb01]
  misc_feature (1)..(293): NCBI GI: 189201619 Blast Desc: conserved [Pyrenophora tritici-repentis Pt-1C-BFP] gi|187984245|gb|EDU49733.1| conserved [Pyrenophora tritici-repentis Pt-1C-BFP]
  misc_feature (5)..(199): SWISSPROT Homolog: EC 1.1.1.63 Testosterone 17-beta-dehydrogenase
  misc_feature (5)..(199): SWISSPROT Homolog: EC 1.1.1.62 Estradiol 17-beta-dehydrogenase
MPTYVVSGASRGLGYAFVKLLASNFSNTVIGLARDKKATEDRLKKDGIQDVHIISVDITDNTALKLAAEESRRIVGNKGIDVLINNAAYVSASTALKSLSDFEDDDAGELLADTHKSFSINVLGIVQTIFAFLPLVQDGTLKKVVSISSGMSDLDFINEVQLSNAAPYASSKAAINVFMSKFQASYRDQGILFMSLCPGLVDTAEKTLERKLAPFLYLNLGTKPNKANLISVSNEDSKRFQAINARFQNYAPGSLPMAPQEAAQKCLAAIDQSSLSKGYGGSFLSHNGTKRWM

SEQ ID NO: 23691 - DNA, 762 bp, Muscodor strobelii
  misc_feature: SGI cDNA ID NO. 568064
  misc_feature: Encodes the peptide sequence at SEQ ID NO 23692
atggattttacagcaacaggcaaaggccttatgtttgtgcattcgaaaatcataaaaccagatatactcagcgaatcgcaattcctgaaatggtacgatgaagaccatattcccgaggcgctccgcacctcaggaatgaattcaggatatcggtgtctggacatcgagcacgtcaaaggcaacaaagttgagcgaccatacctctgtctttaccaaattgatgatctcgcattcctgcgcacgacggaattccaaagcatcggagtcacgagcccgttgctaccgacgtcggacccgatttttgaatttgttgattttgatgtgcggtatgctaagttggttgagacttatgatccgacgaataagggacctggaaagacaggatccttgctcgttgcgattctgcaagcggggcctgaaatgaccgacgaggagatagataggtggtataggggagagcatctcgagggtttcaacggactatcagggtttctacgggcaacgcggtacgagacggttttcgggcggggcaatcggcacttcggcgagcagcagagaatgtcgggtaacttgtcggtttccaagcacattacgatatatgaatttgagacgcccgacattgatatgccaactgtgctcaagaagggcggaacagattggacaaagaaggtcatcgctgggtgtagttttatcacctcgcctgtattccaggtggcgcggttgcatggggacaaaactcttcatcatggcgttacgatctaa

SEQ ID NO: 23692 - protein, 253 aa, Muscodor strobelii
  misc_feature: SGI Peptide ID NO. 568064
  misc_feature (2)..(251): NCBI GI: 261358017 Blast Desc: conserved [Verticillium albo-atrum VaMs.102]
  misc_feature (1)..(245): NCBI GI: 169614093 Blast Desc: SNOG_10181 [Phaeosphaeria nodorum SN15] gi|111061396|gb|EAT82516.1| SNOG_10181 [Phaeosphaeria nodorum SN15]
  misc_feature (7)..(246): NCBI GI: 189200270 Blast Desc: conserved [Pyrenophora tritici-repentis Pt-1C-BFP] gi|187983571|gb|EDU49059.1| conserved [Pyrenophora tritici-repentis Pt-1C-BFP]
  misc_feature (8)..(166): NCBI GI: 169612906 Blast Desc: SNOG_09581 [Phaeosphaeria nodorum SN15] gi|160702608|gb|EAT82846.2| SNOG_09581 [Phaeosphaeria nodorum SN15]
  misc_feature (5)..(131): NCBI GI: 145231595 Blast Desc: An02g01340 [Aspergillus niger] gi|134056176|emb|CAK96351.1| protein product [Aspergillus niger]
  misc_feature (9)..(170): NCBI GI: 225682820 Blast Desc: 3-oxoadipate enol-lactonase [Paracoccidioides brasiliensis Pb03]
  misc_feature (6)..(244): NCBI GI: 169626583 Blast Desc: SNOG_16591 [Phaeosphaeria nodorum SN15] gi|111071532|gb|EAT92624.1| SNOG_16591 [Phaeosphaeria nodorum SN15]
  misc_feature (9)..(175): NCBI GI: 226285332 Blast Desc: conserved [Paracoccidioides brasiliensis Pb01]
  misc_feature (21)..(227): NCBI GI: 239613369 Blast Desc: alpha/beta hydrolase [Ajellomyces dermatitidis ER-3]
  misc_feature (21)..(226): NCBI GI: 261194825 Blast Desc: alpha/beta hydrolase [Ajellomyces dermatitidis SLH14081] gi|239588355|gb|EEQ70998.1| alpha/beta hydrolase [Ajellomyces dermatitidis SLH14081]
MDFTATGKGLMFVHSKIIKPDILSESQFLKWYDEDHIPEALRTSGMNSGYRCLDIEHVKGNKVERPYLCLYQIDDLAFLRTTEFQSIGVTSPLLPTSDPIFEFVDFDVRYAKLVETYDPTNKGPGKTGSLLVAILQAGPEMTDEEIDRWYRGEHLEGFNGLSGFLRATRYETVFGRGNRHFGEQQRMSGNLSVSKHITIYEFETPDIDMPTVLKKGGTDWTKKVIAGCSFITSPVFQVARLHGDKTLHHGVTI

SEQ ID NO: 23693 - DNA, 1836 bp, Muscodor strobelii
  misc_feature: SGI EST ID NO. CUFF.55745.0
  misc_feature: Variant of the nucleotide sequence at SEQ ID NO 23691
cggatataaacggataatcatacccgatagggatatgcgtccgaaactccaaagaagtgaactgtcgagattacatacatataacaagtgtcgtatctcttacaactaacaataaggcaaaggttgagaatcgcgcgaaatcaaacataatacagcacaggccccgttctccacacaccctgccatcgcatcgtggtcaagatcagtccccatcaacgcacatacaagatggattttacagcaacaggcaaaggccttatgtttgtgcattcgaaaatcataaaaccagatatactcagcgaatcgcaattcctgaaatggtacgatgaagaccatattcccgaggcgctccgcacctcaggaatgaattcaggatatcggtgtctggacatcgagcacgtcaaaggcaacaaagttgagcgaccatacctctgtctttaccaaattgatgatctcgcattcctgcgcacgacggaattccaaagcatcggagtcacgagcccgttgctaccgacgtcggacccgatttttgaatttgttgattttgatgtgcggtatgctaagttggttgagacttatgatccgacgaataagggacctggaaagacaggatccttgctcgttgcgattctgcaagcggggcctgaaatgaccgacgaggagatagataggtggtataggggagagcatctcgagggtttcaacggactatcagggtttctacgggcaacgcggtacgagacggttttcgggcggggcaatcggcacttcggcgagcagcagagaatgtcgggtaacttgtcggtttccaagcacattacgatatatgaatttgagacgcccgacattgatatgccaactgtgctcaagaagggcggaacagattggacaaagaaggtcatcgctgggtgtagttttatcacctcgcctgtattccaggtggcgcggttgcatggggacaaaactcttcatcatggcgttacgatctaatctaaataagtggccgagtttcccattgtctttatttacttcaaaatacggatgaacgagcgcgattcaattgccaatacataaatgcccaaatgcagctgtagctggaattacaactcggttgcggcggtaggaaacgttggctgtaactcttggcgattccaacaacatttggctcccagtgcacgatgcgacaacggtgttcaacgcaatgctaatcaactcaactcttgccacgcactacgcctttgcgaatggttctcgatcaccttcgccttaataatctctgcggaagtaaataactgcctgcttggttgaagtaaggcgaggttactcaatgctcttgttgcgttgaaggtacaatttcgtatgctgtaaccgtgaggaggactcggtttaaccaccgtgaagtcattgataagaacaactctgtcttactcggtataccggcgcagccttaactgttactccgatgccgagtacacctcgaaatgggcgccagaaatgagaggatctagatccggatcgtacttgtcgataccctcgatggaagcgtatttgtgaatgagatagcacatgttgttgtacgcactatgaagcaatcgccattagtccttattaagtctgcgactctgttccatgatctgagtggagctcttacgtcttccttctagcacttccgggtaccatagtcgaatagtccatcgcaaccttgatgctgtagagcctattcctatcatcaaactcctcgacgggctcagctggagggaagtgctttacgtatgcagcgatataagtgcttgagcgaaggtcctttgggtcctttgagcgaaaaaatgtacttct

SEQ ID NO: 23694 - DNA, 1242 bp, Muscodor strobelii
  misc_feature: SGI cDNA ID NO. 568065
  misc_feature: Encodes the peptide sequence at SEQ ID NO 23695
atggcatcatctgctctcgaacatcatgagccctccctcgaaaccgtatcgggcaaggccagattgttggaacgtgatgatattgagccaattcatcaagtcgagggagacgatgagactacagcagatgcgtctacaagcatccagaaggtgaccgctcagatgaaggggctctccccgatggacaaagcggtaattgaggctctacccagcggtgtttatttctcttcggtagagaggtttggtaaaagcgaatggactattactggaaaggtcacggcgcacaacgctaacgggtgcgagcaatgcttcttcctcaaggtcgcaatcggagaacatggtcgctcgttgctcaaaggcgaatttgagtcatcaaagatgatctatggtgttacgccagacttcatccccaaacccgttggctatgggcgatacagggctcatgacctggaggcctacttctatatgtcccagttcatcgatatggacttcatcacggctccagatccagataaattaatgaaccgggtggctcagctacataagaatagccaatcgccaacaggcaagttcggatttcccgtcacgacatacgatggcaatataccacatactgtcgagtgggagagcacatgggaagtgttcttccgcaacctgtttctgggcgcctgtgctctcgatgctgccaacaatgtctactgggccgagcttgatcgcgctgtacgtcggattgccgatgctgtcattcctagactgcttggatcattgcggcggtgtgacactcacgagcccatcaagccctgtttgatacatggcgatctgtgggagggtaatcggggcatctgtaaggaaactggtggtagcatggtctacgacgctagctgctactttgcacacaatgagatggaattcggcaattggagaagtgaactaagtacattttttcgctcaaaggacccaaaggaccttcgctcaagcacttatatcgctgcatacgtaaagcacttccctccagctgagcccgtcgaggagtttgatgataggaataggctctacagcatcaaggttgcgatggactattcgactatggtacccggaagtgctagaaggaagactgcgtacaacaacatgtgctatctcattcacaaatacgcttccatcgagggtatcgacaagtacgatccggatctagatcctctcatttctggcgcccatttcgaggtgtactcggcatcggagtaa

SEQ ID NO: 23695 - protein, 413 aa, Muscodor strobelii
  misc_feature: SGI Peptide ID NO. 568065
  misc_feature (16)..(406): NCBI GI: 116214451 Blast Desc: CHGG_11066 [Chaetomium globosum CBS 148.51] gi|88175421|gb|EAQ82890.1| CHGG_11066 [Chaetomium globosum CBS 148.51]
  misc_feature (72)..(404): NCBI GI: 171678070 Blast Desc: protein product [Podospora anserina] gi|170937104|emb|CAP61762.1| protein product [Podospora anserina]
  misc_feature (55)..(388): NCBI GI: 145228563 Blast Desc: An01g01490 [Aspergillus niger] gi|134054681|emb|CAK43522.1| protein product [Aspergillus niger]
  misc_feature (59)..(384): NCBI GI: 116206070 Blast Desc: CHGG_02328 [Chaetomium globosum CBS 148.51] gi|88182925|gb|EAQ90393.1| CHGG_02328 [Chaetomium globosum CBS 148.51]
  misc_feature (54)..(390): NCBI GI: 240110347 Blast Desc: CPC735_063790 [Coccidioides posadasii C735 delta SOWgp]
  misc_feature (48)..(371): NCBI GI: 258563734 Blast Desc: [Uncinocarpus reesii 1704] gi|237908119|gb|EEP82520.1| [Uncinocarpus reesii 1704]
  misc_feature (54)..(390): NCBI GI: 119180471 Blast Desc: CIMG_08864 [Coccidioides immitis RS]
  misc_feature (61)..(354): NCBI GI: 145256231 Blast Desc: An10g00710 [Aspergillus niger CBS 513.88] gi|134078637|emb|CAK40510.1| protein product [Aspergillus niger]
  misc_feature (56)..(385): NCBI GI: 261356147 Blast Desc: conserved [Verticillium albo-atrum VaMs.102]
  misc_feature (57)..(363): NCBI GI: 169765035 Blast Desc: [Aspergillus oryzae RIB40] gi|83764843|dbj|BAE54987.1| protein product [Aspergillus oryzae]
MASSALEHHEPSLETVSGKARLLERDDIEPIHQVEGDDETTADASTSIQKVTAQMKGLSPMDKAVIEALPSGVYFSSVERFGKSEWTITGKVTAHNANGCEQCFFLKVAIGEHGRSLLKGEFESSKMIYGVTPDFIPKPVGYGRYRAHDLEAYFYMSQFIDMDFITAPDPDKLMNRVAQLHKNSQSPTGKFGFPVTTYDGNIPHTVEWESTWEVFFRNLFLGACALDAANNVYWAELDRAVRRIADAVIPRLLGSLRRCDTHEPIKPCLIHGDLWEGNRGICKETGGSMVYDASCYFAHNEMEFGNWRSELSTFFRSKDPKDLRSSTYIAAYVKHFPPAEPVEEFDDRNRLYSIKVAMDYSTMVPGSARRKTAYNNMCYLIHKYASIEGIDKYDPDLDPLISGAHFEVYSASE

SEQ ID NO: 23696 - DNA, 2575 bp, Muscodor strobelii
  misc_feature: SGI EST ID NO. CUFF.55746.2
  misc_feature: Variant of the nucleotide sequence at SEQ ID NO 23694
attcctgctttatcgtcaactccacgttggtttcttaaaactgatttcagaagagtgtggaatatccaattaaagctatcccatatttcatactatgatggcaatactttgcactgcatccgccaggttgcccggggcgctaaatgcattccagtttgactatcaccaacaatgacagtaaagccgtcgcctatccaacagggtgtccagccagcacggagctgcaacatatctttaggtcatcagaatgctaaatgttctcgttctgaagcctgcaaagcttcttccaaagtgcatgataccttttgattgattcaaaatcgaattctcgttcttctgatcgtttgaagcgtgtccttgctatacagcgttgtattgagtccggatggcatcatctgctctcgaacatcatgagccctccctcgaaaccgtatcgggcaaggccagattgttggaacgtgatgatattgagccaattcatcaagtcgagggagacgatgagactacagcagatgcgtctacaagcatccagaaggtgaccgctcagatgaaggggctctccccgatggacaaagcggtaattgagggtaatgaatcggctctagctgctcgggatctttcttaatattatagtcattgtgaatgaacgggactcgttactaagtttttattctagctctacccagcggtgtttatttctcttcggtagagaggtttggtaaaagcgaatggactattactggaaaggtcacggcgcacaacgctaacgggtgcgagcaatgcttcttcctcaaggtcgcaatcggagaacatggtcgctcgttgctcaaaggcgaatttgagtcatcaaagatgatctatggtgttacgccagacttcatccccaaacccgttggctatgggcgatacagggctcatgacctggaggcctacttctatatgtcccagttcatcgatatggacttcatcacggctccagatccagataaattaatgaaccgggtggctcagctacataagaatagccaatcgccaacaggcaagttcggatttcccgtcacgacatacgatggcaatataccacatactgtcgagtgggagagcacatgggaagtgttcttccgcaacctgtttctgggcgcctgtgctctcgatgctgccaacaatgtctactgggccgagcttgatcgcgctgtacgtcggattgccgatgctgtcattcctagactgcttggatcattgcggcggtgtgacactcacgagcccatcaagccctgtttgatacatggcgatctgtgggagggtaatcggggcatctgtaaggaaactggtggtagcatggtctacgacgctagctgctactttgcacacaatgagatggaattcggcaattggagaagtgaactaagtacattttttcgctcaaaggacccaaaggaccttcgctcaagcacttatatcgctgcatacgtaaagcacttccctccagctgagcccgtcgaggagtttgatgataggaataggctctacagcatcaaggttgcgatggactattcgactatggtacccggaagtgctagaaggaagactgcgtacaacaacatgtgctatctcattcacaaatacgcttccatcgagggtatcgacaagtacgatccggatctagatcctctcatttctggcgcccatttcgaggtgtactcggcatcggagtaacagttaaggctgcgccggtataccgagtaagacagagttgttcttatcaatgacttcacggtggttaaaccgagtcctcctcacggttacagcatacgaaattgtaccttcaacgcaacaagagcattgagtaacctcgccttacttcaaccaagcaggcagttatttacttccgcagagattattaaggcgaaggtgatcgagaaccattcgcaaaggcgtagtgcgtggcaagagttgagttgattagcattgcgttgaacaccgttgtcgcatcgtgcactgggagccaaatgttgttggaatcgccaagagttacagccaacgtttcctaccgccgcaaccgagttgtaattccagctacagctgcatttgggcatttatgtattggcaattgaatcgcgctcgttcatccgtattttgaagtaaataaagacaatgggaaactcggccacttatttagattagatcgtaacgccatgatgaagagttttgtccccatgcaaccgcgccacctggaatacaggcgaggtgataaaactacacccagcgatgaccttctttgtccaatctgttccgcccttcttgagcacagttggcatatcaatgtcgggcgtctcaaattcatatatcgtaatgtgcttggaaaccgacaagttacccgacattctctgctgctcgccgaagtgccgattgccccgcccgaaaaccgtctcgtaccgcgttgcccgtagaaaccctgatagtccgttgaaaccctcgagatgctgcgattaagtaagttgtgagaatcataagtaaattgggcgagtttccgatcgtacctctcccctataccacctatctatctcctcgtcgg

SEQ ID NO: 23697 - DNA, 1557 bp, Muscodor strobelii
  misc_feature: SGI cDNA ID NO. 568066
  misc_feature: Reduced expression when VOC is produced
  misc_feature: Encodes the peptide sequence at SEQ ID NO 23698
atggcggccaccaacaaaaagccaaatggttccaagccaaagaccaacaaaacgatgaaatccaacatcatccgcaaattcggcaatctagaatgctatgaataccacatgataaagctgcgctactacgcaagcccctcaataacctgtcgctacaccataccatccacacgctcatcactcgagtctcactcgctcgtctcacacttcgagcgcgcaatatcctgcgtaatcctcgagcacgccagcctacgctcacacataacagacgtagactccaagcgcccatcatggtatcccatctaccaaattgacttagcccaagtcatagaatggcaagacatcactccggatcaagactacgacacattactcagcgagaccatcgcaaaacgcctagacgcagagtttcccaaccccgacacaaacctctggcaatgccttttattcatgaaccgagctcaagactacatcgacataatcttcgacttctcccactcaaccgcagatggcatgtcaggcaaactcttccactccaccctgctccgcgtcctaaacacgccctccctcctcaccaccccaaatatctcctcatcccgcatcctccaaatcccagcaacagcctcaacactccccttacccctagaaaaactagtgaagttcacatacagcccaaaatacgtccttagccaaggctggtcagaacttaggccctccatcttcacgcgaaaatcctcctcaaacacaaaatggtgtcccatcgtaacgtcgccttataaaacccaagtccggactttcgacatttcagcggctatcctctcaactcttatcgcgaagtgtagagaacataaaacaacgctcacaggcttattccaagccctaatcctcgtcgccttatcccggcacgtcgcacacccctctgcggcctcattccgcggattaacagcacttgacatgcggcggcatatctcaaagtctctaattaacgcagatcagatgatggggaatatcatgagtgcaattgaacacgagtttccttcctcgatcgtgtcttccatccggtcttcggcttacccagaatcagaatcgtcaacccctgatccgaagctagtggacacgatatggagagtagcctcacaagtccgcgcagagatacagagaaaactcgatctgggcgtgaagaatgaggtcgtgggacttatgcgctttgtgccggattggcgtgcgcagttcaaggagaactctaagaaacctcgcagcagcgctttcgccgttacgaactgtggagtttttgacggcaacggggagggagagataggagaggatgagagatggaaggttactcgaacactattctgcgacagctcggagatcgcaggtgcattgctgtgtctcagtgcgatgagcgtcaagggtgggggtctatcggtttgttttaattggcaggacgctgcactagatagaagtatcggggataatattgtgaaggatgttgagctgtggttgaagattcttggacgctcgacggtggagaggaatggcagtgctgagcagtag

SEQ ID NO: 23698 - protein, 518 aa, Muscodor strobelii
  misc_feature: SGI Peptide ID NO. 568066
  misc_feature (26)..(502): Pfam Id: PF07247 Pfam Desc: Alcohol acetyltransferase
  misc_feature (244)..(324): Pfam Id: PF07247 Pfam Desc: Alcohol acetyltransferase
  misc_feature (10)..(510): NCBI GI: 256723526 Blast Desc: NECHADRAFT_94006 [Nectria haematococca mpVI 77-13-4]
  misc_feature (44)..(506): NCBI GI: 256734699 Blast Desc: NECHADRAFT_75213 [Nectria haematococca mpVI 77-13-4]
  misc_feature (19)..(506): NCBI GI: 46108098 Blast Desc: FG00931.1 [Gibberella zeae PH-1]
  misc_feature (23)..(503): NCBI GI: 256728395 Blast Desc: NECHADRAFT_102167 [Nectria haematococca mpVI 77-13-4]
  misc_feature (12)..(506): NCBI GI: 46126441 Blast Desc: FG07598.1 [Gibberella zeae PH-1]
  misc_feature (4)..(507): NCBI GI: 145606783 Blast Desc: MGG_03754 [Magnaporthe grisea 70-15] gi|145014434|gb|EDJ99002.1| MGG_03754 [Magnaporthe grisea 70-15]
  misc_feature (14)..(506): NCBI GI: 240273877 Blast Desc: conserved [Ajellomyces capsulatus H143]
  misc_feature (14)..(506): NCBI GI: 225555375 Blast Desc: conserved [Ajellomyces capsulatus G186AR]
  misc_feature (14)..(517): NCBI GI: 154286924 Blast Desc: [Ajellomyces capsulatus NAm1] gi|150407898|gb|EDN03439.1| [Ajellomyces capsulatus NAm1]
  misc_feature (47)..(508): NCBI GI: 46116024 Blast Desc: FG03854.1 [Gibberella zeae PH-1]
  misc_feature: Useful for introducing or modulating the production of volatile compounds
MAATNKKPNGSKPKTNKTMKSNIIRKFGNLECYEYHMIKLRYYASPSITCRYTIPSTRSSLESHSLVSHFERAISCVILEHASLRSHITDVDSKRPSWYPIYQIDLAQVIEWQDITPDQDYDTLLSETIAKRLDAEFPNPDTNLWQCLLFMNRAQDYIDIIFDFSHSTADGMSGKLFHSTLLRVLNTPSLLTTPNISSSRILQIPATASTLPLPLEKLVKFTYSPKYVLSQGWSELRPSIFTRKSSSNTKWCPIVTSPYKTQVRTFDISAAILSTLIAKCREHKTTLTGLFQALILVALSRHVAHPSAASFRGLTALDMRRHISKSLINADQMMGNIMSAIEHEFPSSIVSSIRSSAYPESESSTPDPKLVDTIWRVASQVRAEIQRKLDLGVKNEVVGLMRFVPDWRAQFKENSKKPRSSAFAVTNCGVFDGNGEGEIGEDERWKVTRTLFCDSSEIAGALLCLSAMSVKGGGLSVCFNWQDAALDRSIGDNIVKDVELWLKILGRSTVERNGSAEQ

SEQ ID NO: 23699 - DNA, 1827 bp, Muscodor strobelii
  misc_feature: SGI EST ID NO. CUFF.55742.0
  misc_feature: Variant of the nucleotide sequence at SEQ ID NO 23697
gggcgtatgacagatgatagggactcgattcaatggtatgtagtcctcgcataagagatcatcatctcgaataaagctagaacttgggtgcgatttaacagggaccgagaagctcatctcacagcatttaccatcaccatggcggccaccaacaaaaagccaaatggttccaagccaaagaccaacaaaacgatgaaatccaacatcatccgcaaattcggcaatctagaatgctatgaataccacatgataaagctgcgctactacgcaagcccctcaataacctgtcgctacaccataccatccacacgctcatcactcgagtctcactcgctcgtctcacacttcgagcgcgcaatatcctgcgtaatcctcgagcacgccagcctacgctcacacataacagacgtagactccaagcgcccatcatggtatcccatctaccaaattgacttagcccaagtcatagaatggcaagacatcactccggatcaagactacgacacattactcagcgagaccatcgcaaaacgcctagacgcagagtttcccaaccccgacacaaacctctggcaatgccttttattcatgaaccgagctcaagactacatcgacataatcttcgacttctcccactcaaccgcagatggcatgtcaggcaaactcttccactccaccctgctccgcgtcctaaacacgccctccctcctcaccaccccaaatatctcctcatcccgcatcctccaaatcccagcaacagcctcaacactccccttacccctagaaaaactagtgaagttcacatacagcccaaaatacgtccttagccaaggctggtcagaacttaggccctccatcttcacgcgaaaatcctcctcaaacacaaaatggtgtcccatcgtaacgtcgccttataaaacccaagtccggactttcgacatttcagcggctatcctctcaactcttatcgcgaagtgtagagaacataaaacaacgctcacaggcttattccaagccctaatcctcgtcgccttatcccggcacgtcgcacacccctctgcggcctcattccgcggattaacagcacttgacatgcggcggcatatctcaaagtctctaattaacgcagatcagatgatggggaatatcatgagtgcaattgaacacgagtttccttcctcgatcgtgtcttccatccggtcttcggcttacccagaatcagaatcgtcaacccctgatccgaagctagtggacacgatatggagagtagcctcacaagtccgcgcagagatacagagaaaactcgatctgggcgtgaagaatgaggtcgtgggacttatgcgctttgtgccggattggcgtgcgcagttcaaggagaactctaagaaacctcgcagcagcgctttcgccgttacgaactgtggagtttttgacggcaacggggagggagagataggagaggatgagagatggaaggttactcgaacactattctgcgacagctcggagatcgcaggtgcattgctgtgtctcagtgcgatgagcgtcaagggtgggggtctatcggtttgttttaattggcaggacgctgcactagatagaagtatcggggataatattgtgaaggatgttgagctgtggttgaagattcttggacgctcgacggtggagaggaatggcagtgctgagcagtaggtaggtggagtattatagcagtctggtgctagaatgaatggcaccacaaataccacaacaggttgtagcaccgaatagcaaggcgcttgattttctgatgatattccgaattattagccctattgattttca

SEQ ID NO: 23700 - DNA, 1116 bp, Muscodor strobelii
  misc_feature: SGI cDNA ID NO. 568067
  misc_feature: Encodes the peptide sequence at SEQ ID NO 23701
atggcatcattcagccggagcactcccgctaagccggtggaagacaaacaaccaagtgattccaggcccgaaaaaaatagtgtgaagaagcgcaaagccagtgtctacgacgcagtggacgaagacagtgacgacggcgacctagacgaagacattcctgctgtaaaaccccccaccagctcgcgaactagcagctctcgatcgcaacaccaccctcccaccaccacagctcccaagccaaaaagcaaagcaattaccattgttggtaagatgcaggccagacgcagcaaagcagtacctaacacgggagcactgctaaatggcgagtcaacgacacctcggaatgatgcgctcgcaaaccttgagcgcgctaatggtcccgatgcggctcgcaaacaacccgacaacagagttcctgaagctcctatgggcggcccagatgagctattgagtgatcctcctgcggttccggcctcaacaataccatcctcgtttacatctaccgccccgtcagccagagtaactccttccagggccaaggggaaagcgcgagcgcgagagcctgaacccgagccagagcccgagctggaggaggaacacgagaagcaacttgagtctgcgcagcaacctcagcagcagagtaagaacaagaaagccgacgaggaacaacacgagattgtccgtcttctcgatcacaggatgaacaaggacggcaccatcgatcttttagtgcactgggccggcgaatccaagaaagatgcttcatggcaggacgaggcagaaatccagaatggagcggccgaggcgctgtatgattattggaaaatggttggcggtcgcagtcaagtccttttcgagaacggccaatacaccgaggactacttcatgttccgaatcctcggccacgagaaggttaagaatagacccttcaaatacactgtccagtgggtcggatactcgcatgagccgcgcaacacgacagtggaacccgagaagaaggtcaaggagaacgcgcccgagctattgaccaagtactggaacacggttccgggcggccgcgagggccagctcgagaagcccggcggtggtagcaggaagaggaggaagcatcattaa

SEQ ID NO: 23701 - protein, 371 aa, Muscodor strobelii
  misc_feature: SGI Peptide ID NO. 568067
  misc_feature (224)..(276): Pfam Id: PF00385 Pfam Desc: 'chromo' (CHRromatin Organisation MOdifier) domain
  misc_feature (218)..(353): NCBI GI: 256730107 Blast Desc: NECHADRAFT_101114 [Nectria haematococca mpVI 77-13-4]
  misc_feature (222)..(346): NCBI GI: 39940376 Blast Desc: [Magnaporthe grisea 70-15] gi|145010700|gb|EDJ95356.1| [Magnaporthe grisea 70-15]
  misc_feature (222)..(345): NCBI GI: 46110525 Blast Desc: FG02144.1 [Gibberella zeae PH-1]
  misc_feature (225)..(345): NCBI GI: 256728634 Blast Desc: NECHADRAFT_97011 [Nectria haematococca mpVI 77-13-4]
  misc_feature (226)..(353): NCBI GI: 39964706 Blast Desc: [Magnaporthe grisea 70-15] gi|145011179|gb|EDJ95835.1| [Magnaporthe grisea 70-15]
  misc_feature (228)..(352): NCBI GI: 256729555 Blast Desc: NECHADRAFT_84250 [Nectria haematococca mpVI 77-13-4]
  misc_feature (224)..(351): NCBI GI: 46117430 Blast Desc: FG04557.1 [Gibberella zeae PH-1]
MASFSRSTPAKPVEDKQPSDSRPEKNSVKKRKASVYDAVDEDSDDGDLDEDIPAVKPPTSSRTSSSRSQHHPPTTTAPKPKSKAITIVGKMQARRSKAVPNTGALLNGESTTPRNDALANLERANGPDAARKQPDNRVPEAPMGGPDELLSDPPAVPASTIPSSFTSTAPSARVTPSRAKGKARAREPEPEPEPELEEEHEKQLESAQQPQQQSKNKKADEEQHEIVRLLDHRMNKDGTIDLLVHWAGESKKDASWQDEAEIQNGAAEALYDYWKMVGGRSQVLFENGQYTEDYFMFRILGHEKVKNRPFKYTVQWVGYSHEPRNTTVEPEKKVKENAPELLTKYWNTVPGGREGQLEKPGGGSRKRRKHH

SEQ ID NO: 23702 - DNA, 1944 bp, Muscodor strobelii
  misc_feature: SGI EST ID NO. CUFF.55813.1
  misc_feature: Variant of the nucleotide sequence at SEQ ID NO 23700
ggcagcttctccacactttccatactttccacgcttgccgagctgcagggtatcgcctgcgatttgttgattttgcttggggaggagcaagaagtcaccagtcaaaccgcggcgtcgcttcctgcacgacaacgcattgcccattccctccccgggcattcaccctcgttccgtccgtcgatgctcgtctttgttgttgtcgcatgaccgtgctctgtcaacacaacccactttcaatatcatggcatcattcagccggagcactcccgctaagccggtggaagacaaacaaccaagtgattccaggcccgaaaaaaatagtgtgaagaagcgcaaagccagtgtctacgacgcagtggacgaagacagtgacgacggcgacctagacgaagacattcctgctgtaaaaccccccaccagctcgcgaactagcagctctcgatcgcaacaccaccctcccaccaccacagctcccaagccaaaaagcaaagcaattaccattgttggtaagatgcaggccagacgcagcaaagcagtacctaacacgggagcactgctaaatggcgagtcaacgacacctcggaatgatgcgctcgcaaaccttgagcgcgctaatggtcccgatgcggctcgcaaacaacccgacaacagagttcctgaagctcctatgggcggcccagatgagctattgagtgatcctcctgcggttccggcctcaacaataccatcctcgtttacatctaccgccccgtcagccagagtaactccttccagggccaaggggaaagcgcgagcgcgagagcctgaacccgagccagagcccgagctggaggaggaacacgagaagcaacttgagtctgcgcagcaacctcagcagcagagtaagaacaagaaagccgacgaggaacaacacgagattgtccgtcttctcgatcacaggatgaacaaggacggcaccatcgatcttttagtgcactgggccggcgaatccaagaaagatgcttcatggcaggacgaggcagaaatccagaatggagcggccgaggcgctgtatgattattggaaaatggttggcggtcgcagtcaagtccttttcgagaacggccaatacaccgaggactacttcatgttccgaatcctcggccacgagaaggttaagaatagacccttcaaatacactgtccagtgggtcggatactcgcatgagccgcgcaacacgacagtggaacccgagaagaaggtcaaggagaacgcgcccgagctattgaccaagtactggaacacggttccgggcggccgcgagggccagctcgagaagcccggcggtggtagcaggaagaggaggaagcatcattaagatcgataagctctctccctgaaaatgccgcatcatctctcgttactatctgtgtacatacgcgtgccttcgtttttgctccggtttatttgcatgattggagcgtcccgtgcgaaaaggcgaaacgggggtgatttggccttgcatttctgtttcggagttgaggaggcatggcggctctgatttttgagaggggagaatggccgcaaggtctggcacaaaagattgccttgaaactcatgttggtctaccacactgttacgacagtgctatggaaaatggattcctagagccggatacaggtttcatgctgctcgcgcggctgcagatggatatggctctcgctttcacatcacacggaggcccaaaaagcatcgttaggatggcctatatggcgatcgtgtgtttatgtggcggtctaaatgctcatagctttggctagacgaaatcatcaataaatgtctgctattgacgttgacttgtaatccaatcaaatcctgttgtgcttggcgacacgtgagaataacgagttaagaaggtaaaaaacaagggtgggaaagcaaagaaataaaaataagaacgcgccg

SEQ ID NO: 23703 - DNA, 1497 bp, Muscodor strobelii
  misc_feature: SGI cDNA ID NO. 568068
  misc_feature: Encodes the peptide sequence at SEQ ID NO 23704
atgaacggcactatgccagggccaacgatcgaggccaattggggcgatgaggttgtcattcatgttacgaacaacatgtcagaaaacgggacagctattcattggcacggaatccgtcaactgaactcaagctcaaacgacggcgttcccggcgtgagccaatgtcctatcgcgccgggtcaaaccatgacataccacttccacgcaactcagtacgggacatcatggtaccactcacatttcagtctgcaaatggcgcaaggtctcatcggacctatcgtaatccacggtccaactacagcaaactgggacatcgacgtcggccccgtaatactacaagactggttccacggcagtgcattcgacatttgggaagaaactcagcgagtcctcgctctaatccagcccgtagccgagaacggactaataagcggcatgaatccgtacgactgcacagcctcaacagataccgcttgtattggtggaggcgagcgcttcaaagtctcctttgaaaagggaaataaatacctattccgcatcatcggcgcacagaccgatgggtatatgaagttcgccatagataaccacaagctcaccgtcatcgcaagcgatttcgttccgatcaagccctacgaaacagacgctgttatacttggcagcgggcagagatatgacgttgtcgttgaagctaatcaagatagcacgtcctcatattggatacgcgccatctatcaaacggcatgtaaccagaacgacaacgagaacaaaaacaacattctcggcatcgctcactattctagctccgataacacaacgaacccaacatcgaccgtatcttcagcgataaccaacagctgtggtgacgagccctacgagagtctcataccctgggtctcgcacacagttggcgcaagttcagaacaagacgttgtggctctgcaattctactatgagttgaacctcgtctttcactggacgttgcatagcaagacgcttatagtcgattggtctggcccgacggttttagatgtattgaataatgcaacgactgctttcccggctgacagcaatgttgttgaggttgatttcgttgatgagtgggtttattgggttatacaggatttgactttggttgatgcttttcatcctatgcatctacacggacatgacttttacatcctagctcaggggcgaggaccgtatgttcaaggtctcgtcaagttgaacactaataacccgccgcgacgtgatactgcgacattatatgggaatgggtatactgtcattgcattcaagacagacaaccctggatcatggctcctgcattgtcatatcgcatggcatgccagccaaggtttggctcttcagctggtagaaagaagaaatgaattcgaggctttaatgggaagcgaggttgacgacatgcaggatacttgtgacacatggaatgactggtatcctacgtctccttataggcaggatgactcagggatatag

SEQ ID NO: 23704 - protein, 498 aa, Muscodor strobelii
  misc_feature: SGI Peptide ID NO. 568068
  misc_feature (106)..(268): Pfam Id: PF00394 Pfam Desc: Multicopper oxidase
  misc_feature (333)..(463): Pfam Id: PF07731 Pfam Desc: Multicopper oxidase
  misc_feature (1)..(100): Pfam Id: PF07732 Pfam Desc: Multicopper oxidase
  misc_feature (2)..(100): Pfam Id: PF07732 Pfam Desc: Multicopper oxidase
  misc_feature (1)..(498): NCBI GI: 67904366 Blast Desc: AN9170.2 [Aspergillus nidulans FGSC A4] gi|40742271|gb|EAA61461.1| AN9170.2 [Aspergillus nidulans FGSC A4] gi|259485403|tpe|CBF82396.1| TPA: conserved : exracellular
  misc_feature (1)..(498): NCBI GI: 120431232 Blast Desc: laccase 2 [Monilinia fructigena]
  misc_feature (1)..(498): NCBI GI: 154305568 Blast Desc: BC1G_08553 [Botryotinia fuckeliana B05.10] gi|74697989|sp|Q96WM9.1|LAC2_BOTFU RecName: Full=Laccase-2; AltName: Full=Benzenediol:oxygen oxidoreductase 2; AltName: 2; 2;
  misc_feature (1)..(498): NCBI GI: 160332827 Blast Desc: laccase precursor [Helotiaceae sp. UHH 1-13-18-4]
  misc_feature (1)..(498): NCBI GI: 156065927 Blast Desc: SS1G_00974 [Sclerotinia sclerotiorum 1980] gi|120431230|gb|ABM21604.1| laccase 2 [Sclerotinia sclerotiorum] gi|154691833|gb|EDN91571.1| SS1G_00974 [Sclerotinia sclerotiorum
  misc_feature (1)..(498): NCBI GI: 120431228 Blast Desc: laccase 2 [Sclerotinia minor]
  misc_feature (1)..(498): NCBI GI: 238846090 Blast Desc: laccase-1 [Microsporum canis CBS 113480]
  misc_feature (31)..(498): NCBI GI: 160332849 Blast Desc: laccase precursor [Helotiaceae sp. UHH 1-13-18-4]
  misc_feature (1)..(498): NCBI GI: 164426955 Blast Desc: NCU02201 [Neurospora crassa OR74A] gi|157071546|gb|EAA30359.2| NCU02201 [Neurospora crassa OR74A]
  misc_feature (1)..(498): NCBI GI: 145611572 Blast Desc: MGG_11608 [Magnaporthe grisea 70-15] gi|145018834|gb|EDK03113.1| MGG_11608 [Magnaporthe grisea 70-15]
  misc_feature (1)..(498): SWISSPROT Homolog: EC 1.10.3.2 Laccase
MNGTMPGPTIEANWGDEVVIHVTNNMSENGTAIHWHGIRQLNSSSNDGVPGVSQCPIAPGQTMTYHFHATQYGTSWYHSHFSLQMAQGLIGPIVIHGPTTANWDIDVGPVILQDWFHGSAFDIWEETQRVLALIQPVAENGLISGMNPYDCTASTDTACIGGGERFKVSFEKGNKYLFRIIGAQTDGYMKFAIDNHKLTVIASDFVPIKPYETDAVILGSGQRYDVVVEANQDSTSSYWIRAIYQTACNQNDNENKNNILGIAHYSSSDNTTNPTSTVSSAITNSCGDEPYESLIPWVSHTVGASSEQDVVALQFYYELNLVFHWTLHSKTLIVDWSGPTVLDVLNNATTAFPADSNVVEVDFVDEWVYWVIQDLTLVDAFHPMHLHGHDFYILAQGRGPYVQGLVKLNTNNPPRRDTATLYGNGYTVIAFKTDNPGSWLLHCHIAWHASQGLALQLVERRNEFEALMGSEVDDMQDTCDTWNDWYPTSPYRQDDSGI

SEQ ID NO: 23705 - DNA, 1782 bp, Muscodor strobelii
  misc_feature: SGI cDNA ID NO. 568069
  misc_feature: Reduced expression when VOC is produced
  misc_feature: Encodes the peptide sequence at SEQ ID NO 23706
atgcgtttcatgatgcggaccgctggtattttgtttggcctctttgttggtttgagcctaggtgctccatcacagccgttgggcctcgaggctctcgaagcccttgcctcgacgtgcaatacgccttcgaacagagcctgctggagcaatggattcaacatcaatacagattatgaaacaagtacgccagcaggtgtcacaagaacaatcaacctcgagattacggaacatgataactgggttggtcctgacggaaggacaaagcccaaggccatgctcatcaataatcagtaccccgggccaacaatcacggcggactggggagatactttagttatcaacgtgaagaatagtctgagaatcaacggaacttccattcactggcatggcctcaggcaattggggaccaacattcaggacggcgtcaacggtgtaactgagtgtcccgtagcgccaggtcactcgaaaacttacaaatttcggttgacccagtatggtacgacgtggtatcattctcatttctcagcccaatatgccaacggagtattcggctctatcgtgatcaacggaccggcgtctcttccctatgacatcgatcttggagcgtatcccatcaatgactattaccttgcttcagcagaccaaattgttgagcaaaccatgttgtcaccggcaccgcctgctagtgacaacgtcatgttcaatggaacaaatatcaaccctgtcggatctgggggtgcttactcgagggttactttgactcccggcaagcgtcaccgcctccgattgataaatccttcggccgagcacaactaccaggtttctatcgtgggacatcaaatgaccgtcatatcaactgatctagtacccgtaaattcttttactacagataatgtattcctgggagttggccaacgtgtggatgtcactatcgatgcttcacaggcggtcggcaattattggatgaatgttaccatgccagctgcgaatctctgtggctcctcagtcaacccgttcccggctgcgattgtgcattatactggtgccagtaacactgctttgccgaccaacacagggacgacgccggcgaatcccggatgtcgtgatagcctgaactatgtcccagtggtcggtcgcacaacttccctatccacattttccttcaacaaccagaacacgcttgacgtgacccttaccacaccgccaaccacgccaaccgtcaagtggtacgtcaatagctcttctatcaacgtgaactgggacaagccagttcttgactacgtattgacgggcaatacgtcatacccccgttctgagaacatcatctcggtgaattctaagaacgtgtggacattctgggtcattgagaacgggtctggaattcctcaccctatgcatttacacggacacgatttcctggtcctcggggcttctgccaacggggcaggcgcatttacaaccgcacaagaaagctcgttgaaagtcaataaccctacccgtcgcgatgtgacgatgcttccggcaggcggttggctggttctcgctttcaaatctgacaaccctggtgcgtggttgatgcactgtcacatcgcttggcatgtgtccggtggcctcgctgtcgatttcctcgaacgcgtgtcggagcagaaagctcagatcagtgccgcggacaaagcagcattcaattcgaattgcgctacatggcagaactacttcgacaacagcggagttgtcaagatcgactctggtttgaaagtccgacaaattgcatctccgttttaa

SEQ ID NO: 23706 - protein, 593 aa, Muscodor strobelii
  misc_feature: SGI Peptide ID NO. 568069
  misc_feature (201)..(349): Pfam Id: PF00394 Pfam Desc: Multicopper oxidase
  misc_feature (417)..(548): Pfam Id: PF07731 Pfam Desc: Multicopper oxidase
  misc_feature (74)..(193): Pfam Id: PF07732 Pfam Desc: Multicopper oxidase
  misc_feature (28)..(588): NCBI GI: 74691506 Blast Desc: LAC1_MELAO RecName: Full=Laccase-1; AltName: Full=Benzenediol:oxygen oxidoreductase 1; AltName: Full=Urishiol oxidase 1; AltName: Full=Diphenol oxidase 1; AltName: Flags:
  misc_feature (29)..(588): NCBI GI: 171678535 Blast Desc: protein product [Podospora anserina] gi|2829670|sp|P78722.1|LAC2_PODAN RecName: Full=Laccase-2; AltName: Full=Laccase II; AltName: Full=Benzenediol:oxygen 2; 2;
  misc_feature (38)..(584): NCBI GI: 22218673 Blast Desc: protein product [Podospora anserina] gi|2829670|sp|P78722.1|LAC2_PODAN RecName: Full=Laccase-2; AltName: Full=Laccase II; AltName: Full=Benzenediol:oxygen 2; 2;
  misc_feature (38)..(584): NCBI GI: 170784985 Blast Desc: protein product [Podospora anserina] gi|2829670|sp|P78722.1|LAC2_PODAN RecName: Full=Laccase-2; AltName: Full=Laccase II; AltName: Full=Benzenediol:oxygen 2; 2;
  misc_feature (1)..(591): NCBI GI: 116205994 Blast Desc: laccase [Chaetomium globosum CBS 148.51] gi|88182887|gb|EAQ90355.1| laccase [Chaetomium globosum CBS 148.51]
  misc_feature (38)..(583): NCBI GI: 251836877 Blast Desc: laccase [Chaetomium globosum CBS 148.51] gi|88182887|gb|EAQ90355.1| laccase [Chaetomium globosum CBS 148.51]
  misc_feature (1)..(585): NCBI GI: 85082547 Blast Desc: laccase precursor [Neurospora crassa OR74A] gi|118572665|sp|P06811.3|LAC1_NEUCR RecName: Full=Laccase; AltName: Full=Benzenediol:oxygen oxidoreductase; AltName: Flags:
  misc_feature (18)..(581): NCBI GI: 2833199 Blast Desc: LAC1_CRYPA RecName: Full=Laccase; AltName: Full=Benzenediol:oxygen oxidoreductase; AltName: Full=Urishiol oxidase; AltName: Full=Diphenol oxidase; Flags: Precursor laccase
  misc_feature (39)..(585): NCBI GI: 168826 Blast Desc: laccase [Neurospora crassa]
  misc_feature (1)..(585): NCBI GI: 168828 Blast Desc: laccase [Neurospora crassa]
  misc_feature (28)..(588): SWISSPROT Homolog: EC 1.10.3.2 Laccase
  misc_feature: Useful for introducing or modulating the production of volatile compounds
MRFMMRTAGILFGLFVGLSLGAPSQPLGLEALEALASTCNTPSNRACWSNGFNINTDYETSTPAGVTRTINLEITEHDNWVGPDGRTKPKAMLINNQYPGPTITADWGDTLVINVKNSLRINGTSIHWHGLRQLGTNIQDGVNGVTECPVAPGHSKTYKFRLTQYGTTWYHSHFSAQYANGVFGSIVINGPASLPYDIDLGAYPINDYYLASADQIVEQTMLSPAPPASDNVMFNGTNINPVGSGGAYSRVTLTPGKRHRLRLINPSAEHNYQVSIVGHQMTVISTDLVPVNSFTTDNVFLGVGQRVDVTIDASQAVGNYWMNVTMPAANLCGSSVNPFPAAIVHYTGASNTALPTNTGTTPANPGCRDSLNYVPVVGRTTSLSTFSFNNQNTLDVTLTTPPTTPTVKWYVNSSSINVNWDKPVLDYVLTGNTSYPRSENIISVNSKNVWTFWVIENGSGIPHPMHLHGHDFLVLGASANGAGAFTTAQESSLKVNNPTRRDVTMLPAGGWLVLAFKSDNPGAWLMHCHIAWHVSGGLAVDFLERVSEQKAQISAADKAAFNSNCATWQNYFDNSGVVKIDSGLKVRQIASPF

SEQ ID NO: 23707 - DNA, 4550 bp, Muscodor strobelii
  misc_feature: SGI EST ID NO. CUFF.55967.0
  misc_feature: Variant of the nucleotide sequence at SEQ ID NO 23705
aaagcagtcgccagtggctttggcatcttgacatattcacagattcctgaactcccatgggacacggcttacttgcgacatcaatctgaaaactgcagatttaatccggatctggaatggacgcgcgaactgccaatgagtaatcaccacagacgccacgcccgccgcattccttgctttttgttcctgcatgttgagtgccatctgaacacatgatcagaaaacctgggcgccataacgatgcaaacccagacgcacgatagagcagacgcatgacaaaggagctaaaaaagccacatgaagcgtcaccgccgcagccagctctccaagtcaggggttctcgttttgcgcggttgtaaaacgttgtaatgttgcattggctatttccttgtcatacctaggagcctttgatctctgtgggtctgcagcctagttgttagtattgatgtcgaggttttagcgagctctcacatccgactggcccgattctagcatatcacagcagggtatgcactcaatgctgacactacattgactatgagcggccgctcgtatttttcaaagcttcaggaacaagcgagagcgatccacgcctatctagcacgctggctgatacaactggcaggtttattgcaatgattgacgtccaagttattacccgaagacacagtcccaataattagtcttaggggcttgctattatctgctctgacttgcttgcattttgatgtgaatctgatatcagtcagactaactccggcatggacggagatgatcggtcatttgatactcgtccgcgaagccggatccgaacagtggttatacactagtaagacaaagccgtcaagcccgccgtggtctgttccgaacatagtcctagggctcaaccctacatttagtctaactgctctccggaagtctggttagacgtctactaggggtgtatgaggagtgatgtctgtcgctggaagtggttgaacctgccacttccttcacatcaccctctcgccaggtatccatcttgatattgcttcgggttgctaacgatcacgaggatgactcaggagctaagctaccccaaagaagtggatcttcgcatcgaagctcctcattttcgagaccgcccgtaggtatcatgaaaacgcctcgcatcttgatgccgtccgaaaagggacgacatgtctaattatcaaagtggagcgcaccatgtcggtgagacactcccacatagtgcctcgcatgccgagtcgtaaaacgccactcgctatgattaccgtacggcgcatacgacccaaacgatcgaaaccacccctcgtgttcagccttatgtggcaatgccagcgtctttgatgctgtccgcccagagttatagtctcctgttcaatttcagcatggcaccacctggaagcataaacgaagtcatgcaggaacaaatagctctaattaggtactatttctgtgcccatcttgctttccgcgccctccatgatatctcgcctgtgatcccagcgcatgacttcctcaccacgcccgactacgcttatctccacacgttgctcagcaagagagcttgtcccgcttggagggaaatgctcaacgcctttttctgcaagcgactagactatcatatgcaagagactcgagctatcgaattctcatccctagctcacatggtctatcttgacaacttgagctgcggatgtactttgtgtccaatcgtgtttgtgacacaatagggagttcaggagatgtacttcaacgatggaatgacacgatgaaggcgggcagacttcggcgtctacggcatggccagcatggtaagcatggtatgtgagtgtgacagtcctattccttcgaacgttctcgccgtgatgctagaatggaggaaatattgaatcgggttgtcggtaagccatccgtaacttgtgatgttgctaattgtagcttgggaagaacgactattgtaactatataagtctcctcgatcactcagagttaatgaggttcctcagaaagtgtcattcacctcaagacattgacaacatcatctatcagtggcctggctgccggttgttcctcatatttttttttgttcacattctcttcaccatgcgtttcatgatgcggaccgctggtattttgtttggcctctttgttggtttgagcctaggtgctccatcacagccgttgggcctcgaggctctcgaagcccttgcctcgacgtgcaatacgccttcgaacagagcctgctggagcaatggattcaacatcaatacagattatgaaacaagtacgccagcaggtgtcacaagaacaatcaacctcgagattacggaacatgataactgggttggtcctgacggaaggacaaagcccaaggccatgctcatcaataatcagtaccccgggccaacaatcacggcggactggggagatactttagttatcaacgtgaagaatagtctgagaatcaacggaacttccattcactggcatggcctcaggcaattggggaccaacattcaggacggcgtcaacggtgtaactgagtgtcccgtagcgccaggtcactcgaaaacttacaaatttcggttgacccagtatggtacgacgtggtatcattctcatttctcagcccaatatgccaacggagtattcggctctatcgtgatcaacggaccggcgtctcttccctatgacatcgatcttggagcgtatcccatcaatgactattaccttgcttcagcagaccaaattgttgagcaaaccatgttgtcaccggcaccgcctgctagtgacaacgtcatgttcaatggaacaaatatcaaccctgtcggatctgggggtgcttactcgagggttactttgactcccggcaagcgtcaccgcctccgattgataaatccttcggccgagcacaactaccaggtttctatcgtgggacatcaaatgaccgtcatatcaactgatctagtacccgtaaattcttttactacagataatgtattcctgggagttggccaacgtgtggatgtcactatcgatgcttcacaggcggtcggcaattattggatgaatgttaccatgccagctgcgaatctctgtggctcctcagtcaacccgttcccggctgcgattgtgcattatactggtgccagtaacactgctttgccgaccaacacagggacgacgccggcgaatcccggatgtcgtgatagcctgaactatgtcccagtggtcggtcgcacaacttccctatccacattttccttcaacaaccagaacacgcttgacgtgacccttaccacaccgccaaccacgccaaccgtcaagtggtacgtcaatagctcttctatcaacgtgaactgggacaagccagttcttgactacgtattgacgggcaatacgtcatacccccgttctgagaacatcatctcggtgaattctaagaacgtgtggacattctgggtcattgagaacgggtctggaattcctcaccctatgcatttacacggacacgatttcctggtcctcggggcttctgccaacggggcaggcgcatttacaaccgcacaagaaagctcgttgaaagtcaataaccctacccgtcgcgatgtgacgatgcttccggcaggcggttggctggttctcgctttcaaatctgacaaccctggtgcgtggttgatgcactgtcacatcgcttggcatgtgtccggtggcctcgctgtcgatttcctcgaacgcgtgtcggagcagaaagctcagatcagtgccgcggacaaagcagcattcaattcgaattgcgctacatggcagaactacttcgacaacagcggagttgtcaagatcgactctggtttgaaagtccgacaaattgcatctccgttttaagcactggtcatctctacaccctaaggcgttgcagcatcatttgcctcaagtggtcgtgctcgacttgaagttcggtagcctcatccaattcgattccctatcgtagatgtgtttatctcctttgtccctgatcaggtcaacaacttttaccaatcgcttgcttcgaattatttcataattcttttgtcgcgtttgcaagcaggggttcgcgtctcgattatagcctgccggaggggtctaatactccacttacatgggtgggaatgtatataacagggctttcttttcgctggggcgtacatacctatccagcatcactcaaattcttgtatatatcttgactctacgagtacatacttatttctcagctcacaacggcaacgcaacttagtaaatacgaaatgagttcccgcaactgcaaatctgaaccgatgattatcgatatgagagtatggcaagcgatctcgcttcaatctacctagcgggcagaggtccaacgcacatggtatcaatgaatactgtaatcgtcaaagtagcgaaaaacacagcgaaggatatttggatgacgagccgaacaatcaatttgtttgatcttcgacaagtttccgacagttttgtacaagtctagtctatctagctttaaatgatagatagagtcc

SEQ ID NO: 23708 - DNA, 972 bp, Muscodor strobelii
  misc_feature: SGI cDNA ID NO. 568070
  misc_feature: Encodes the peptide sequence at SEQ ID NO 23709
atggagtatcagtactctggagaagtcaattctaatgattacgagacgcatggcctcgatggaggcattcgtcttcgcatacataaagaccaagccttggagttccatggcgcactacgcgcccagcaagattggacgagccatgtgcgtgatgttactggatataagggaggactgggagacccatatactttcattgcagtttgcgtccccgagtgtctcccagacagactcgagcttatttcatacgcgaatgaatttgccttcctctatgacgacaagatggaaagctttgatttgaagaaggatctagaagaagagacaactgagatgttagacgcatttggtgatagtgccctcgaccgaagagcgagcgataacacaacgcccgagaagcgtttgcaagctcaaatgctttccgaaatgatggcaatagatccaccaagggcgattacatctatgaaggcctgggctaaattcgtacaactagcgtcacaaacacgatcatcgccattcgagacacttgaggaatatgttcccgcccgggtcattgatgcgggcgagctaatctggtttggaacgctgacttttggaatggcacttaccataccagaccatgagtacgtattgtgcatgaaaatggcccgggacggatatgcagcgctgggtctcacaaacgatctatactcatgggagaaggagcgacacgacgccaaactcgccgggctcgattatgtcttcaatgcgatttgggtcattatgaaagaaaaatgcgtttgtgaagcagacgcaaaagaattatgccggtcaaagatcaagagttacgtatcaacttaccagaagaccgtcgcggatgcgaaaaatgatgatactctttccacagatctcaaggtatacctagaggcagtcttatattctattatcggaaaccttgtatggagcaactactgtccccgatatcgtgatttctga

SEQ ID NO: 23709 - protein, 323 aa, Muscodor strobelii
  misc_feature: SGI Peptide ID NO. 568070
  misc_feature (1)..(323): NCBI GI: 238841665 Blast Desc: fusicoccadiene synthase [Microsporum canis CBS 113480]
  misc_feature (1)..(320): NCBI GI: 212530088 Blast Desc: conserved [Penicillium marneffei ATCC 18224] gi|210074599|gb|EEA28686.1| conserved [Penicillium marneffei ATCC 18224]
  misc_feature (1)..(320): NCBI GI: 242761457 Blast Desc: conserved [Talaromyces stipitatus ATCC 10500] gi|218723379|gb|EED22796.1| conserved [Talaromyces stipitatus ATCC 10500]
  misc_feature (1)..(320): NCBI GI: 261399278 Blast Desc: fusicoccadiene synthase [Alternaria brassicicola]
  misc_feature (1)..(320): NCBI GI: 124358874 Blast Desc: fusicoccadiene synthase [Phomopsis amygdali] gi|124358876|dbj|BAF45925.1| fusicoccadiene synthase [Phomopsis amygdali]
  misc_feature (1)..(320): NCBI GI: 242827321 Blast Desc: geranylgeranyl diphosphate synthase, [Talaromyces stipitatus ATCC 10500] gi|218712065|gb|EED11493.1| geranylgeranyl diphosphate synthase, [Talaromyces stipitatus ATCC 10500]
  misc_feature (1)..(320): NCBI GI: 240106734 Blast Desc: polyprenyl synthetase, [Coccidioides posadasii C735 delta SOWgp]
  misc_feature (1)..(320): NCBI GI: 119174214 Blast Desc: CIMG_09089 [Coccidioides immitis RS]
  misc_feature (1)..(320): NCBI GI: 46109712 Blast Desc: FG01738.1 [Gibberella zeae PH-1]
  misc_feature (1)..(320): NCBI GI: 121717308 Blast Desc: geranylgeranyl pyrophosphate synthase [Aspergillus clavatus NRRL 1] gi|119404227|gb|EAW14644.1| geranylgeranyl pyrophosphate synthase [Aspergillus clavatus NRRL 1]
MEYQYSGEVNSNDYETHGLDGGIRLRIHKDQALEFHGALRAQQDWTSHVRDVTGYKGGLGDPYTFIAVCVPECLPDRLELISYANEFAFLYDDKMESFDLKKDLEEETTEMLDAFGDSALDRRASDNTTPEKRLQAQMLSEMMAIDPPRAITSMKAWAKFVQLASQTRSSPFETLEEYVPARVIDAGELIWFGTLTFGMALTIPDHEYVLCMKMARDGYAALGLTNDLYSWEKERHDAKLAGLDYVFNAIWVIMKEKCVCEADAKELCRSKIKSYVSTYQKTVADAKNDDTLSTDLKVYLEAVLYSIIGNLVWSNYCPRYRDF

SEQ ID NO: 23710 - DNA, 1197 bp, Muscodor strobelii
  misc_feature: SGI EST ID NO. CUFF.55771.0
  misc_feature: Variant of the nucleotide sequence at SEQ ID NO 23708
atcgttgtttgtccctgcctgccgttaaattactgcacatgcatcaagtgaacatgataaatatcgggcctgtccaaggttcgggacttggccttcgaatgttcttgtcgtactactctaaatgctccgatgacacctcgtttgtcttacatccgccatatcgcccacacttagcgacttaattcacagcccactatggagtatcagtactctggagaagtcaattctaatgattacgagacgcatggcctcgatggaggcattcgtcttcgcatacataaagaccaagccttggagttccatggcgcactacgcgcccagcaagattggacgagccatgtgcgtgatgttactggatataagggaggactgggagacccatatactttcattgcagtttgcgtccccgagtgtctcccagacagactcgagcttatttcatacgcgaatgaatttgccttcctctatgacgacaagatggaaagctttgatttgaagaaggatctagaagaagagacaactgagatgttagacgcatttggtgatagtgccctcgaccgaagagcgagcgataacacaacgcccgagaagcgtttgcaagctcaaatgctttccgaaatgatggcaatagatccaccaagggcgattacatctatgaaggcctgggctaaattcgtacaactagcgtcacaaacacgatcatcgccattcgagacacttgaggaatatgttcccgcccgggtcattgatgcgggcgagctaatctggtttggaacgctgacttttggaatggcacttaccataccagaccatgagtacgtattgtgcatgaaaatggcccgggacggatatgcagcgctgggtctcacaaacgatctatactcatgggagaaggagcgacacgacgccaaactcgccgggctcgattatgtcttcaatgcgatttgggtcattatgaaagaaaaatgcgtttgtgaagcagacgcaaaagaattatgccggtcaaagatcaagagttacgtatcaacttaccagaagaccgtcgcggatgcgaaaaatgatgatactctttccacagatctcaaggtatacctagaggcagtcttatattctattatcggaaaccttgtatggagcaactactgtccccgatatcgtgatttctgatcatggcagcggatattgacctagctgagc

SEQ ID NO: 23711 - DNA, 1563 bp, Muscodor strobelii
  misc_feature: SGI cDNA ID NO. 568071
  misc_feature: Encodes the peptide sequence at SEQ ID NO 23712
atggaccgtggcgaagcgtcacaaatggcagctcgcattcacgaagcccttcgcgaaatttccccgacgaaggcgattgctacaattttgtgcatttgggctacgtaccttgctggtcttgtcattcaccgactatattttcatcctttagccggcttccctggtcccaagctcgcagcagcgacaggatggtatgagttttactaccaatactggcttaatggccagtatatcttcgaaacagagagaatggtgaagaaatatggccccattatccgcgtcaatcccgaagagctcttcatccatgatccggaattttacagcgagctttacgtgacagaagcaacgcggcatgacaactttgctcaaggacttggattcgacgggtgtcatctactcactgttcaacatgacttacacagaacaagaagaaagcctttggaaccgtatttctcacgaatgggtgtctctcgattgcaaacaatgttatcagaagtagcgctgcatttagagacacgcatcagacaatacgcgggaactgggaagcttgttcggctagatcacgcctttacggcatacacaggcgatgtcatcggcaggatgtgcctcgatagtaacgatcccggtgatcgtttcttgagcaaagaagatttctctgccgattggttccaaatcatgcaaatgatagtgaaatcgatcccgctcttttcgggatttcctttcattatatggctcttgagtcctattccaagtgaggtcctgttgtggctctaccctagaggtcaggcctttgcaacattccaaaagaaagcgcaaagcaatatccgcaaagccctccttgagagtagctcgctaaaggatgaacacgcagagtcgatctttcatcatattgctaatagcgacatgccggcttctgagaagaccgaggagcgcctagtgaaggaagcgcaactactactaggcggcggtacagtgacaagtgcacgaacaatctgttgtgctgcgtactatattctatcgcgccctgatatcacaaaagctctcggagaagaattgcggatgccaatggcggagtggccggctcgtgttcctacatgggcagagctcgagaggctgccatacttacaggctgtcatcaaggaggcgatgagagttgattacggagttatgacccgtcttcctaggatttcgcccgatgctgcgcttcaatacaagcagtacacgatacctcctggggttcctgtaggaatgtcgtcctacctaatgcagaccgacccagaggtctaccccaagccattcgacttcatcccggaacgttggcttggtactgtcaatcccctgatgcatcgcaatttcgtcccgtttacaaggggctctagaaactgtctgggaatgaatctggcaatggcagagattagcattcttttggctgtcctgtttcgccccaatggacccaaacttgaactctttgagactgatgagactgatgtgagggtggctcatgatttcgccgtgcctctacctaagctcaataccaagggcgtacgcgtgtgcgtgaggtag

SEQ ID NO: 23712 - protein, 520 aa, Muscodor strobelii
  misc_feature: SGI Peptide ID NO. 568071
  misc_feature (58)..(516): Pfam Id: PF00067 Pfam Desc: Cytochrome P450
  misc_feature (308)..(481): Pfam Id: PF00067 Pfam Desc: Cytochrome P450
  misc_feature (36)..(520): NCBI GI: 238841666 Blast Desc: CND11p [Microsporum canis CBS 113480]
  misc_feature (36)..(520): NCBI GI: 169778735 Blast Desc: [Aspergillus oryzae RIB40] gi|83772571|dbj|BAE62699.1| protein product [Aspergillus oryzae]
  misc_feature (22)..(520): NCBI GI: 9453810 Blast Desc: related to trichodiene oxygenase cytochrome P450 [Neurospora crassa]
  misc_feature (22)..(519): NCBI GI: 212530086 Blast Desc: benzoate 4-monooxygenase cytochrome P450, [Penicillium marneffei ATCC 18224] gi|210074598|gb|EEA28685.1| benzoate 4-monooxygenase cytochrome P450, [Penicillium marneffei ATCC
  misc_feature (89)..(520): NCBI GI: 238499307 Blast Desc: cytochrome P450, [Aspergillus flavus NRRL3357] gi|220692641|gb|EED48987.1| cytochrome P450, [Aspergillus flavus NRRL3357]
  misc_feature (17)..(519): NCBI GI: 242827325 Blast Desc: cytochrome P450, [Talaromyces stipitatus ATCC 10500] gi|218712066|gb|EED11494.1| cytochrome P450, [Talaromyces stipitatus ATCC 10500]
  misc_feature (22)..(519): NCBI GI: 242761462 Blast Desc: cytochrome P450, [Talaromyces stipitatus ATCC 10500] gi|218723380|gb|EED22797.1| cytochrome P450, [Talaromyces stipitatus ATCC 10500]
  misc_feature (7)..(517): NCBI GI: 119174212 Blast Desc: CIMG_09088 [Coccidioides immitis RS]
  misc_feature (7)..(517): NCBI GI: 240106733 Blast Desc: Cytochrome P450 family protein [Coccidioides posadasii C735 delta SOWgp]
  misc_feature (22)..(520): NCBI GI: 164423398 Blast Desc: NCU08716 [Neurospora crassa OR74A] gi|157070076|gb|EAA34341.2| conserved [Neurospora crassa OR74A]
  misc_feature (19)..(501): SWISSPROT Homolog: EC 1.14.13.94 Lithocholate 6-beta-hydroxylase
MDRGEASQMAARIHEALREISPTKAIATILCIWATYLAGLVIHRLYFHPLAGFPGPKLAAATGWYEFYYQYWLNGQYIFETERMVKKYGPIIRVNPEELFIHDPEFYSELYVTEATRHDNFAQGLGFDGCHLLTVQHDLHRTRRKPLEPYFSRMGVSRLQTMLSEVALHLETRIRQYAGTGKLVRLDHAFTAYTGDVIGRMCLDSNDPGDRFLSKEDFSADWFQIMQMIVKSIPLFSGFPFIIWLLSPIPSEVLLWLYPRGQAFATFQKKAQSNIRKALLESSSLKDEHAESIFHHIANSDMPASEKTEERLVKEAQLLLGGGTVTSARTICCAAYYILSRPDITKALGEELRMPMAEWPARVPTWAELERLPYLQAVIKEAMRVDYGVMTRLPRISPDAALQYKQYTIPPGVPVGMSSYLMQTDPEVYPKPFDFIPERWLGTVNPLMHRNFVPFTRGSRNCLGMNLAMAEISILLAVLFRPNGPKLELFETDETDVRVAHDFAVPLPKLNTKGVRVCVR

SEQ ID NO: 23713 - DNA, 815 bp, Muscodor strobelii
  misc_feature: SGI EST ID NO. CUFF.55776.0
  misc_feature: Variant of the nucleotide sequence at SEQ ID NO 23711
tcaaggaggcgatgagagttgattacggagttatgacccgtcttcctaggatttcgcccgatgctgcgcttcaatacaagcagtacacgatacctcctggggttcctgtaggaatgtcgtcctacctaatgcagaccgacccagaggtctaccccaagccattcgacttcatcccggaacgttggcttggtactgtcaatcccctgatgcatcgcaatttcgtcccgtttacaaggggctctagaaactgtctgggaatgaaccttacccatcctagtgaccctgctctaacgatgagtcccgacagtctggcaatggcagagattagcattcttttggctgtcctgtttcgccccaatggacccaaacttgaactctttgagactgatgagactgatgtgagggtggctcatgatttcgccgtgcctctacctaagctcaataccaagggcgtacgcgtgtgcgtgaggtagatcgggtcgacaaacggaagtcggagtacccgcttgcacagcaaatgccatcaatcccacatctcgggtcacgcaagtgggctgattgacccttggcccccgaacgaacgggtctcgcgcgggctgatgtgttggcggtgagctagtcgatgacgctactattgtaatgaaaggcgaaaaatcagaatcatttatttcccaaagccatcagcacgtgcaactacatgaatgtgcgaatgtgaattgctaatcagagtccgcgcagactagcgcgagactccgcatatacccatgacctagcagagattctcgaagctcgatagacgccgggtagcgcgttca

SEQ ID NO: 23714 - DNA, 624 bp, Muscodor strobelii
  misc_feature: SGI cDNA ID NO. 568072
  misc_feature: Encodes the peptide sequence at SEQ ID NO 23715
atgactttcgtagagaggccaaatgtggacgagtctgctcaatcctacccccggctctgtcatcttggaccgattatttcagatgtttctcaatcgcgtcactccgtgcggacttcccatgggctattcgacagcgacggactcatttgctgtgatatcgcctgtgcccgtttcaacgtaattcttctcaagcgaaacggacgcaagatcgatagcatagctcgctatgtcaagcattacgagccttacaacctcatctgtcttaagctcggtgtcttagtcaccactgctatgtgctatgatgagcaaacgggacaggccaagatatgggccggcgatgttgttgctctggcgaagcgcgacttgagggcaggtgagaagctcgacagcgaaggtggtttcgtggtctatgccaagttcatgacagcggaagaccccatggagatctctagtctacctatcggtcttgcacgcggcattgtgttgaagcgcgacgtgaagaaggataatggcctcagcttgaaaagcgataagtcgcaagctatcaccgttcgaaaggagataggcttgtctaagaaagaatttgctactagcatgatgaatggcgtcaacggcgtacattga

SEQ ID NO: 23715 - protein, 207 aa, Muscodor strobelii
  misc_feature: SGI Peptide ID NO. 568072
  misc_feature (47)..(188): NCBI GI: 145589731 Blast Desc: SAF domain-containing protein [Polynucleobacter necessarius subsp. asymbioticus QLW-P1DMWA-1] gi|145048137|gb|ABP34764.1| SAF domain [Polynucleobacter subsp.
  misc_feature (63)..(188): NCBI GI: 154244830 Blast Desc: SAF domain-containing protein [Xanthobacter autotrophicus Py2] gi|154158915|gb|ABS66131.1| SAF domain protein [Xanthobacter autotrophicus Py2]
  misc_feature (63)..(188): NCBI GI: 170751253 Blast Desc: SAF domain-containing protein [Methylobacterium radiotolerans JCM 2831] gi|170657775|gb|ACB26830.1| SAF domain protein [Methylobacterium radiotolerans JCM 2831]
  misc_feature (54)..(188): NCBI GI: 118472915 Blast Desc: dihydrodipicolinate reductase [Mycobacterium smegmatis str. MC2 155] gi|118174202|gb|ABK75098.1| dihydrodipicolinate reductase [Mycobacterium smegmatis str. MC2 155]
  misc_feature (63)..(166): NCBI GI: 91978550 Blast Desc: dihydrodipicolinate reductase [Rhodopseudomonas palustris BisB5] gi|91685006|gb|ABE41308.1| dihydrodipicolinate reductase [Rhodopseudomonas palustris BisB5]
  misc_feature (67)..(199): NCBI GI: 220923632 Blast Desc: SAF domain protein [Methylobacterium nodulans ORS 2060] gi|219948239|gb|ACL58631.1| SAF domain protein [Methylobacterium nodulans ORS 2060]
  misc_feature (63)..(166): NCBI GI: 146343223 Blast Desc: BRADO6433 [Bradyrhizobium sp. ORS278] gi|146196029|emb|CAL80056.1| conserved [Bradyrhizobium sp. ORS278]
  misc_feature (63)..(188): NCBI GI: 163858833 Blast Desc: Bpet4513 [Bordetella petrii DSM 12804] gi|163262561|emb|CAP44864.1| conserved [Bordetella petrii]
  misc_feature (63)..(188): NCBI GI: 124268433 Blast Desc: Mpe_A3249 [Methylibium petroleiphilum PM1] gi|124261208|gb|ABM96202.1| conserved [Methylibium petroleiphilum PM1]
  misc_feature (63)..(166): NCBI GI: 148252763 Blast Desc: BBta_1201 [Bradyrhizobium sp. BTAi1] gi|146404936|gb|ABQ33442.1| BBta_1201 [Bradyrhizobium sp. BTAi1]
MTFVERPNVDESAQSYPRLCHLGPIISDVSQSRHSVRTSHGLFDSDGLICCDIACARFNVILLKRNGRKIDSIARYVKHYEPYNLICLKLGVLVTTAMCYDEQTGQAKIWAGDVVALAKRDLRAGEKLDSEGGFVVYAKFMTAEDPMEISSLPIGLARGIVLKRDVKKDNGLSLKSDKSQAITVRKEIGLSKKEFATSMMNGVNGVH

SEQ ID NO: 23716 - DNA, 1602 bp, Muscodor strobelii
  misc_feature: SGI cDNA ID NO. 568073
  misc_feature: Elevated expression when VOC is produced
  misc_feature: Encodes the peptide sequence at SEQ ID NO 23717
atggtggatagtagcgatcttgaagcgcacaagggaggcaaaggaggggatgtttctcgcaaaatctcatcgacgaatgaaattgtagatagcgactcagatgccgtccaggtcttcgactatgatgattcacggaagattggcgtcaccggcgcggcttttcttatcttgaataagatgatcggcactggtattttctcaacgccgtcaagcatctttagagcaaccgggtctgtgggtgtctcgttgtttctatgggtcatcggtggtgtcctcacattttgcggcttgagtgtgttcctcgaatttggtcttgcgatcccccgatctggaggcgagaaggtatatttagaaagggtatatcgacaccctctttatttggccacctgcatgctcgcatcgcagctgatcctgctcggattttcgtctggaaacgccttggcgttcggagaatatgttctatcagcgcatggtagcgagaacaccacaggctgggcagggcgaggcatcgctgttggggttgtgacctttgcttgtctcttgcacgcggtagccccaaagtggggcttaaggctcgtcaatgtgctgggagttttcaaagtggtcgtgctgcttttcatcgtattcgctggatttgcggcgctcgctgggcacatccgcgtgcctccgccgcacaacttcgataacgcattcaaactcgaagtcacgcccaattatggtggcaccggtgcatacggctattcgaatgcactcctaaatatcatttacagctacaagggttgggagaatgccaattatgttgttggagaactcaggaacccccggaagacactctcgctggcagcaccgttggctgtgggcggtgtgaccatactctatgtgctcgcgaacgttgcctactttgctgccgtgagcaaagacgatattgcgacttccgaagctctagttgcagcggtgttcttcaggaatgtatttggtaacggcactggcgcaagagtgttgcccgtatttgtcgctctcagcaatcttggaaacgttttggctgtgagcttttcacaagctcgtgttaatcaagaattcgccaaagaagcactcttaccttacagcacgttttgggcgtctattaaaccgttcggctcgcctgctgccgcattgtttctgcactggattgtgacggtaattgtacttcttgcacctccgcagggacctgcgtacaactttatcgtcaatctttacacgtaccctggagcttgggtcaatggatttgtctgcggcggattgatttacttgcactacaagaaatcggagcgatggacctcgccttggcacacttatcttccgatcatcgtcgtctatctccttgccaatatcttcttggctgtgacacctttcattcctccaaatggaagctggacatctgacggttatccatattatgtgttccccgttgttggagttggtgtcttactcctcggtgccttctactgggtttgctggactaaaatatggccagcaattggcggatacaagatcgttgcgacgcgcattatcgatgaggatggggttgaagcaatccggtatcataaagagaagctgaagtag

SEQ ID NO: 23717 - protein, 533 aa, Muscodor strobelii
  misc_feature: SGI Peptide ID NO. 568073
  misc_feature (51)..(505): Pfam Id: PF00324 Pfam Desc: Amino acid permease
  misc_feature (257)..(414): Pfam Id: PF00324 Pfam Desc: Amino acid permease
  misc_feature (16)..(533): NCBI GI: 39971273 Blast Desc: MGG_03103 [Magnaporthe grisea 70-15] gi|149210869|ref|XP_001522809.1| MGCH7_ch7g907 [Magnaporthe grisea 70-15] gi|86196862|gb|EAQ71500.1| MGCH7_ch7g907 grisea
  misc_feature (1)..(533): NCBI GI: 46110509 Blast Desc: FG02136.1 [Gibberella zeae PH-1]
  misc_feature (30)..(533): NCBI GI: 189209393 Blast Desc: low-affinity methionine permease [Pyrenophora tritici-repentis Pt-1C-BFP] gi|187977122|gb|EDU43748.1| low-affinity methionine permease [Pyrenophora tritici-repentis
  misc_feature (3)..(531): NCBI GI: 85092429 Blast Desc: NCU04942 [Neurospora crassa OR74A] gi|28920795|gb|EAA30154.1| conserved [Neurospora crassa OR74A]
  misc_feature (37)..(529): NCBI GI: 169613296 Blast Desc: SNOG_09778 [Phaeosphaeria nodorum SN15] gi|111061923|gb|EAT83043.1| SNOG_09778 [Phaeosphaeria nodorum SN15]
  misc_feature (1)..(533): NCBI GI: 256728639 Blast Desc: NECHADRAFT_86135 [Nectria haematococca mpVI 77-13-4]
  misc_feature (43)..(529): NCBI GI: 171693121 Blast Desc: protein product [Podospora anserina] gi|170946509|emb|CAP73310.1| protein product [Podospora anserina]
  misc_feature (11)..(529): NCBI GI: 85090709 Blast Desc: NCU07754 [Neurospora crassa OR74A] gi|28919918|gb|EAA29311.1| conserved [Neurospora crassa OR74A]
  misc_feature (21)..(531): NCBI GI: 116197154 Blast Desc: CHGG_05175 [Chaetomium globosum CBS 148.51] gi|88181088|gb|EAQ88556.1| CHGG_05175 [Chaetomium globosum CBS 148.51]
  misc_feature (30)..(529): NCBI GI: 261354798 Blast Desc: high-affinity methionine permease [Verticillium albo-atrum VaMs.102]
  misc_feature: Useful for introducing or modulating the production of volatile compounds
MVDSSDLEAHKGGKGGDVSRKISSTNEIVDSDSDAVQVFDYDDSRKIGVTGAAFLILNKMIGTGIFSTPSSIFRATGSVGVSLFLWVIGGVLTFCGLSVFLEFGLAIPRSGGEKVYLERVYRHPLYLATCMLASQLILLGFSSGNALAFGEYVLSAHGSENTTGWAGRGIAVGVVTFACLLHAVAPKWGLRLVNVLGVFKVVVLLFIVFAGFAALAGHIRVPPPHNFDNAFKLEVTPNYGGTGAYGYSNALLNIIYSYKGWENANYVVGELRNPRKTLSLAAPLAVGGVTILYVLANVAYFAAVSKDDIATSEALVAAVFFRNVFGNGTGARVLPVFVALSNLGNVLAVSFSQARVNQEFAKEALLPYSTFWASIKPFGSPAAALFLHWIVTVIVLLAPPQGPAYNFIVNLYTYPGAWVNGFVCGGLIYLHYKKSERWTSPWHTYLPIIVVYLLANIFLAVTPFIPPNGSWTSDGYPYYVFPVVGVGVLLLGAFYWVCWTKIWPAIGGYKIVATRIIDEDGVEAIRYHKEKLK

SEQ ID NO: 23718 - DNA, 908 bp, Muscodor strobelii
  misc_feature: SGI EST ID NO. CUFF.55806.0
  misc_feature: Variant of the nucleotide sequence at SEQ ID NO 23716
aggcgagaaggtatatttagaaagtaaatgatcctgagcaaccactatctgatatacaaactgacatggttcggcacgctaggggtatatcgacaccctctttatttggccacctgcatgctcgcatcgcagctgatcctgctcggattttcgtctggaaacgccttggcgttcggagaatatgttctatcagcgcatggtagcgagaacaccacaggctgggcagggcgaggcatcgctgttggggttgtgacctttgcttgtctcttgcacgcggtagccccaaagtggggcttaaggctcgtcaatgtgctgggagttttcaaagtggtcgtgctgcttttcatcgtattcgctggatttgcggcgctcgctgggcacatccgcgtgcctccgccgcacaacttcgataacgcattcaaactcgaagtcacgcccaattatggtggcaccggtgcatacggctattcgaatgcactcctaaatatcatttacagctacaagggttgggagaatgccaattatgttgttggagaactcaggaacccccggaagacactctcgctggcagcaccgttggctgtgggcggtgtgaccatactctatgtgctcgcgaacgttgcctactttgctgccgtgagcaaagacgatattgcgacttccgaagctctagttgcagcggtgttcttcaggaatgtatttggtaacggcactggcgcaagagtgttgcccgtatttgtcgctctcagcaatcttggaaacgttttggctgtgagcttttcacaagctcgtgttaatcaagaattcgccaaagaagcactcttaccttacagcacgttttgggcgtctattaaaccgttcggctcgcctgctgccgcattgtttctgcactggattgtgacggtaat

SEQ ID NO: 23719 - DNA, 1365 bp, Muscodor strobelii
  misc_feature: SGI cDNA ID NO. 568074
  misc_feature: Encodes the peptide sequence at SEQ ID NO 23720
atgggttcaagacagaatgaaggtaaattgagtgctgcgaccagcctcaatgccgccctctttgatttcggggcgaggtttgcgaaggagcaattggagcaacttgcccgggaatgtgacgaacgctgtgaacgggatctggtgccgaggctgcaagctcttttgcgcgacatcgatgcggagcgtgacggatttgagaaacaaaagcaacagaaaatatttgagctacggagtcgattgagcttacttgattctgattcaaatgcagtcgagattgctgtcgcccaactttgctccgtggcaccaaagaccttagatctcatcctgtctgattcgtccctagcctcaccagtccgaatcactacggaagatgcctcggaaaatgttgacaccaccagccctagcagtcctcatcaatctgacgatgagcaattgacccagggagaacgcgatgactcccatatacccatttctacgccttctagtattgacaatcatgtccaagctcgcgtttcggcagagagttctgtcgcttgtgagactccgaaacgacacagaccagatgagctagaggaacatgttgcctccaacaagcggccgaggattgctcatgaggatgacgggcttgaagctggttcatcagtcaagacgatcacgagggaggtcgcttttccgaatttggctacaggcgaatgcatcttccgccattctcatcagaaggggttcttcgttattcgttgcgatcaatgcgatgtgatcttttcagagcctccactagcttacaatcgggcattgaagcacttcgtcaagcatggagtgatcgggggtgacaaggaggagctcacgaatgaagatatctttgaaagattcgcgtaccaagtgtctggagtggacatggctagcaagtattgggttaaggaacatcttggtgccatgcctcacactttcacttcgacgagatctgccgaagtccccagcgacgctgacaatgtagacgatatgatgcggaaacataaagagatcgatgacgatttctatcccccgtttcctaaagtgcgcgaatctcccaggaatcacacagtggaacgggatcaagagggagagacaccccgccggcccttaagaaacgttccacggccagactacgcggaattgattgcgggtaaagccccttgggaagagtcatccgatgtcgggagcgagagaacatttaccactattcaagtcacacattctcgatcctctcataagcgtagacttaccaaaccgggtgttgcaaagccaacgaagaaacacaaagaaactggaccgaccaaaccattcggttacaatgaaccttggccaagacgttcggccccgagttaa

SEQ ID NO: 23720 - protein, 454 aa, Muscodor strobelii
  misc_feature: SGI Peptide ID NO. 568074
MGSRQNEGKLSAATSLNAALFDFGARFAKEQLEQLARECDERCERDLVPRLQALLRDIDAERDGFEKQKQQKIFELRSRLSLLDSDSNAVEIAVAQLCSVAPKTLDLILSDSSLASPVRITTEDASENVDTTSPSSPHQSDDEQLTQGERDDSHIPISTPSSIDNHVQARVSAESSVACETPKRHRPDELEEHVASNKRPRIAHEDDGLEAGSSVKTITREVAFPNLATGECIFRHSHQKGFFVIRCDQCDVIFSEPPLAYNRALKHFVKHGVIGGDKEELTNEDIFERFAYQVSGVDMASKYWVKEHLGAMPHTFTSTRSAEVPSDADNVDDMMRKHKEIDDDFYPPFPKVRESPRNHTVERDQEGETPRRPLRNVPRPDYAELIAGKAPWEESSDVGSERTFTTIQVTHSRSSHKRRLTKPGVAKPTKKHKETGPTKPFGYNEPWPRRSAPS

SEQ ID NO: 23721 - DNA, 3938 bp, Muscodor strobelii
  misc_feature: SGI EST ID NO. CUFF.55915.0
  misc_feature: Variant of the nucleotide sequence at SEQ ID NO 23719
cgacgttcgctctgccgcctatcgattgatatacaacgcaccaacaaatgctcaatatgcatggatgtatatacgacggattcagggctttgtgttgttttaaggccatcttcatatccgccgatgctcccaaagttaccctagccataagttctgctcatctacaaatgggccgacgaaacagcggtgtccagtcgcgattcatttccccgcttcagtgtctgaactcaatttgaatggcgtaagttacaccagtttgagtacatgaaatctcgactgggctcgtgtaactttgcttctgcatagtgtcggggggtacatatgaaggaatacgtgacgcatccgaggttgtgggatgatagctctgtctatctcaccaacagacacgaatattggatcgattgaatagactacaatgggttcaagacagaatgaaggtaaattgagtgctgcgaccagcctcaatgccgccctctttgatttcggggcgaggtttgcgaaggagcaattggagcaacttgcccgggaatgtgacgaacgctgtgaacgggatctggtgccgaggctgcaagctcttttgcgcgacatcgatgcggagcgtgacggatttgagaaacaaaagcaacagaaaatatttgagctacggagtcgattgagcttacttgattctgattcaaatgcagtcgagattgctgtcgcccaactttgctccgtggcaccaaagaccttagatctcatcctgtctgattcgtccctagcctcaccagtccgaatcactacggaagatgcctcggaaaatgttgacaccaccagccctagcagtcctcatcaatctgacgatgagcaattgacccagggagaacgcgatgactcccatatacccatttctacgccttctagtattgacaatcatgtccaagctcgcgtttcggcagagagttctgtcgcttgtgagactccgaaacgacacagaccagatgagctagaggaacatgttgcctccaacaagcggccgaggattgctcatgaggatgacgggcttgaagctggttcatcagtcaagacgatcacgagggaggtcgcttttccgaatttggctacaggcgaatgcatcttccgccattctcatcagaaggggttcttcgttattcgttgcgatcaatgcgatgtgatcttttcagagcctccactagcttacaatcgggcattgaagcacttcgtcaagcatggagtgatcgggggtgacaaggaggagctcacgaatgaagatatctttgaaagattcgcgtaccaagtgtctggagtggacatggctagcaagtattgggttaaggaacatcttggtgccatgcctcacactttcacttcgacgagatctgccgaagtccccagcgacgctgacaatgtagacgatatgatgcggaaacataaagagatcgatgacgatttctatcccccgtttcctaaagtgcgcgaatctcccaggaatcacacagtggaacgggatcaagagggagagacaccccgccggcccttaagaaacgttccacggccagactacgcggaattgattgcgggtaaagccccttgggaagagtcatccgatgtcgggagcgagagaacatttaccactattcaagtcacacattctcgatcctctcataagcgtagacttaccaaaccgggtgttgcaaagccaacgaagaaacacaaagaaactggaccgaccaaaccattcggttacaatgaaccttggccaagacgttcggccccgagttaaggcaagatagaggaattgctgccatatgtaggggattgtgcgactcatattgtgggttgatgtcggcggaattcaattcatgcgtacagccatggctgcaatatcgtgtatctgatagatgtacatctttgggagatggttccaaaataaatatggaccgcatgcttcctcgattcatgttctagcgtctgtctagaccaagacgtctacttcaatagccaattcacattttatagctttgctctaccagactgtagactatcgaattcctgattggtgaatggtacatactcatttccctttccattatccgaaatccagaggagtaaatctccattcatctgtgatgggtcaatacctgcctttttaagcggtactttatcttgtttgttgttgtgtgtcgccgatcgtgcgttcaattgccgtataaagatcggcactgcgtatttaggaaggtgagtgcgcgcgtgtctgtggcatcatttggttagctggtcatgatgagatactatggacaatccaataagtgtagtgataagacagtacgtcggagaattagcatgcgaaccaactaaacataccgtaacaacccttggtagtcgaatcctcctgcgctggtgtcgttcacgtacagcgctgccattcccgccttcccatcatgcccggggagggagacaccgtatactactgcctcgctaacgcctggatatctgcccaggacttccgaaacctctgctgtgctcacattctcacccttccagcggaacgtgtcgcccagacgatcgaggaaaaaccatcggccatctgggtctctccgaagggcatcgccagttcggtagtagcaatctcctttcttgaaaacatcgtacacgtatttcttgttcgtagcctcctcgttgccgtaatatcctgggaaaggcggtgtcagggttggcggctgctttactagaatctcgcccccaacttcgtagctagttcgcgtcgcgaaacctgtccgaggatcacgtgcaatgtcgcctgtgtctgtatcgattgcgaccggtacgaagacatttctgaatcgccatcggttgattaatccgtgatggcctacagaatgcgcgcgaaagtcgcctctcgcgggattgtcaagaggcatgataccctcagttgagttgaagaactcatgtatcgtctcgataccaaaacgctcccggaagggaatccagacatctgggcgcagcccattgccataaatcgccttcacgttgtgttgtttatctaatggcgacgggggtgcagcgaggagataccgcagcgtttctccaacatatacaaaccaggtcgcgcgtgattctctaacatcagcccagaagcgtgagacgctgaactttcgtgcaaggcaaagagtttggccggtaattagttgtgtcatggcagagataccacccgtgccgtgatataagggcatgcaatcatagtaccgttctattggaccttgtcccgtagaagtcacatacgtgttgccacagatcttgctaatgccgtgatggtatccggccgcggctggtactatgcaggcctttggcatgcccgtcgtgccgcttgtatagaataaaccgaaggggtcattcggggtgacaccctcacgaagagtatcaggcggtcgagtcgtaatttgagccccgatgtccgccctcaccgcgtctaagagtaataccctgatgccctttacgtcgagctcagtccgtacctcatctagtcgcgacagtaagtccggcgatccatcagcgaagatcagcgttgtgtttgcaatgccaagacaatgcaataatgcagctttcgacaagttatgatttatgagcgcgggtgctgcgccgatggcccagagacccatccatgctagcacgaagtcagggctgtttgccataaacagtgctactaagtccccgggcttcactccctgcgagaggaagaagtgcgcatattgattcgcgcgtgagaatgcctcggcccaagtgtatgtacgactctcccaccaaatgcattcgagattcggttgcgactgtgcatagtgctcaaagaagtagtatggagatattcggcgttcttgtactaaaggtggggttaggacgacatatcacgtctgaggcggacaacatgagatgaggcatctgag

SEQ ID NO: 23722 - DNA, 1908 bp, Muscodor strobelii
  misc_feature: SGI cDNA ID NO. 568075
  misc_feature: Encodes the peptide sequence at SEQ ID NO 23723
atggcttcaattgctaattattatgagcaaacagctgcgggtgtcgcggcgacagctgccgggcttgcatacctagacgggcggtatcacatacgacaagactatagcgcgatacgagcgaaaagtaagggacaaaagctgtttcaaaaagcagtacaagaacgccgaatatctccatactacttctttgagcactatgcacagtcgcaaccgaatctcgaatgcatttggtgggagagtcgtacatacacttgggccgaggcattctcacgcgcgaatcaatatgcgcacttcttcctctcgcagggagtgaagcccggggacttagtagcactgtttatggcaaacagccctgacttcgtgctagcatggatgggtctctgggccatcggcgcagcacccgcgctcataaatcataacttgtcgaaagctgcattattgcattgtcttggcattgcaaacacaacgctgatcttcgctgatggatcgccggacttactgtcgcgactagatgaggtacggactgagctcgacgtaaagggcatcagggtattactcttagacgcggtgagggcggacatcggggctcaaattacgactcgaccgcctgatactcttcgtgagggtgtcaccccgaatgaccccttcggtttattctatacaagcggcacgacgggcatgccaaaggcctgcatagtaccagccgcggccggataccatcacggcattagcaagatctgtggcaacacgtatgtgacttctacgggacaaggtccaatagaacggtactatgattgcatgcccttatatcacggcacgggtggtatctctgccatgacacaactaattaccggccaaactctttgccttgcacgaaagttcagcgtctcacgcttctgggctgatgttagagaatcacgcgcgacctggtttgtatatgttggagaaacgctgcggtatctcctcgctgcacccccgtcgccattagataaacaacacaacgtgaaggcgatttatggcaatgggctgcgcccagatgtctggattcccttccgggagcgttttggtatcgagacgatacatgagttcttcaactcaactgagggtatcatgcctcttgacaatcccgcgagaggcgactttcgcgcgcattctgtaggccatcacggattaatcaaccgatggcgattcagaaatgtcttcgtaccggtcgcaatcgatacagacacaggcgacattgcacgtgatcctcggacaggtttcgcgacgcgaactagctacgaagttgggggcgagattctagtaaagcagccgccaaccctgacaccgcctttcccaggatattacggcaacgaggaggctacgaacaagaaatacgtgtacgatgttttcaagaaaggagattgctactaccgaactggcgatgcccttcggagagacccagatggccgatggtttttcctcgatcgtctgggcgacacgttccgctggaagggtgagaatgtgagcacagcagaggtttcggaagtcctgggcagatatccaggcgttagcgaggcagtagtatacggtgtctccctccccgggcatgatgggaaggcgggaatggcagcgctgtacgtgaacgacaccagcgcaggaggattcgactaccaagggttgttacgacacgcgcgcactcaccttcctaaatacgcagtgccgatctttatacggcaattgaacgcacgatcggcgacacacaacaacaaacaagataaagtaccgcttaaaaaggcaggtattgacccatcacagatgaatggagatttactcctctggatttcggataatggaaagggaaatgagtatgtaccattcaccaatcaggaattcgatagtctacagtctggtagagcaaagctataa

SEQ ID NO: 23723 - protein, 635 aa, Muscodor strobelii
  misc_feature: SGI Peptide ID NO. 568075
  misc_feature (84)..(522): Pfam Id: PF00501 Pfam Desc: AMP-binding enzyme
  misc_feature (84)..(368): Pfam Id: PF00501 Pfam Desc: AMP-binding enzyme
  misc_feature (445)..(522): Pfam Id: PF00501 Pfam Desc: AMP-binding enzyme
  misc_feature (24)..(635): NCBI GI: 39940430 Blast Desc: MGG_05025 [Magnaporthe grisea 70-15] gi|145010729|gb|EDJ95385.1| MGG_05025 [Magnaporthe grisea 70-15]
  misc_feature (24)..(635): NCBI GI: 156055858 Blast Desc: SS1G_05281 [Sclerotinia sclerotiorum 1980] gi|154703065|gb|EDO02804.1| SS1G_05281 [Sclerotinia sclerotiorum 1980]
  misc_feature (13)..(635): NCBI GI: 154302404 Blast Desc: BC1G_09986 [Botryotinia fuckeliana B05.10] gi|150855474|gb|EDN30666.1| BC1G_09986 [Botryotinia fuckeliana B05.10]
  misc_feature (12)..(635): NCBI GI: 255946123 Blast Desc: Pc20g13500 [Penicillium chrysogenum Wisconsin 54-1255] gi|211588564|emb|CAP86679.1| Pc20g13500 [Penicillium chrysogenum Wisconsin 54-1255]
  misc_feature (24)..(635): NCBI GI: 189199274 Blast Desc: long-chain fatty acid transport protein 3 [Pyrenophora tritici-repentis Pt-1C-BFP] gi|187983073|gb|EDU48561.1| long-chain fatty acid transport protein 3 [Pyrenophora Pt-1C-BFP]
  misc_feature (12)..(635): NCBI GI: 169765093 Blast Desc: [Aspergillus oryzae RIB40] gi|83764872|dbj|BAE55016.1| protein product [Aspergillus oryzae]
  misc_feature (24)..(635): NCBI GI: 119173249 Blast Desc: CIMG_10134 [Coccidioides immitis RS]
  misc_feature (8)..(635): NCBI GI: 261196311 Blast Desc: AMP dependent ligase [Ajellomyces dermatitidis SLH14081] gi|239587692|gb|EEQ70335.1| AMP dependent ligase [Ajellomyces dermatitidis SLH14081]
  misc_feature (24)..(635): NCBI GI: 169611777 Blast Desc: SNOG_09003 [Phaeosphaeria nodorum SN15] gi|111062075|gb|EAT83195.1| SNOG_09003 [Phaeosphaeria nodorum SN15]
  misc_feature (23)..(635): NCBI GI: 225683832 Blast Desc: long-chain fatty acid transport protein [Paracoccidioides brasiliensis Pb03]
  misc_feature (63)..(635): SWISSPROT Homolog: EC 6.2.1.3 Long-chain-fatty-acid--CoA ligase
MASIANYYEQTAAGVAATAAGLAYLDGRYHIRQDYSAIRAKSKGQKLFQKAVQERRISPYYFFEHYAQSQPNLECIWWESRTYTWAEAFSRANQYAHFFLSQGVKPGDLVALFMANSPDFVLAWMGLWAIGAAPALINHNLSKAALLHCLGIANTTLIFADGSPDLLSRLDEVRTELDVKGIRVLLLDAVRADIGAQITTRPPDTLREGVTPNDPFGLFYTSGTTGMPKACIVPAAAGYHHGISKICGNTYVTSTGQGPIERYYDCMPLYHGTGGISAMTQLITGQTLCLARKFSVSRFWADVRESRATWFVYVGETLRYLLAAPPSPLDKQHNVKAIYGNGLRPDVWIPFRERFGIETIHEFFNSTEGIMPLDNPARGDFRAHSVGHHGLINRWRFRNVFVPVAIDTDTGDIARDPRTGFATRTSYEVGGEILVKQPPTLTPPFPGYYGNEEATNKKYVYDVFKKGDCYYRTGDALRRDPDGRWFFLDRLGDTFRWKGENVSTAEVSEVLGRYPGVSEAVVYGVSLPGHDGKAGMAALYVNDTSAGGFDYQGLLRHARTHLPKYAVPIFIRQLNARSATHNNKQDKVPLKKAGIDPSQMNGDLLLWISDNGKGNEYVPFTNQEFDSLQSGRAKL

SEQ ID NO: 23724 - DNA, 2621 bp, Muscodor strobelii
  misc_feature: SGI EST ID NO. CUFF.55916.3
  misc_feature: Variant of the nucleotide sequence at SEQ ID NO 23722
ctcagatgcctcatctcatgttgtccgcctcagacgtgatatgtcgtcctaaccccacctttagtacaagaacgccgaatatctccatactacttctttgagcactatgcacagtcgcaaccgaatctcgaatgcatttggtgggagagtcgtacatacacttgggccgaggcattctcacgcgcgaatcaatatgcgcacttcttcctctcgcagggagtgaagcccggggacttagtagcactgtttatggcaaacagccctgacttcgtgctagcatggatgggtctctgggccatcggcgcagcacccgcgctcataaatcataacttgtcgaaagctgcattattgcattgtcttggcattgcaaacacaacgctgatcttcgctgatggatcgccggacttactgtcgcgactagatgaggtacggactgagctcgacgtaaagggcatcagggtattactcttagacgcggtgagggcggacatcggggctcaaattacgactcgaccgcctgatactcttcgtgagggtgtcaccccgaatgaccccttcggtttattctatacaagcggcacgacgggcatgccaaaggcctgcatagtaccagccgcggccggataccatcacggcattagcaagatctgtggcaacacgtatgtgacttctacgggacaaggtccaatagaacggtactatgattgcatgcccttatatcacggcacgggtggtatctctgccatgacacaactaattaccggccaaactctttgccttgcacgaaagttcagcgtctcacgcttctgggctgatgttagagaatcacgcgcgacctggtttgtatatgttggagaaacgctgcggtatctcctcgctgcacccccgtcgccattagataaacaacacaacgtgaaggcgatttatggcaatgggctgcgcccagatgtctggattcccttccgggagcgttttggtatcgagacgatacatgagttcttcaactcaactgagggtatcatgcctcttgacaatcccgcgagaggcgactttcgcgcgcattctgtaggccatcacggattaatcaaccgatggcgattcagaaatgtcttcgtaccggtcgcaatcgatacagacacaggcgacattgcacgtgatcctcggacaggtttcgcgacgcgaactagctacgaagttgggggcgagattctagtaaagcagccgccaaccctgacaccgcctttcccaggatattacggcaacgaggaggctacgaacaagaaatacgtgtacgatgttttcaagaaaggagattgctactaccgaactggcgatgcccttcggagagacccagatggccgatggtttttcctcgatcgtctgggcgacacgttccgctggaagggtgagaatgtgagcacagcagaggtttcggaagtcctgggcagatatccaggcgttagcgaggcagtagtatacggtgtctccctccccgggcatgatgggaaggcgggaatggcagcgctgtacgtgaacgacaccagcgcaggaggattcgactaccaagggttgttacgacacgcgcgcactcaccttcctaaatacgcagtgccgatctttatacggcaattgaacgcacgatcggcgacacacaacaacaaacaagataaagtaccgcttaaaaaggcaggtattgacccatcacagatgaatggagatttactcctctggatttcggataatggaaagggaaatgagtatgtaccattcaccaatcaggaattcgatagtctacagtctggtagagcaaagctataaaatgtgaattggctattgaagtagacgtcttggtctagacagacgctagaacatgaatcgaggaagcatgcggtccatatttattttggaaccatctcccaaagatgtacatctatcagatacacgatattgcagccatggctgtacgcatgaattgaattccgccgacatcaacccacaatatgagtcgcacaatcccctacatatggcagcaattcctctatcttgccttaactcggggccgaacgtcttggccaaggttcattgtaaccgaatggtctggaatcccgttagccagaaacatacgaggcacaagacatttacaaaaatcatacttggtcggtccagtttctttgtgtttcttcgttggctttgcaacacccggtttggtaagtctacgcttatgagaggatcgagaatgtgtgacttgaatagtggtaaatgttctctactttctcccattagtccctaataaacgttatgcgttcgggtcagttaacttgcctcgctcccgacatcggatgactcttcccaaggggctttacccgcaatcaattccgcgtagtctggccgtggaacgtttcttaagggccggcggggtgtctctccctcttgatcccgttccactgtgtgattcctgggagattcgcgcactttaggaaacgggggatagaaatcgtcatcgatctctttatgtttccgcatcatatcgtctacattgtcagcgtcgctggggacttcggcagatctcgtcgaagtgactggccatatcagcatgctgactcagagaaatccaaaccaaa

SEQ ID NO: 23725 - DNA, 807 bp, Muscodor strobelii
  misc_feature: SGI cDNA ID NO. 568076
  misc_feature: Elevated expression when VOC is produced
  misc_feature: Encodes the peptide sequence at SEQ ID NO 23726
atggccgcctccaagttccaaagtgcggttgaagtaacgcatatcggcactgcaacagccatcctgtcgatagatgggatcaatctgttaacagacccgtacttctcgccggacggcacaacgttcgatgtgggaatcgcagtcattaagagtcatggcgatccggccctctcaatggctaacctcccacccatcgacgccgtgctacttagccatgaagatcatccagataatctcgatcacctagggcgtcagcttctggacgggaggcgtgtcttgacaacgcttgacggcgcagagaaacttgctcctagaccgggcgtgaaggggcttgcgccatgggaaagcactgtcctcgagataggcggacgccggtttgaaatcactgggacgccatgccagcacttgccaggcggggagtgcactgggttcgtgatctgcgagccatcgtttgggactgctgcagacgggaagccaaatgctatttacttctcgggtgacactgtatatctacctgagtttgcaaagatcgcagagaaatggcacgtctcgctcgcgctgcttaaccttggtaaagctatcatcaaaatgccaggcgagaccgagccgctcatgatcacgatggatgggaagcaggctgcacagctgacgaaggaacttgggattgacgtcgtcttaccgatgcatttcgagagctgggagcactttagcgaaggaagagaacccttgcagaaggctcttgaggcggaaggcattggtcataaagtcatgtggttggagcccggcgttgctacaaaggttttctaa

SEQ ID NO: 23726 - protein, 268 aa, Muscodor strobelii
  misc_feature: SGI Peptide ID NO. 568076
  misc_feature (5)..(263): NCBI GI: 116192551 Blast Desc: CHGG_05993 [Chaetomium globosum CBS 148.51] gi|88181906|gb|EAQ89374.1| CHGG_05993 [Chaetomium globosum CBS 148.51]
  misc_feature (1)..(268): NCBI GI: 242773847 Blast Desc: Zn-dependent hydrolases of the beta-lactamase fold, [Talaromyces stipitatus ATCC 10500] gi|218721941|gb|EED21359.1| Zn-dependent hydrolases of the beta-lactamase fold, [Talaromyces
  misc_feature (1)..(268): NCBI GI: 212531741 Blast Desc: PMAA_065860 [Penicillium marneffei ATCC 18224] gi|210071391|gb|EEA25480.1| PMAA_065860 [Penicillium marneffei ATCC 18224]
  misc_feature (1)..(268): NCBI GI: 121713194 Blast Desc: Zn-dependent hydrolases of the beta-lactamase fold, [Aspergillus clavatus NRRL 1] gi|119402361|gb|EAW12782.1| Zn-dependent hydrolases of the beta-lactamase fold, [Aspergillus
  misc_feature (1)..(263): NCBI GI: 256725000 Blast Desc: NECHADRAFT_34524 [Nectria haematococca mpVI 77-13-4]
  misc_feature (2)..(267): NCBI GI: 171684685 Blast Desc: protein product [Podospora anserina] gi|170942303|emb|CAP67955.1| protein product [Podospora anserina]
  misc_feature (3)..(267): NCBI GI: 169776742 Blast Desc: [Aspergillus oryzae RIB40] gi|238502175|ref|XP_002382321.1| conserved [Aspergillus flavus NRRL3357] gi|83771573|dbj|BAE61704.1| protein product oryzae]
  misc_feature (4)..(263): NCBI GI: 171679317 Blast Desc: protein product [Podospora anserina] gi|170939284|emb|CAP64512.1| protein product [Podospora anserina]
  misc_feature (4)..(267): NCBI GI: 156039808 Blast Desc: SS1G_12040 [Sclerotinia sclerotiorum 1980] gi|154696097|gb|EDN95835.1| SS1G_12040 [Sclerotinia sclerotiorum 1980]
  misc_feature (9)..(268): NCBI GI: 119501525 Blast Desc: NFIA_044410 [Neosartorya fischeri NRRL 181] gi|119415685|gb|EAW25622.1| conserved [Neosartorya fischeri NRRL 181]
  misc_feature: Useful for introducing or modulating the production of volatile compounds
MAASKFQSAVEVTHIGTATAILSIDGINLLTDPYFSPDGTTFDVGIAVIKSHGDPALSMANLPPIDAVLLSHEDHPDNLDHLGRQLLDGRRVLTTLDGAEKLAPRPGVKGLAPWESTVLEIGGRRFEITGTPCQHLPGGECTGFVICEPSFGTAADGKPNAIYFSGDTVYLPEFAKIAEKWHVSLALLNLGKAIIKMPGETEPLMITMDGKQAAQLTKELGIDVVLPMHFESWEHFSEGREPLQKALEAEGIGHKVMWLEPGVATKVF

SEQ ID NO: 23727 - DNA, 2087 bp, Muscodor strobelii
  misc_feature: SGI EST ID NO. CUFF.55822.0
  misc_feature: Variant of the nucleotide sequence at SEQ ID NO 23725
gattattgtgattacctagcggccttggcagcctacaaaggtatgccgctcagaggccggaatctgttccataatgccaagcccacagactatggcgcgagagcatgcgctggtagagactactgcacgttgcggaaaacggggttgcagtcaatgagatgaagaatggcgcccgaattcaaattacactaaacgagggatatccttgtcaggaaagagggtaaatactacgtgattgtatgacctagtcaccaaagcggcagacgtcatatgtcgtatttggtatataatgcaatgaacttcgcagtcagatgcaagctgctcagtcttgttggcagctcaagtaaatagtccaataagcgaccggcaaagcattgcgggttggaaaagacgcactatggccgcctccaagttccaaagtgcggttgaagtaacgcatatcggcactgcaacagccatcctgtcgatagatgggatcaatctgttaacagacccgtacttctcgccggacggcacaacgttcgatgtgggaatcgcagtcattaagagtcatggcgatccggccctctcaatggctaacctcccacccatcgacgccgtgctacttagccatgaagatcatccagataatctcgatcacctagggcgtcagcttctggacgggaggcgtgtcttgacaacgcttgacggcgcagagaaacttgctcctagaccgggcgtgaaggggcttgcgccatgggaaagcactgtcctcgagataggcggacgccggtttgaaatcactgggacgccatgccagcacttgccaggcggggagtgcactgggttcgtgatctgcgagccatcgtttgggactgctgcagacgggaagccaaatgctatttacttctcgggtgacactgtatatctacctgagtttgcaaagatcgcagagaaatggcacgtctcgctcgcgctgcttaaccttggtaaagctatcatcaaaatgccaggcgagaccgagccgctcatgatcacgatggatgggaagcaggctgcacagctgacgaaggaacttgggattgacgtcgtcttaccgatgcatttcgagagctgggagcactttagcgaaggaagagaacccttgcagaaggctcttgaggcggaaggcattggtcataaagtcatgtggttggagcccggcgttgctacaaaggttttctaatgtcatcgcagcccccgagcatcgttccagatcacctacgagtggatgagttagttttttaggacaagggcgaagccaggaggaccgtgacagagacgcccaatgccgatgaaatcttgtatccgaggacgatgttgggcaccttacgtcgctttgcaacgttaagtcagtcgcctcggcttcattccgtaccatgtcagatagcgcaacgatatcattttggccccctatatcgtccagcagttttgtcggatagtatcatctttgcgaacttctaaatgtgttcttctgctttaaatccgccggacagtatccattgagctgcgcagtcgcgaggagacggtgatagcaaacaagccattggattctgctgccataagcaagtgtcatatccatgatgtattatgtatacgtgatcatataatgatgaaaacgccgacgcaactcggatgcaggaacgcgagttgctattcgaactcaaatgaccgtagttgcgcactgatttgcgttgggcaaaggagtatgatcagaagttttccaatcacgatgcatcggacacagatcgcaagcagatcgccgagccacgacgcaatgcaccgcaattgtctcaaattccagaatcattgccacatggctctgttgtcgtcctccgcatcctcggggctgcgatgtgacgtttttggcccaggattggtgacctccgagggcacctccattatatccatttccctcgctgtcaatttctggggtgcaatgcctgcgcaactgccgagaagcattgccaagacccaatgggaggcggcaatccagaactaaactcggttatttttgccgcatttatacccgggcttcaaatggggttcgcgtcgcggagattgcaatg

SEQ ID NO: 23728 - DNA, 1626 bp, Muscodor strobelii
  misc_feature: SGI cDNA ID NO. 568077
  misc_feature: Reduced expression when VOC is produced
  misc_feature: Encodes the peptide sequence at SEQ ID NO 23729
atggccacgctctttcacaatggtcgaattttccaatcgggacagaaaggatccgatcaatcatttgccgaatgcatgttaacggacgggagcggcgtgatccggcatgttggttcactgacggatgacaagatctcgcaagctgaggcgagcggagtttcgaagcaagacttgtgtcagcgaatcgttttgcccggattcattgatggccacatgcatctcctgttactcggacagtctcttcaaaaagtcagtcttcagaactgcaagaacctcgaggacatcaggaacacaatcaaagagtttgccgtggcaaacccaaaactacaacggatcttcgtcaaagactggatgcactcgatgacggatggcatggctttggcgagcatgctcgacgatttggatccacgcccgattttcatcgacgcgaaggatcttcactcaacatggtgtaacagtgtagccttgagcgagttaggcgtacaggatatgcctgaccccgaaggaggagaaatccaacgtgatgcggacggaaaggcatctggtctcttgatcgagtctgcggctatcactgtagtgtggccgtatgccgctaaggtggcgagcatggaagagaagctgagcacattggcagccgcattcaaagcgtacgctgcggccggttacacgggacttattgaaatggcaatggacgaaaatggttgggaagcgttacagaaattgcgacagcaagaagtactccccattcgtctggcggtgcactggctgatcagccctcgcaaaacggaagatgaggtcttggagcaagtcgatcgggcgatagagctaaacagacagttcaacgaagaggcgagcccaagctgtcgcgtagtaggcatcaagattatcggcgatggcatcatagatggatgtactgccggtcttacagagccttactcatcgaatggcatttcgcgcgagccattgtggactctagaagaattggccccagctgtgaagaaggcggaccgagcaggtcttcagtgcgcgatccatgctattggagacaagactatcaggaccgcgattgatgttttagagcagaacgctacgccaggacgacgacatcgaatcgagcatctggaattagcatcacctgaggatgctgcacggctgggcaaactaggcatcactgcatcaatccaggcggtgcatgctgaccccgccattttgcgagcatggcctaagttgctgggcgaagagcgggtgaagcgtgcatttgcctataaagagatggctgatgctggtgcagtcctggcgctgggttccgacagtccaggtgccccttaccagccattcacgaatatctacacggcgactacccgtcgttcagctcgcgagcccgattgccaggagacagttaaccctcactttgcgcttgagctatctgcggccattgcggcactgacagagggcactgcatactcgtgttttgctgacggatggtcggggaagcttgagccaggacgctcggcagatttcgctatcgtcgatatggactgggacccagaaaaattgcttcagtcgagggttgtgcaaacctggttcatgggaaggaaaatatttgacgccgataccgatccttaa

SEQ ID NO: 23729 - protein, 541 aa, Muscodor strobelii
  misc_feature: SGI Peptide ID NO. 568077
  misc_feature (62)..(509): Pfam Id: PF07969 Pfam Desc: Amidohydrolase family
  misc_feature (1)..(537): NCBI GI: 115384250 Blast Desc: conserved [Aspergillus terreus NIH2624] gi|114196364|gb|EAU38064.1| conserved [Aspergillus terreus NIH2624]
  misc_feature (1)..(536): NCBI GI: 212530766 Blast Desc: conserved [Penicillium marneffei ATCC 18224] gi|210074938|gb|EEA29025.1| conserved [Penicillium marneffei ATCC 18224]
  misc_feature (1)..(535): NCBI GI: 242817616 Blast Desc: conserved [Talaromyces stipitatus ATCC 10500] gi|218713457|gb|EED12881.1| conserved [Talaromyces stipitatus ATCC 10500]
  misc_feature (1)..(535): NCBI GI: 119481523 Blast Desc: amidohydrolase family protein [Neosartorya fischeri NRRL 181] gi|119408944|gb|EAW18893.1| amidohydrolase family protein [Neosartorya fischeri NRRL 181]
  misc_feature (1)..(535): NCBI GI: 169774603 Blast Desc: [Aspergillus oryzae RIB40] gi|83769632|dbj|BAE59767.1| protein product [Aspergillus oryzae]
  misc_feature (1)..(535): NCBI GI: 71001964 Blast Desc: conserved [Aspergillus fumigatus Af293] gi|66853301|gb|EAL93625.1| conserved [Aspergillus fumigatus Af293] gi|159129721|gb|EDP54835.1| conserved [Aspergillus A1163]
  misc_feature (1)..(535): NCBI GI: 238496821 Blast Desc: exoenzymes regulatory protein aepA precursor, [Aspergillus flavus NRRL3357] gi|220694526|gb|EED50870.1| exoenzymes regulatory protein aepA precursor, [Aspergillus flavus
  misc_feature (2)..(537): NCBI GI: 171695650 Blast Desc: protein product [Podospora anserina] gi|170948067|emb|CAP60231.1| protein product [Podospora anserina]
  misc_feature (2)..(537): NCBI GI: 169624379 Blast Desc: SNOG_15448 [Phaeosphaeria nodorum SN15] gi|111055993|gb|EAT77113.1| SNOG_15448 [Phaeosphaeria nodorum SN15]
  misc_feature (1)..(537): NCBI GI: 189206998 Blast Desc: amidohydrolase family protein [Pyrenophora tritici-repentis Pt-1C-BFP] gi|187975926|gb|EDU42552.1| amidohydrolase family protein [Pyrenophora tritici-repentis
  misc_feature: Useful for introducing or modulating the production of volatile compounds
MATLFHNGRIFQSGQKGSDQSFAECMLTDGSGVIRHVGSLTDDKISQAEASGVSKQDLCQRIVLPGFIDGHMHLLLLGQSLQKVSLQNCKNLEDIRNTIKEFAVANPKLQRIFVKDWMHSMTDGMALASMLDDLDPRPIFIDAKDLHSTWCNSVALSELGVQDMPDPEGGEIQRDADGKASGLLIESAAITVVWPYAAKVASMEEKLSTLAAAFKAYAAAGYTGLIEMAMDENGWEALQKLRQQEVLPIRLAVHWLISPRKTEDEVLEQVDRAIELNRQFNEEASPSCRVVGIKIIGDGIIDGCTAGLTEPYSSNGISREPLWTLEELAPAVKKADRAGLQCAIHAIGDKTIRTAIDVLEQNATPGRRHRIEHLELASPEDAARLGKLGITASIQAVHADPAILRAWPKLLGEERVKRAFAYKEMADAGAVLALGSDSPGAPYQPFTNIYTATTRRSAREPDCQETVNPHFALELSAAIAALTEGTAYSCFADGWSGKLEPGRSADFAIVDMDWDPEKLLQSRVVQTWFMGRKIFDADTDP

SEQ ID NO: 23730 - DNA, 2202 bp, Muscodor strobelii
  misc_feature: SGI cDNA ID NO. 568078
  misc_feature: Encodes the peptide sequence at SEQ ID NO 23731
atggctatcttcaacaacagtatacactggttagcaccgacctctattatctctggactagttgggggcggtttacttgctactgctcatcatctgtattttgcctctctcgacggagcaacagcggaggggtaccgacgtgtagctggatatagaataccggaccagcaattcaccttggccatcggcactgcgtttgcattcgtcattcgctcgttgctgctgtttgcagtatcgacatcctacgtgcagatgctgtggcacgcggtgcgacgcgctcgccaaggcagtactcttagtgagattgacgctctattctctatatttcaaaacctgccagcgttcggaaatatctctattttgtggaaacatccatttcttctagcaattggggctctgggatggctactacctattgcattcattttcccacctgctactctcttcgtggttgtggcagcgaggaacacatcaaacctacaagttgttccaaactttgactttacgagtctccgttacgtcgcaggcatgcccgacgcgcagtcaacttttggttccgatctgggaaatggcacgtaccagtactacgagaggtatagctataatggtcccaatagtgaagtacaaagaattgctactgctgttttaggtagtgggaacatcttaccgattgctccgcccggaatcaactcgacttgggaactggatttcttcggcccttctataagttgctcaccagtccagagagaaccgagaattaagatcgagagaaatatagcacattggctttggaatgagactgatccgacgggctatacaaactgcaacatgccacctggctatctctcatggacctcgagtgcaaactcaacgtctagtccttttatcaccaccggtaatggaaacacaactagcctagatacgagcactccttcctctggcatctaccttgccattttgccggacgtgttccacggtaattcttgtgagcgtcaaggtaaagctacgccatctcgacccttaggcgatataaacgccacattactcgaatgcgtgctacataacgcatcgtaccactcgaaattcagctacgagtccggcaggcaaaatatatcatcgcaggtgaaccgactagaagctgtgaatctttactccatcgccgtttatggccctgtcctcgatccggggcagtacacgggctgttttcttttgacagcagtccactctggtccttgtacttttgatgaaagcgtgcttcgtgtgctctcttatacagccatcctggatgcttttcagaagctggtggtcggctctgtctcgtttgcatcctttgacacggaggcttactccgttgacactaagcttttttccacgactctgtacgatacacaggagctcgagcctcttgtagactcggtaggattatacgacggtagtaatagccgggtaaacagacttcaaggagcatatcagacaattaacgcaacgaggggagagacactatccgatgttctaaagcgcaattccgagcgctcccttcaggatgcattggaggaagcctttcagaactatacaataagcctcattagttctgacctacttcaacccaagatgtcatccgaattcgccccttcaaaggtgaatgtcacaatcaccacgcaggatgtaatatatcgctactcagcaactcaattatggcttgcctacggaattgccatcgctatttccattatagcacttgtcccagggctgtttgctatacgagcaagcggtgccagctacagcagagatttttcgactgtctaccgaatggcacaacaagctgtcttgagcgtcgagatgcgttcagaggacgcacatggagccgatccactccctaagtatctcaaaaccgccgttttgagctttgtcacggcacaaggctcagcgaatgtaaacttgaatgagtctgcattaaacttggacgaacatgccgacttgactttcgcggaaatccaaagctcaacgggcgaggcaagctttctatctaacagctacatgtcgcagagctcctcagaggcttcattctcaaatagtaattccgcttaccccgcaggccaccttccaccgaccgaaatcgccgaacctgaagaccctgaacttcgccacggtcaaagatctagacacttgttacagagaagtgaaactactgatgtcatataa

SEQ ID NO: 23731 - protein, 733 aa, Muscodor strobelii
  misc_feature: SGI Peptide ID NO. 568078
  misc_feature (4)..(636): NCBI GI: 256720670 Blast Desc: NECHADRAFT_85610 [Nectria haematococca mpVI 77-13-4]
  misc_feature (1)..(636): NCBI GI: 121706606 Blast Desc: ACLA_046040 [Aspergillus clavatus NRRL 1] gi|119399713|gb|EAW10139.1| ACLA_046040 [Aspergillus clavatus NRRL 1]
  misc_feature (11)..(671): NCBI GI: 46127387 Blast Desc: FG08071.1 [Gibberella zeae PH-1]
  misc_feature (29)..(629): NCBI GI: 46117611 Blast Desc: FG04635.1 [Gibberella zeae PH-1]
  misc_feature (8)..(642): NCBI GI: 119466981 Blast Desc: NFIA_047350 [Neosartorya fischeri NRRL 181] gi|119405449|gb|EAW15400.1| conserved [Neosartorya fischeri NRRL 181]
  misc_feature (5)..(641): NCBI GI: 154313165 Blast Desc: BC1G_05584 [Botryotinia fuckeliana B05.10] gi|150849669|gb|EDN24862.1| BC1G_05584 [Botryotinia fuckeliana B05.10]
  misc_feature (6)..(644): NCBI GI: 67522186 Blast Desc: AN1550.2 [Aspergillus nidulans FGSC A4] gi|40745101|gb|EAA64257.1| AN1550.2 [Aspergillus nidulans FGSC A4] gi|259486876|tpe|CBF85091.1| TPA: conserved [Aspergillus FGSC
  misc_feature (8)..(652): NCBI GI: 238508002 Blast Desc: conserved [Aspergillus flavus NRRL3357] gi|220688721|gb|EED45073.1| conserved [Aspergillus flavus NRRL3357]
  misc_feature (8)..(642): NCBI GI: 121704407 Blast Desc: conserved [Aspergillus clavatus NRRL 1] gi|119398612|gb|EAW09041.1| conserved [Aspergillus clavatus NRRL 1]
  misc_feature (8)..(278): NCBI GI: 67525573 Blast Desc: AN3244.2 [Aspergillus nidulans FGSC A4] gi|40743963|gb|EAA63145.1| AN3244.2 [Aspergillus nidulans FGSC A4] gi|259485791|tpe|CBF83110.1| TPA: conserved [Aspergillus FGSC
MAIFNNSIHWLAPTSIISGLVGGGLLATAHHLYFASLDGATAEGYRRVAGYRIPDQQFTLAIGTAFAFVIRSLLLFAVSTSYVQMLWHAVRRARQGSTLSEIDALFSIFQNLPAFGNISILWKHPFLLAIGALGWLLPIAFIFPPATLFVVVAARNTSNLQVVPNFDFTSLRYVAGMPDAQSTFGSDLGNGTYQYYERYSYNGPNSEVQRIATAVLGSGNILPIAPPGINSTWELDFFGPSISCSPVQREPRIKIERNIAHWLWNETDPTGYTNCNMPPGYLSWTSSANSTSSPFITTGNGNTTSLDTSTPSSGIYLAILPDVFHGNSCERQGKATPSRPLGDINATLLECVLHNASYHSKFSYESGRQNISSQVNRLEAVNLYSIAVYGPVLDPGQYTGCFLLTAVHSGPCTFDESVLRVLSYTAILDAFQKLVVGSVSFASFDTEAYSVDTKLFSTTLYDTQELEPLVDSVGLYDGSNSRVNRLQGAYQTINATRGETLSDVLKRNSERSLQDALEEAFQNYTISLISSDLLQPKMSSEFAPSKVNVTITTQDVIYRYSATQLWLAYGIAIAISIIALVPGLFAIRASGASYSRDFSTVYRMAQQAVLSVEMRSEDAHGADPLPKYLKTAVLSFVTAQGSANVNLNESALNLDEHADLTFAEIQSSTGEASFLSNSYMSQSSSEASFSNSNSAYPAGHLPPTEIAEPEDPELRHGQRSRHLLQRSETTDVI

SEQ ID NO: 23732 - DNA, 1202 bp, Muscodor strobelii
  misc_feature: SGI EST ID NO. CUFF.55831.0
  misc_feature: Variant of the nucleotide sequence at SEQ ID NO 23730
ccgaactgaaatcaaatggctatcttcaacaacagtatacactggttagcaccgacctctattatctctggactagttgggggcggtttacttgctactgctcatcatctgtattttgcctctctcgacggagcaacagcggaggggtaccgacgtgtagctggatatagaataccggaccagcaattcaccttggccatcggcactgcgtttgcattcgtcattcgctcgttgctgctgtttgcagtatcgacatcctacgtgcagatgctgtggcacgcggtgcgacgcgctcgccaaggcagtactcttagtgagattgacgctctattctctatatttcaaaacctgccagcgttcggaaatatctctattttgtggaaacatccatttcttctagcaattggggctctgggatggctactacctattgcattcattttcccacctgctactctcttcgtggttgtggcagcgaggaacacatcaaacctacaagttgttccaaactttgactttacgagtctccgttacgtcgcaggcatgcccgacgcgcagtcaacttttggttccgatctgggaaatggcacgtaccagtactacgagaggtatagctataatggtcccaatagtgaagtacaaagaattgctactgctgttttaggtagtgggaacatcttaccgattgctccgcccggaatcaactcgacttgggaactggatttcttcggcccttctataagttgctcaccagtccagagagaaccgagaattaagatcgagagaaatatagcacattggctttggaatgagactgatccgacgggctatacaaactgcaacatgccacctggctatctctcatggacctcgagtgcaaactcaacgtctagtccttttatcaccaccggtaatggaaacacaactagcctagatacgagcactccttcctctggcatctaccttgccattttgccggacgtgttccacggtaattcttgtgagcgtcaaggtaaagctacgccatctcgacccttaggcgatataaacgccacattactcgaatgcgtgctacataacgcatcgtaccactcgaaattcagctacgagtccggcaggcaaaatatatcatcgcaggtgaaccgactagaagctgtgaatctttactccatcgccgtttatggccctgtcctcgatccggg

SEQ ID NO: 23733 - DNA, 975 bp, Muscodor strobelii
  misc_feature: SGI cDNA ID NO. 568079
  misc_feature: Encodes the peptide sequence at SEQ ID NO 23734
atgttctctgccgccgttatcacagccgccctggccgtgctaccctcagcctcagcacaaggcgattatatcctcactatctggaaagacgctggctgcagcggagatggcgacaagttcgaatggcacacgttcgacccgaaccctgatggatgtcagcagggtagcattatcccaacggacgactgggagcatgacgaccagggtaactggaagggttatatcgatggagatggtctagactctcgctgcacgatcgagcttcttgaccaaaacactgtcgagccggacagatgcggtgactcattcgccaccatcgatggatcggtttcgcatacatgccatgaggtctggttccaggaaacacttggcacacgatacacttgtgacgctgcgagcaaaaaactagcgcgctcatctcctaaggttcaaggagtggttaatgatgaccttgagacgcccaagctcaagaaacgtcatgctgcgcgtgatctgagcatgatccggcgcagcaatgtgctgaaggctcgcgaagactgcaaatgggccggcagcgacgtggtgattttgcgcgatgctgagggtgtcaaagtgactggcgatatcccctgcaagggagaggaggaatgcacattcatggatagtgttgaggttggatggagtgcaacacagacattcggtatttcctcgacggtcggtgctagcttctttgacatcgtcgaggcatctatcaccttctcctacgaatactcgtacacagagagtgagacgcgcacaaagtcttatcaagtgactgctcctcctggctccactggtcatcttgaatggactcagtactacgagtgcactaccggtcatttcgaaggcgaatgtgctgattgggatactaatgttgatggcgatgcttgtatcccaaagacacttgaagacggtaagacccctgatggtctgatgcgctttgtacagagtctgtaa

SEQ ID NO: 23734 - protein, 324 aa, Muscodor strobelii
  misc_feature: SGI Peptide ID NO. 568079
  misc_feature (51)..(321): NCBI GI: 46112995 Blast Desc: FG02914.1 [Gibberella zeae PH-1]
MFSAAVITAALAVLPSASAQGDYILTIWKDAGCSGDGDKFEWHTFDPNPDGCQQGSIIPTDDWEHDDQGNWKGYIDGDGLDSRCTIELLDQNTVEPDRCGDSFATIDGSVSHTCHEVWFQETLGTRYTCDAASKKLARSSPKVQGVVNDDLETPKLKKRHAARDLSMIRRSNVLKAREDCKWAGSDVVILRDAEGVKVTGDIPCKGEEECTFMDSVEVGWSATQTFGISSTVGASFFDIVEASITFSYEYSYTESETRTKSYQVTAPPGSTGHLEWTQYYECTTGHFEGECADWDTNVDGDACIPKTLEDGKTPDGLMRFVQSL

SEQ ID NO: 23735 - DNA, 870 bp, Muscodor strobelii
  misc_feature: SGI cDNA ID NO. 568080
  misc_feature: Encodes the peptide sequence at SEQ ID NO 23736
atgcatttcaatgccctcgtcgcctcagctctcttcgccaccagtaatgctcgcgatttcttaactcagggcttcttaagaaactacactgatctctgcggtacacctcctcctaccgagcgacagagagcagatatgcatattatgtggcagaatgagcaagccaaggacaccaatgttctggtcagcgatatggtcgctggcgatgggttttcggtcaatgtctactttcatgtcgttgccgcttctaaggaattcaaagatggttatcttacgcaacaaatgatagatgatcaactggacgtcttgaatagtgcgtacgcgcctcatcagatctccttcaacctcatgggcaccgattggacggtcaacggcagttgggcagcggacaacaacgatttcgaaatgaaggcagcgctgcgcaggggcagctactccgatctaaatatttatctccttagttcgatggacggcggtactctcggccactgcgcattccctcaacccgatcacagtgatggatcctggactttcatccatgatgggtgctcggtcctcggtcagacggtgcccggaggtaacactacggctacgccttacaataaaggcttggcagctgttcatgaggtcggtcactggttgagcttgcttcacacttttgaaaatggctgtggggttggaggggacttcgtcgacgatactaatgctgaggagtcggcgacctgggggtgtcccaatgagcgcacgacttgtggtgtggctgctcctatccataactatatggactatagcgatgatgcctgtaaaacagagttcacccctggccaggtagctcgtatgtataatgcttggaacacgtaccgcaaatag

SEQ ID NO: 23736 - protein, 289 aa, Muscodor strobelii
  misc_feature: SGI Peptide ID NO. 568080
  misc_feature (255)..(280): Pfam Id: PF05572 Pfam Desc: Pregnancy-associated plasma protein-A
  misc_feature (33)..(288): NCBI GI: 261352606 Blast Desc: metalloprotease [Verticillium albo-atrum VaMs.102]
  misc_feature (33)..(289): NCBI GI: 171676591 Blast Desc: protein product [Podospora anserina] gi|170936362|emb|CAP61020.1| protein product [Podospora anserina]
  misc_feature (33)..(288): NCBI GI: 119180007 Blast Desc: CIMG_08674 [Coccidioides immitis RS] gi|33323431|gb|AAQ07436.1| metalloprotease 1 precursor [Coccidioides posadasii] gi|240110235|gb|EER28394.1| 1 precursor
  misc_feature (33)..(289): NCBI GI: 256724473 Blast Desc: NECHADRAFT_98075 [Nectria haematococca mpVI 77-13-4]
  misc_feature (33)..(288): NCBI GI: 85085015 Blast Desc: NCU07200 [Neurospora crassa OR74A] gi|28918516|gb|EAA28189.1| NCU07200 [Neurospora crassa OR74A] gi|28950215|emb|CAD71082.1| related to metalloprotease MEP1
  misc_feature (33)..(288): NCBI GI: 39945842 Blast Desc: MGG_08041 [Magnaporthe grisea 70-15] gi|145019277|gb|EDK03505.1| MGG_08041 [Magnaporthe grisea 70-15]
  misc_feature (66)..(289): NCBI GI: 46102648 Blast Desc: FG00028.1 [Gibberella zeae PH-1]
  misc_feature (33)..(288): NCBI GI: 258564494 Blast Desc: metalloprotease 1 [Uncinocarpus reesii 1704] gi|237908499|gb|EEP82900.1| metalloprotease 1 [Uncinocarpus reesii 1704]
  misc_feature (69)..(288): NCBI GI: 261359345 Blast Desc: metalloprotease [Verticillium albo-atrum VaMs.102]
  misc_feature (70)..(289): NCBI GI: 258576093 Blast Desc: metalloprotease 1 [Uncinocarpus reesii 1704] gi|237902494|gb|EEP76895.1| metalloprotease 1 [Uncinocarpus reesii 1704]
  misc_feature (135)..(289): SWISSPROT Homolog: EC 3.4.24.79 Pappalysin-1
MHFNALVASALFATSNARDFLTQGFLRNYTDLCGTPPPTERQRADMHIMWQNEQAKDTNVLVSDMVAGDGFSVNVYFHVVAASKEFKDGYLTQQMIDDQLDVLNSAYAPHQISFNLMGTDWTVNGSWAADNNDFEMKAALRRGSYSDLNIYLLSSMDGGTLGHCAFPQPDHSDGSWTFIHDGCSVLGQTVPGGNTTATPYNKGLAAVHEVGHWLSLLHTFENGCGVGGDFVDDTNAEESATWGCPNERTTCGVAAPIHNYMDYSDDACKTEFTPGQVARMYNAWNTYRK

SEQ ID NO: 23737 - DNA, 882 bp, Muscodor strobelii
  misc_feature: SGI cDNA ID NO. 568081
  misc_feature: Encodes the peptide sequence at SEQ ID NO 23738
atgacatctcggtcaagctcgccagtttgccttatcaatggagataatatgccatgtatgttatatggcaccgcgaaacgagaacgagaccgaccttctcagctacacatagctctacaacaagattaccgcggcattgactcttcaacctctaattactatcattcagaaaaggaagacggtgtagccctcgcggagtttctgtcgagccattcagtatcacgaaaggatctattcatccaatcaaaatatgcggcccagtcactacatacagagacgcgaccatatgcgcttgaggacgacatcacagtccgcgtgtttaaaagcgtactgtgcagcgcaagtgccctcagagttgatgtaatcgatgcatatcttctgcatacacctctcgaatctcaaaacgaccgtttgcaggcatgggatgcattagagagcatcgtagatcgtggcggcattcgttaccttggcatcgcgaatgtaaagatcgaaaccctccggacactctttgaacaagctcatgtaaagccgaagattattcagaactggtttcgaagaacgacaggatatgaccgagaggttgtaagattctgcagagatcatggtatttcttaccagatgtttggtgttttcgacaacgagaacacagctttgctcgaatgtaacccagttcttcgacatactggaccgagcacaactagacaccagtccttacttcgaatactctttaagacagcagcagtaaatggtcttcagctctgcatattggacggcgcgacagattctgggcatatggcggataatgttgctgcatctcgctacgcaggagatctgagtcgacaggatgtacaagacttcatgggtatcattgggtggttttga

SEQ ID NO: 23738 - protein, 293 aa, Muscodor strobelii
  misc_feature: SGI Peptide ID NO. 568081
  misc_feature (11)..(291): Pfam Id: PF00248 Pfam Desc: Aldo/keto reductase family
  misc_feature (113)..(177): Pfam Id: PF00248 Pfam Desc: Aldo/keto reductase family
  misc_feature (17)..(271): NCBI GI: 256722766 Blast Desc: NECHADRAFT_105652 [Nectria haematococca mpVI 77-13-4]
  misc_feature (16)..(269): NCBI GI: 256735348 Blast Desc: NECHADRAFT_103180 [Nectria haematococca mpVI 77-13-4]
  misc_feature (17)..(269): NCBI GI: 270156635 Blast Desc: aldo/keto reductase family oxidoreductase [Legionella longbeachae D-4968] gi|269988660|gb|EEZ94914.1| aldo/keto reductase family oxidoreductase [Legionella longbeachae D-4968]
  misc_feature (13)..(208): NCBI GI: 237844187 Blast Desc: aldo/keto reductase family oxidoreductase, [Toxoplasma gondii ME49] gi|211969055|gb|EEB04251.1| aldo/keto reductase family oxidoreductase, [Toxoplasma gondii ME49]
  misc_feature (18)..(284): NCBI GI: 52842279 Blast Desc: D-xylose reductase III [Legionella pneumophila subsp. pneumophila str. Philadelphia 1] gi|52629390|gb|AAU28131.1| D-xylose reductase III [Legionella pneumophila subsp. pneumophila
  misc_feature (13)..(208): NCBI GI: 221481417 Blast Desc: aldo-keto reductase, [Toxoplasma gondii GT1]
  misc_feature (17)..(274): NCBI GI: 148360867 Blast Desc: aldo/keto reductase [Legionella pneumophila str. Corby] gi|148282640|gb|ABQ56728.1| aldo/keto reductase-like diketogulonate reductase [Legionella pneumophila str. Corby]
  misc_feature (14)..(270): NCBI GI: 53805162 Blast Desc: aldo/keto reductase family oxidoreductase [Methylococcus capsulatus str. Bath] gi|53758923|gb|AAU93214.1| oxidoreductase, aldo/keto reductase family [Methylococcus str.
  misc_feature (17)..(274): NCBI GI: 52840762 Blast Desc: aldo/keto reductases [Legionella pneumophila subsp. pneumophila str. Philadelphia 1] gi|52627873|gb|AAU26614.1| aldo/keto reductases [Legionella pneumophila subsp. pneumophila
  misc_feature (16)..(269): NCBI GI: 223995485 Blast Desc: expressed protein [Thalassiosira pseudonana CCMP1335] gi|220976532|gb|EED94859.1| expressed protein [Thalassiosira pseudonana CCMP1335]
  misc_feature (7)..(203): SWISSPROT Homolog: EC 1.1.1.200 Aldose-6-phosphate reductase (NADPH)
MTSRSSSPVCLINGDNMPCMLYGTAKRERDRPSQLHIALQQDYRGIDSSTSNYYHSEKEDGVALAEFLSSHSVSRKDLFIQSKYAAQSLHTETRPYALEDDITVRVFKSVLCSASALRVDVIDAYLLHTPLESQNDRLQAWDALESIVDRGGIRYLGIANVKIETLRTLFEQAHVKPKIIQNWFRRTTGYDREVVRFCRDHGISYQMFGVFDNENTALLECNPVLRHTGPSTTRHQSLLRILFKTAAVNGLQLCILDGATDSGHMADNVAASRYAGDLSRQDVQDFMGIIGWF

SEQ ID NO: 23739 - DNA, 358 bp, Muscodor strobelii
  misc_feature: SGI EST ID NO. CUFF.55867.0
  misc_feature: Variant of the nucleotide sequence at SEQ ID NO 23737
ggaagacggtgtagccctcgcggagtttctgtcgagccattcagtatcacgaaaggatctattcatccaatcaaaatatgcggcccagtcactacatacagagacgcgaccatatgcgcttgaggacgacatcacagtccgcgtgtttaaaagcgtactgtgcagcgcaagtgccctcagagttgatgtaatcgatgcatatcttctgcatacacctctcgaatctcaaaacgaccgtttgcaggcatgggatgcattagagagcatcgtagatcgtggcggcattcgttaccttggcatcgcgaatgtaaagatcgaaaccctccggacactctttgaacaagctcatgtaaagccg

SEQ ID NO: 23740 - DNA, 1323 bp, Muscodor strobelii
  misc_feature: SGI cDNA ID NO. 568082
  misc_feature: Encodes the peptide sequence at SEQ ID NO 23741
atgctcgcagcccacattcatcctctccaacaccagagctctgggatgtggatagactcaatgacgcaatatgcggactgtcggagtgtactccagcggttggacgagaatcccatgcaaaggaacggcgtgtttcttggcattgtgtcaacattgaggcgcgtcatcccttcgcccaatttaagcgtccctggagaccaaagtcaattggaagctttcagaaagtaccttctgcaggtgtctgcattgcatgataattttgttcagtcgactcctccgcttcctcagactttggaattctcacaattactacacgatgcagccttcttcgggaaccatggactcggccaactaagtgaaccattagacctcctccgtactgccaagagtatctgtgttaaaaatatggagactcagcccgacgaatcgatgaagagcttggttcacatcctctcttcaatgctgcctctgaaccttcatgtagcctcacaagatacctcagagattgctcgggttgtggcgatcctcgaaaacgagagaggaggcatgccaatggaggaactaacggacgagctacgctttctccttgtcagggcatatcacgactatggatggaatttcgtgcaaattaaccagatagaagacgctatggagtgccacaataaggctgctacttactctcaatcccgaggtagacataacagcaaagtaaaacatgtcgactttccttctggtagtcgcatcctatgtctggcggtgaaacaagaaaaagaacaagtccggaaacaggcggcagacacactggcggctctcgtcgcatcatctggtgaggacagtcttccaataactggatttcaaatgaagatggcctccgcgtacttcaccataggagacatagacatcgcacttggaatgttcagtagggtactcacattacgattaagccgtctcggcgctgtacatcacctcacgctttgctgtcagtattgtttagccgtttgcttgctaaatgtcggcgatctcgaaggtgcagagagacatctccgcgacattctgtcaaacggtatacttagcgaagggtggcgtctagcagatatcgttagaaccaaagtacgattgagcattgtactacggaaacaaaatcgtcccggagagtcagacaaggttttagaccccgaagtcgaagtctatgtgcaaaatctccaagaaaatcctccgagacatatgtggcatgatgaaaatctgatgtctctactcgacgccaacgtttctatataccatgggcgaacagccggaatttggagtaacgggactctgtggtaa

SEQ ID NO: 23741 - protein, 440 aa, Muscodor strobelii
  misc_feature: SGI Peptide ID NO. 568082
MLAAHIHPLQHQSSGMWIDSMTQYADCRSVLQRLDENPMQRNGVFLGIVSTLRRVIPSPNLSVPGDQSQLEAFRKYLLQVSALHDNFVQSTPPLPQTLEFSQLLHDAAFFGNHGLGQLSEPLDLLRTAKSICVKNMETQPDESMKSLVHILSSMLPLNLHVASQDTSEIARVVAILENERGGMPMEELTDELRFLLVRAYHDYGWNFVQINQIEDAMECHNKAATYSQSRGRHNSKVKHVDFPSGSRILCLAVKQEKEQVRKQAADTLAALVASSGEDSLPITGFQMKMASAYFTIGDIDIALGMFSRVLTLRLSRLGAVHHLTLCCQYCLAVCLLNVGDLEGAERHLRDILSNGILSEGWRLADIVRTKVRLSIVLRKQNRPGESDKVLDPEVEVYVQNLQENPPRHMWHDENLMSLLDANVSIYHGRTAGIWSNGTLW

SEQ ID NO: 23742 - DNA, 266 bp, Muscodor strobelii
  misc_feature: SGI EST ID NO. CUFF.55876.0
  misc_feature: Variant of the nucleotide sequence at SEQ ID NO 23740
ttcaccataggagacatagacatcgcacttggaatgttcagtagggtactcacattacgattaagccgtctcggcgctgtacatcacctcacgctttgctgtcagtattgtttagccgtttgcttgctaaatgtcggcgatctcgaaggtgcagagagacatctccgcgacattctgtcaaacggtatacttagcgaagggtggcgtctagcagatatcgttagaaccaaagtacgattgagcattgtactacggaaacaaaatcg

SEQ ID NO: 23743 - DNA, 1263 bp, Muscodor strobelii
  misc_feature: SGI cDNA ID NO. 568083
  misc_feature: Encodes the peptide sequence at SEQ ID NO 23744
atgacttcggttgagaattccgtcgcctctgaggcagaccatgttggtgaagttgccatcgcctctgagagtcctgcccgaaccttgacccccgtccccgaggctgattccgctgaggattcttcgaccacctccagcaccatcatcgagaccaacgacggtgacggtgacgcgactgcccgtcctggccctactgagatcatcttccacaaggacaatgacatgaagatggttgtctacagcaccgaaaaagatgtcacccgcactgtcttcaaggtctgcgccggacagctctccagcgcctcggacgtctggcgcaccatgatctatgcccagattggttccggcaagacagacgccgacagtgatctcaagctggctggagacgccgaggctatcgaagtgatcctccgcattgtccacttccagttcagcctggtccaccaggagcctggcttagaccagctcttccagctggccgcctacggtgtccagtacaaatgcacccatctgttccatccctgggcccagaagtggatctcccagttcaagcatttctccgccgaggagaactatcgcgctgagtgtcacaagactctctatgtcgcctgggccttcggcgatatcgtcctgtttcgcgagatggtcgacagcttgattatcagcaccaagcccaacgagaagggcaagttggtcaatgtctcggggaagaggctcagtgacatgatcctgcctcagggcgtcctcaacctcatccaagacgctcgcctcgccgttcttgctcaagtcatgaatgttatcaacgttgctatggatgatctgactagcgcccacgacgccacacgcccctcttactgcaaggttggcgtgaacgtggagagttgtgagattatgatgttcggaagtgcctctcttgcgctcaagcgtcataagcttgacccaatgccgaagcccgaggaatacatgggaagcatcctagagctccgcgaggtcctagagagtattgtgtttgtcccgtacgagggtcgtaactccaaaccgcaccaggctcacagttcctgcaacccgggctttgtccagaacacgaacgcgatcctcaacgcaatgtccgttccattgccctcaaatatgatggaatggctgtctacccagcgcgacatctgcggaatccctgctgccgaggagattctcctctggcgtaagcgccaggcccaggatgagcacgaagacgaaacctcagtcgagggcgcagagactgcttga

SEQ ID NO: 23744 - protein, 420 aa, Muscodor strobelii
  misc_feature: SGI Peptide ID NO. 568083
  misc_feature (77)..(357): NCBI GI: 256724501 Blast Desc: NECHADRAFT_88143 [Nectria haematococca mpVI 77-13-4]
  misc_feature (91)..(373): NCBI GI: 261353831 Blast Desc: conserved [Verticillium albo-atrum VaMs.102]
  misc_feature (91)..(283): NCBI GI: 85085459 Blast Desc: NCU04437 [Neurospora crassa OR74A] gi|28918606|gb|EAA28278.1| [Neurospora crassa OR74A] gi|40882183|emb|CAF06009.1| related to nuclear pore protein
  misc_feature (67)..(317): NCBI GI: 39942070 Blast Desc: MGG_03115 [Magnaporthe grisea 70-15] gi|145015914|gb|EDK00404.1| MGG_03115 [Magnaporthe grisea 70-15]
  misc_feature (69)..(349): NCBI GI: 256721128 Blast Desc: [Nectria haematococca mpVI 77-13-4]
  misc_feature (91)..(254): NCBI GI: 85085455 Blast Desc: NCU04436 [Neurospora crassa OR74A] gi|28918605|gb|EAA28277.1| [Neurospora crassa OR74A] gi|40882185|emb|CAF06011.1| [Neurospora crassa]
  misc_feature (69)..(356): NCBI GI: 116182756 Blast Desc: CHGG_02006 [Chaetomium globosum CBS 148.51] gi|88186303|gb|EAQ93771.1| CHGG_02006 [Chaetomium globosum CBS 148.51]
  misc_feature (37)..(281): NCBI GI: 40882184 Blast Desc: [Neurospora crassa]
  misc_feature (65)..(305): NCBI GI: 145612037 Blast Desc: MGG_08044 [Magnaporthe grisea 70-15] gi|145019280|gb|EDK03508.1| MGG_08044 [Magnaporthe grisea 70-15]
  misc_feature (46)..(244): NCBI GI: 170940283 Blast Desc: protein product [Podospora anserina]
MTSVENSVASEADHVGEVAIASESPARTLTPVPEADSAEDSSTTSSTIIETNDGDGDATARPGPTEIIFHKDNDMKMVVYSTEKDVTRTVFKVCAGQLSSASDVWRTMIYAQIGSGKTDADSDLKLAGDAEAIEVILRIVHFQFSLVHQEPGLDQLFQLAAYGVQYKCTHLFHPWAQKWISQFKHFSAEENYRAECHKTLYVAWAFGDIVLFREMVDSLIISTKPNEKGKLVNVSGKRLSDMILPQGVLNLIQDARLAVLAQVMNVINVAMDDLTSAHDATRPSYCKVGVNVESCEIMMFGSASLALKRHKLDPMPKPEEYMGSILELREVLESIVFVPYEGRNSKPHQAHSSCNPGFVQNTNAILNAMSVPLPSNMMEWLSTQRDICGIPAAEEILLWRKRQAQDEHEDETSVEGAETA

SEQ ID NO: 23745 - DNA, 1680 bp, Muscodor strobelii
  misc_feature: SGI cDNA ID NO. 568084
  misc_feature: Encodes the peptide sequence at SEQ ID NO 23746
atggatccatggagtgacgaggctgttcgggagcagtgggccgaagtcagcgcccaactcaatccctggagttggagtatcatgttgcccaaggaagtgcttgactctctaggtcaatatggccaagactactggatcgcccagtcgagtgccctctggggcccaacggctttttatcacgacggcgtcacacccggtgggatgatactcagttccaaccgatggatcgagttccaaagccaacatgtgcgcaacttcgagggccacaaattcccgacgctttaccctcccaatgctctcagtaatccgagcaatccgagcacgggcaataaggaacagtcaagcagccgagccagtgacgttcatgacgtagctcccagcggtggactttcgacggccgaaaatggcggtgttctagcccaatactccgggcggtacccagccccgttcccggccccggctctattacccagcccgtccccagccaccgcaccagacgaggcacaagtcgaagactccatcaacagaaccgtcgcctatggaaccaccgaggaaccacagggcgcccaaaaacgacgctgggcccacgagacagttgccgaaactcgtaagcctaagaagcgagccaggacgacgggggaaccaaagccacccaaccgctggatttggttcaagagagccatgactccacacatcagggctcagtacccggagacgaaatttgatgactggtccaaaattgcttccaagatgtggaaagccctgaccccacagcagcaagaagaatgggcggtgcgcgccagagacgaacatgaaacacgttttccagagcacacactatctatgtctcctgatacacagccaaacatggctataagccagcctaccttacgacgcggatctcaaacacatttcggaggagagcttgccgctcagtccggatctgagctgcttacgagcgacaactttgtctcgcgatcacaaggcggaccactgttcgctcctcggagtggtcttcaacttgcaacccaatctgtgtctcaatatggcatccccactcacgatcaatcatttcatggtcatggagcccatgccggagctcggtttgcttccctatcatcggctcggcccgtacctcgacctggtaatcaactcgatgtcaatcatccattgcagaatacgcagcgacctattccaggactcggttcgcagaatacgagggaacaataccctcagagccaacattacgattttcaccacgcgcgcgactaccagagtatgggagtttctggtttccctaacctcgatcgtcaaaacaatgacggctctcgcctagcctcatcctttgcttccgcaccccgccgtactagtcccaacgacagagctctgggttcaaacgctcgtggtcctgtcatgactcacgcgagaaactctcagatgatagcggccaaagctgatccctccggctctggctgcagaattgcctcgaatgccgaaagtccccgtgcttatgattggagcgcgaaccatgaaggagaagctggtctcagtcacgatattcctgcagtggaggctggtagggaagatgagtctggctccaatatcactgatcaagatgactcttccaaggacggcttcaacgtttttcctccccacgatgctatgagacacttcctctag

SEQ ID NO: 23746 - protein, 559 aa, Muscodor strobelii
  misc_feature: SGI Peptide ID NO. 568084
  misc_feature (215)..(279): Pfam Id: PF00505 Pfam Desc: HMG (high mobility group) box
  misc_feature (215)..(270): Pfam Id: PF00505 Pfam Desc: HMG (high mobility group) box
  misc_feature (175)..(281): NCBI GI: 4928167 Blast Desc: AF129741_2 mating type protein MAT-2/1 [Cochliobolus homomorphus]
  misc_feature (215)..(287): NCBI GI: 207099787 Blast Desc: mating type protein [Acremonium chrysogenum]
  misc_feature (215)..(278): NCBI GI: 17369353 Blast Desc: MAT2_COCSA RecName: Full=Mating-type protein MAT-2 gi|9454239|gb|AAF87724.1|AF275374_1 DNA binding protein MAT-2 [Cochliobolus sativus]
  misc_feature (215)..(278): NCBI GI: 4520348 Blast Desc: MAT2 [Alternaria alternata]
MDPWSDEAVREQWAEVSAQLNPWSWSIMLPKEVLDSLGQYGQDYWIAQSSALWGPTAFYHDGVTPGGMILSSNRWIEFQSQHVRNFEGHKFPTLYPPNALSNPSNPSTGNKEQSSSRASDVHDVAPSGGLSTAENGGVLAQYSGRYPAPFPAPALLPSPSPATAPDEAQVEDSINRTVAYGTTEEPQGAQKRRWAHETVAETRKPKKRARTTGEPKPPNRWIWFKRAMTPHIRAQYPETKFDDWSKIASKMWKALTPQQQEEWAVRARDEHETRFPEHTLSMSPDTQPNMAISQPTLRRGSQTHFGGELAAQSGSELLTSDNFVSRSQGGPLFAPRSGLQLATQSVSQYGIPTHDQSFHGHGAHAGARFASLSSARPVPRPGNQLDVNHPLQNTQRPIPGLGSQNTREQYPQSQHYDFHHARDYQSMGVSGFPNLDRQNNDGSRLASSFASAPRRTSPNDRALGSNARGPVMTHARNSQMIAAKADPSGSGCRIASNAESPRAYDWSANHEGEAGLSHDIPAVEAGREDESGSNITDQDDSSKDGFNVFPPHDAMRHFL

SEQ ID NO: 23747 - DNA, 1650 bp, Muscodor strobelii
  misc_feature: SGI cDNA ID NO. 568085
  misc_feature: Encodes the peptide sequence at SEQ ID NO 23748
atggcttcgccccatcctcaaaacgccgcacagctttggcttcatgcgttgagccaactccgcgaattagattggcatattagtttcacaggcgccgaatttgcctccttgggcgaggctggtcaggcatatattcttttccaatccagctctcttggctggggtcctacgagcttctactacgatggcttttcactagggacagttcttgttacttctatccagtcgatcaggcgtcggggacttacagtgtaccggagtgcagatctcagttatccgcttgtctaccctcatgactatcttgacgtcccacacaccgccgtagcaaacagtcaaccaattcttgatcacgatctcgtagtcggaaatcgcacttcgggtgttctaccgccagctatgaccgctgcaagccttaaccaggacgggcctatgacgctggatgcacagcgctatatgatggcaacgaatacggtgaaccctgggaacacgggacaacaccgaagcgagaaagcaggcaaggcgaagatcacgaagatcacgaagtctaggaagcctaggaagcctaggaagcccaaggaccctgggcacattcccaagtcgtgcaacacctggctgatgtttagacgcgcatatgaagctcaaatccgggctaagaatccttcgtggaagatggagcaggtctcaaaggaactcagcagaatctacaactccactacagacgaagagctacagcagtacaaggatcaggcggaccaagcgaacgacgagcgcgatagacttgtccgagccagagatgctgccagtatcatgcctcaacctaatatcgagagaggacaacggccgcttcttcagctgcccagcgcaattcaatctgcgtccagcaacgattctcgaactgtgtctccagtcactccctttgccgcctctcaaacttttcatccgctcgtggatcgggatcaggccgtctctcactattatcatcagcggacacctcagggcgctgccatcgccgcacacgacgatcaactcgtgactcagagtcaggacgtcattgggaataggcccggggttcgacgcctagtcgatgatgaccatgattgtcagctcccttcgcagcctgtatctcagattcaaatgggctgttaccgcgattgccaggctagccctgtattcgaccatgtccccgattctcagctcacttacaaggctgcttatgccttcgattctcctctagctactcaacttgatcctcgtctcgacgatcatgtcgatgctgaggtcagccgtcttcgccctcgagaacagtctggtggtgtgactggccgaccctctgaattgcagcggtatacaatccccgatgagcgtgcaggagattcaagcaaaatcgcagcctctgaggccaatacgaatatccccagcgtcaatactccttatgccgagttactcaggggtgaaactcatcaatctgagcctcttaggacggtgcttgctactggtgattcctccgatgcggcctgtcccgttgtcgacgaacctaccgcgaattccaatagtgaagaaagctatcataacgataacgcggatgatgacgacgatgatgccttccaccgctctgcctacttcgatgctgccatgtggggaagagattga

SEQ ID NO: 23748 - protein, 549 aa, Muscodor strobelii
  misc_feature: SGI Peptide ID NO. 568085
  misc_feature (197)..(265): Pfam Id: PF00505 Pfam Desc: HMG (high mobility group) box
  misc_feature (197)..(250): Pfam Id: PF00505 Pfam Desc: HMG (high mobility group) box
  misc_feature (187)..(259): NCBI GI: 97974024 Blast Desc: MAT1-2-1 protein carrying HMG-box [Fusarium sacchari]
  misc_feature (187)..(259): NCBI GI: 194239222 Blast Desc: mating type protein [Gibberella indica]
  misc_feature (187)..(259): NCBI GI: 197260076 Blast Desc: mating type protein 1-2-1 [Fusarium sp. F48]
  misc_feature (187)..(259): NCBI GI: 197260064 Blast Desc: mating type protein 1-2-1 [Fusarium sp. F35S]
  misc_feature (187)..(259): NCBI GI: 197260074 Blast Desc: mating type protein 1-2-1 [Fusarium sp. F29S]
  misc_feature (187)..(259): NCBI GI: 16588330 Blast Desc: AF194869_1 mating type protein MAT1-2 [Gibberella circinata]
  misc_feature (187)..(259): NCBI GI: 197260078 Blast Desc: mating type protein 1-2-1 [Fusarium sp. F58]
  misc_feature (187)..(259): NCBI GI: 197260048 Blast Desc: mating type protein 1-2-1 [Fusarium sp. F74] gi|197260070|gb|ACH56582.1| mating type protein 1-2-1 [Fusarium sp. F8]
  misc_feature (187)..(259): NCBI GI: 197260058 Blast Desc: mating type protein 1-2-1 [Fusarium sp. F61]
  misc_feature (187)..(259): NCBI GI: 197260080 Blast Desc: mating type protein 1-2-1 [Fusarium sp. F60]
MASPHPQNAAQLWLHALSQLRELDWHISFTGAEFASLGEAGQAYILFQSSSLGWGPTSFYYDGFSLGTVLVTSIQSIRRRGLTVYRSADLSYPLVYPHDYLDVPHTAVANSQPILDHDLVVGNRTSGVLPPAMTAASLNQDGPMTLDAQRYMMATNTVNPGNTGQHRSEKAGKAKITKITKSRKPRKPRKPKDPGHIPKSCNTWLMFRRAYEAQIRAKNPSWKMEQVSKELSRIYNSTTDEELQQYKDQADQANDERDRLVRARDAASIMPQPNIERGQRPLLQLPSAIQSASSNDSRTVSPVTPFAASQTFHPLVDRDQAVSHYYHQRTPQGAAIAAHDDQLVTQSQDVIGNRPGVRRLVDDDHDCQLPSQPVSQIQMGCYRDCQASPVFDHVPDSQLTYKAAYAFDSPLATQLDPRLDDHVDAEVSRLRPREQSGGVTGRPSELQRYTIPDERAGDSSKIAASEANTNIPSVNTPYAELLRGETHQSEPLRTVLATGDSSDAACPVVDEPTANSNSEESYHNDNADDDDDDAFHRSAYFDAAMWGRD

SEQ ID NO: 23749 - DNA, 459 bp, Muscodor strobelii
  misc_feature: SGI cDNA ID NO. 568086
  misc_feature: Encodes the peptide sequence at SEQ ID NO 23750
atgcgtgccactactactattttcgtagccctcggctgcttgtataacctcgccgctgcgaactcgggctatactgcgagctgcgtcgaggcaagacttgccggacctggaactacggcgaacggtataaaaggccccaccgtcttccacggttggactatcgaggcagattgtagggtaggaggccctcaagatggtacttcgctcttatcaagagtcaacatcgaaagctgtttcatgaacttcggtggtagacttgtggactggttgaatggtaatttccaagcaagttgcaatacttccacgttcaacctcaatggacagacgctgagtatggattgcaagaatcatgacgggaattatggacacacctggattgaaacagattacttcattggtaatgccggaggccagctgtactgccacaatcaacgaggcgcaggagacgataagttttag

SEQ ID NO: 23750 - protein, 152 aa, Muscodor strobelii
  misc_feature: SGI Peptide ID NO. 568086
  misc_feature (93)..(134): Pfam Id: PF08881 Pfam Desc: CVNH domain
MRATTTIFVALGCLYNLAAANSGYTASCVEARLAGPGTTANGIKGPTVFHGWTIEADCRVGGPQDGTSLLSRVNIESCFMNFGGRLVDWLNGNFQASCNTSTFNLNGQTLSMDCKNHDGNYGHTWIETDYFIGNAGGQLYCHNQRGAGDDKF

SEQ ID NO: 23751 - DNA, 355 bp, Muscodor strobelii
  misc_feature: SGI EST ID NO. CUFF.55904.0
  misc_feature: Variant of the nucleotide sequence at SEQ ID NO 23749
ttcaacctcaatggacagacgctgagtatggattgcaagaatcatgacgggaattatggacacacctggattgaaacagattacttcattggtaatgccggaggccagctgtactgccacaatcaacgaggcgcaggagacgataagttttagtgtagacttgacgagagatggctagacaagtattccttggtgatggtctgtcctgaaatcaataggtgtcttgaagggccccgtagtgagaggcgggtcatatttatattttctcttttgatttggccggcacggctaacctacgtattcacgttgtaatactgacttattatatacttctcttcaatcattactgtagttc

SEQ ID NO: 23752 - DNA, 1572 bp, Muscodor strobelii
  misc_feature: SGI cDNA ID NO. 568087
  misc_feature: Encodes the peptide sequence at SEQ ID NO 23753
atgagagtcttcaattggattgttatcgccctagcggcgtgtcaaacggaggcgataccgcaaaagcgaagcactccacgacctgagattgtgtaccagcctaattacttcaagcagaaaatcaaccacttcccagaaaatggcctaccttttgcgaatgagacattcagtcagcggtactacttcgatgacgcttattaccaaccaggcgggccagtatatctctatattggcggcgaaacttccggcccaagtcgtttttcgaatcttcagaccggcatcatccagattctcatgcaagaaactcatgggctaggagtgatacttgagaatcgctattacggccaatcatttccattcgccacctcaacaacagatcaactcgcgtttcttaccacggcgcaaacaatcgcagataacaacaacttcgcgcaaaatgcagtttttcccggtgttgtaggtaaccttacggctccaggtaccccatggattatgtacggagggagtctagctggtgctcagacagcgttcactgttaagacttatggtgatgtgatatatggcggtattgcttcgtcggccgttatacatgctaccgtgggatattctgactggtacgcaccgattttgaagtatgggccgcaggactgcataagcagaatcacagccatcaccgataaattcgatggtctcatcgcagccaataagaccgccgccatcatcaaattcaagaagatcttcggtcttgagtctctgacagaccatcgagacttcgctacggcgataacaaaccccattggaaatccgggtagttacctagtcgacacttggcaagagctgaactggaactcgacgtacggcgctagggacttcttctggttctgtgggaatgtctcggatatcgatgctcctaaagaaattactgatgtggattatgtgttgagtaactatacgaagggtgagccttgggttggacttgggagttgggcgaactatatgaagaactatgttcttccagttgcttgcccttctggtgattacaacagtttcgactgttggggaacgcaacatcccgaggattgggcggatgtgacacgctctcgatcgtatacatatactagttgcgttgagcaaggtttgtacattgacgcgccaaaagagggcccaagtctaatctcgcgcgtcattgatacttcgtacgaacagcaatggtgcacatgggcatttccaccaggtgaatacaacaccgttccacctactccaaacgtcacagtctacaacagctacggagatttcaacttctcagcggatcgactagccttcatcgacggggaccaagatccatggaactacgcttgctatcactcacctctagcaccgccgagaaagcagacttcggatttacatccggagtattggatcagtggggcaggtcatcactgggactcgtacggtattcttgatgttgaggctgaaccccagtttatacgggaagcgcattattgggagattaggactgtgaagaagtggttgagggattttggcagttggaaggcatcgaggaagacttga

SEQ ID NO: 23753 - protein, 523 aa, Muscodor strobelii
  misc_feature: SGI Peptide ID NO. 568087
  misc_feature (39)..(503): Pfam Id: PF05577 Pfam Desc: Serine carboxypeptidase S28
  misc_feature (39)..(200): Pfam Id: PF05577 Pfam Desc: Serine carboxypeptidase S28
  misc_feature (39)..(512): NCBI GI: 154299105 Blast Desc: BC1G_11865 [Botryotinia fuckeliana B05.10] gi|150857568|gb|EDN32760.1| BC1G_11865 [Botryotinia fuckeliana B05.10]
  misc_feature (8)..(512): NCBI GI: 189202432 Blast Desc: conserved [Pyrenophora tritici-repentis Pt-1C-BFP] gi|187984651|gb|EDU50139.1| conserved [Pyrenophora tritici-repentis Pt-1C-BFP]
  misc_feature (27)..(366): NCBI GI: 156058175 Blast Desc: SS1G_04819 [Sclerotinia sclerotiorum 1980] gi|154702604|gb|EDO02343.1| SS1G_04819 [Sclerotinia sclerotiorum 1980]
  misc_feature (1)..(327): NCBI GI: 169603686 Blast Desc: SNOG_04851 [Phaeosphaeria nodorum SN15] gi|111066122|gb|EAT87242.1| SNOG_04851 [Phaeosphaeria nodorum SN15]
  misc_feature (3)..(523): NCBI GI: 225557666 Blast Desc: conserved [Ajellomyces capsulatus G186AR]
  misc_feature (3)..(523): NCBI GI: 240278349 Blast Desc: extracelular serine carboxypeptidase [Ajellomyces capsulatus H143]
  misc_feature (3)..(523): NCBI GI: 154275160 Blast Desc: conserved [Ajellomyces capsulatus NAm1] gi|150414871|gb|EDN10233.1| conserved [Ajellomyces capsulatus NAm1]
  misc_feature (31)..(521): NCBI GI: 134113512 Blast Desc: CNBF4600 [Cryptococcus neoformans var. neoformans B-3501A] gi|50257214|gb|EAL19925.1| CNBF4600 [Cryptococcus neoformans var. neoformans B-3501A]
  misc_feature (31)..(521): NCBI GI: 58268250 Blast Desc: [Cryptococcus neoformans var. neoformans JEC21] gi|57227516|gb|AAW43974.1| conserved [Cryptococcus neoformans var. neoformans JEC21]
  misc_feature (7)..(512): NCBI GI: 226280369 Blast Desc: conserved [Paracoccidioides brasiliensis Pb01]
  misc_feature (32)..(511): SWISSPROT Homolog: EC 3.4.14.2 Dipeptidyl-peptidase II
MRVFNWIVIALAACQTEAIPQKRSTPRPEIVYQPNYFKQKINHFPENGLPFANETFSQRYYFDDAYYQPGGPVYLYIGGETSGPSRFSNLQTGIIQILMQETHGLGVILENRYYGQSFPFATSTTDQLAFLTTAQTIADNNNFAQNAVFPGVVGNLTAPGTPWIMYGGSLAGAQTAFTVKTYGDVIYGGIASSAVIHATVGYSDWYAPILKYGPQDCISRITAITDKFDGLIAANKTAAIIKFKKIFGLESLTDHRDFATAITNPIGNPGSYLVDTWQELNWNSTYGARDFFWFCGNVSDIDAPKEITDVDYVLSNYTKGEPWVGLGSWANYMKNYVLPVACPSGDYNSFDCWGTQHPEDWADVTRSRSYTYTSCVEQGLYIDAPKEGPSLISRVIDTSYEQQWCTWAFPPGEYNTVPPTPNVTVYNSYGDFNFSADRLAFIDGDQDPWNYACYHSPLAPPRKQTSDLHPEYWISGAGHHWDSYGILDVEAEPQFIREAHYWEIRTVKKWLRDFGSWKASRKT

SEQ ID NO: 23754 - DNA, 2036 bp, Muscodor strobelii
  misc_feature: SGI EST ID NO. CUFF.55924.0
  misc_feature: Variant of the nucleotide sequence at SEQ ID NO 23752
cttaactgcccgaattggcatatcttggccacacggcagatcggggtaaggcctatatggttcgaatgactccccgccttggcaccccggactgtgatagccgatcaagctgcaggcatattaccgcatacagaagcttgctgcgaaaactgatatcaccgataaacaatattatgagggccattgatgacgatttttgacgcgagatacgaagctggcggggaataaaatatgtataaatgtaagcgattgcgtgccacgtaggctgtcttgctctcttctccttgcgatgtatcttctcgtaatctcatttctccttttcaattttgcgcaatgagagtcttcaattggattgttatcgccctagcggcgtgtcaaacggaggcgataccgcaaaagcgaagcactccacgacctgagattgtgtaccagcctaattacttcaagcagaaaatcaaccacttcccagaaaatggcctaccttttgcgaatgagacattcagtcagcggtactacttcgatgacgcttattaccaaccaggcgggccagtatatctctatattggcggcgaaacttccggcccaagtcgtttttcgaatcttcagaccggcatcatccagattctcatgcaagaaactcatgggctaggagtgatacttgagaatcgctattacggccaatcatttccattcgccacctcaacaacagatcaactcgcgtttcttaccacggcgcaaacaatcgcagataacaacaacttcgcgcaaaatgcagtttttcccggtgttgtaggtaaccttacggctccaggtaccccatggattatgtacggagggagtctagctggtgctcagacagcgttcactgttaagacttatggtgatgtgatatatggcggtattgcttcgtcggccgttatacatgctaccgtgggatattctgactggtacgcaccgattttgaagtatgggccgcaggactgcataagcagaatcacagccatcaccgataaattcgatggtctcatcgcagccaataagaccgccgccatcatcaaattcaagaagatcttcggtcttgagtctctgacagaccatcgagacttcgctacggcgataacaaaccccattggaaatccgggtagttacctagtcgacacttggcaagagctgaactggaactcgacgtacggcgctagggacttcttctggttctgtgggaatgtctcggatatcgatgctcctaaagaaattactgatgtggattatgtgttgagtaactatacgaagggtgagccttgggttggacttgggagttgggcgaactatatgaagaactatgttcttccagttgcttgcccttctggtgattacaacagtttcgactgttggggaacgcaacatcccgaggattgggcggatgtgacacgctctcgatcgtatacatatactagttgcgttgagcaaggtttgtacattgacgcgccaaaagagggcccaagtctaatctcgcgcgtcattgatacttcgtacgaacagcaatggtgcacatgggcatttccaccaggtgaatacaacaccgttccacctactccaaacgtcacagtctacaacagctacggagatttcaacttctcagcggatcgactagccttcatcgacggggaccaagatccatggaactacgcttgctatcactcacctctagcaccgccgagaaagcagacttcggatttacatccggagtattggatcagtggggcaggtcatcactgggactcgtacggtattcttgatgttgaggctgaaccccagtttatacgggaagcgcattattgggagattaggactgtgaagaagtggttgagggattttggcagttggaaggcatcgaggaagacttgatgtggatcgatgggggtgatgttgtatacctatgttgacgtatccaagtggcaatgatttgcatagtaagagtatgcctctattgaatagatctcgtgaagtgcaatagaatcatcaggaaactataaaat

SEQ ID NO: 23755 - DNA, 1602 bp, Muscodor strobelii
  misc_feature: SGI cDNA ID NO. 568088
  misc_feature: Encodes the peptide sequence at SEQ ID NO 23756
atgagagtcttcaattggattgttatcgccctagcggcgtgtcaaacggaggcgataccgcaaaagcgaagcactccacgacctgagattgtgtaccagcctaattacttcaagcagaaaatcaaccacttcccagaaaatggcctaccttttgcgaatgagacattcagtcagcggtactacttcgatgacgcttattaccaaccaggcgggccagtatatctctatattggcggcgaaacttccggcccaagtcgtttttcgaatcttcagaccggcatcatccagattctcatgcaagaaactcatgggctaggagtgatacttgagaatcgctattacggccaatcatttccattcgccacctcaacaacagatcaactcgcgtttcttaccacggcgcaaacaatcgcagataacaacaacttcgcgcaaaatgcagtttttcccggtgttgtaggtaaccttacggctccaggtaccccatggattatgtacggagggagtctagctggtgctcagacagcgttcactgttaagacttatggtgatgtgatatatggcggtattgcttcgtcggccgttatacatgctaccgtgggatattcgacgaaaggtgctgacaaaggcttctccagtgactggtacgcaccgattttgaagtatgggccgcaggactgcataagcagaatcacagccatcaccgataaattcgatggtctcatcgcagccaataagaccgccgccatcatcaaattcaagaagatcttcggtcttgagtctctgacagaccatcgagacttcgctacggcgataacaaaccccattggaaatccgggtagttacctagtcgacacttggcaagagctgaactggaactcgacgtacggcgctagggacttcttctggttctgtgggaatgtctcggatatcgatgctcctaaagaaattactgatgtggattatgtgttgagtaactatacgaagggtgagccttgggttggacttgggagttgggcgaactatatgaagaactatgttcttccagttgcttgcccttctggtgattacaacagtttcgactgttggggaacgcaacatcccgaggattgggcggatgtgacacgctctcgatcgtatacatatactagttgcgttgagcaaggtttgtacattgacgcgccaaaagagggcccaagtctaatctcgcgcgtcattgatacttcgtacgaacagcaatggtgcacatgggcatttccaccaggtgaatacaacaccgttccacctactccaaacgtcacagtctacaacagctacggagatttcaacttctcagcggatcgactagccttcatcgacggggaccaagatccatggaactacgcttgctatcactcacctctagcaccgccgagaaagcagacttcggatttacatccggagtattggatcagtggggcaggtcatcactgggactcgtacggtattcttgatgttgaggctgaaccccagtttatacgggaagcgcattattgggagattaggactgtgaagaagtggttgagggattttggcagttggaaggcatcgaggaagacttga

SEQ ID NO: 23756 - protein, 533 aa, Muscodor strobelii
  misc_feature: SGI Peptide ID NO. 568088
  misc_feature (39)..(513): Pfam Id: PF05577 Pfam Desc: Serine carboxypeptidase S28
  misc_feature (39)..(200): Pfam Id: PF05577 Pfam Desc: Serine carboxypeptidase S28
  misc_feature (8)..(522): NCBI GI: 189202432 Blast Desc: conserved [Pyrenophora tritici-repentis Pt-1C-BFP] gi|187984651|gb|EDU50139.1| conserved [Pyrenophora tritici-repentis Pt-1C-BFP]
  misc_feature (39)..(522): NCBI GI: 154299105 Blast Desc: BC1G_11865 [Botryotinia fuckeliana B05.10] gi|150857568|gb|EDN32760.1| BC1G_11865 [Botryotinia fuckeliana B05.10]
  misc_feature (27)..(376): NCBI GI: 156058175 Blast Desc: SS1G_04819 [Sclerotinia sclerotiorum 1980] gi|154702604|gb|EDO02343.1| SS1G_04819 [Sclerotinia sclerotiorum 1980]
  misc_feature (1)..(337): NCBI GI: 169603686 Blast Desc: SNOG_04851 [Phaeosphaeria nodorum SN15] gi|111066122|gb|EAT87242.1| SNOG_04851 [Phaeosphaeria nodorum SN15]
  misc_feature (3)..(533): NCBI GI: 225557666 Blast Desc: conserved [Ajellomyces capsulatus G186AR]
  misc_feature (3)..(533): NCBI GI: 240278349 Blast Desc: extracelular serine carboxypeptidase [Ajellomyces capsulatus H143]
  misc_feature (3)..(533): NCBI GI: 154275160 Blast Desc: conserved [Ajellomyces capsulatus NAm1] gi|150414871|gb|EDN10233.1| conserved [Ajellomyces capsulatus NAm1]
  misc_feature (31)..(531): NCBI GI: 134113512 Blast Desc: CNBF4600 [Cryptococcus neoformans var. neoformans B-3501A] gi|50257214|gb|EAL19925.1| CNBF4600 [Cryptococcus neoformans var. neoformans B-3501A]
  misc_feature (31)..(531): NCBI GI: 58268250 Blast Desc: [Cryptococcus neoformans var. neoformans JEC21] gi|57227516|gb|AAW43974.1| conserved [Cryptococcus neoformans var. neoformans JEC21]
  misc_feature (7)..(522): NCBI GI: 226280369 Blast Desc: conserved [Paracoccidioides brasiliensis Pb01]
  misc_feature (32)..(521): SWISSPROT Homolog: EC 3.4.14.2 Dipeptidyl-peptidase II
MRVFNWIVIALAACQTEAIPQKRSTPRPEIVYQPNYFKQKINHFPENGLPFANETFSQRYYFDDAYYQPGGPVYLYIGGETSGPSRFSNLQTGIIQILMQETHGLGVILENRYYGQSFPFATSTTDQLAFLTTAQTIADNNNFAQNAVFPGVVGNLTAPGTPWIMYGGSLAGAQTAFTVKTYGDVIYGGIASSAVIHATVGYSTKGADKGFSSDWYAPILKYGPQDCISRITAITDKFDGLIAANKTAAIIKFKKIFGLESLTDHRDFATAITNPIGNPGSYLVDTWQELNWNSTYGARDFFWFCGNVSDIDAPKEITDVDYVLSNYTKGEPWVGLGSWANYMKNYVLPVACPSGDYNSFDCWGTQHPEDWADVTRSRSYTYTSCVEQGLYIDAPKEGPSLISRVIDTSYEQQWCTWAFPPGEYNTVPPTPNVTVYNSYGDFNFSADRLAFIDGDQDPWNYACYHSPLAPPRKQTSDLHPEYWISGAGHHWDSYGILDVEAEPQFIREAHYWEIRTVKKWLRDFGSWKASRKT

SEQ ID NO: 23757 - DNA, 2036 bp, Muscodor strobelii; identical to SEQ ID NO: 23754
  misc_feature: SGI EST ID NO. CUFF.55924.0
  misc_feature: Variant of the nucleotide sequence at SEQ ID NO 23755

SEQ ID NO: 23758 - DNA, 783 bp, Muscodor strobelii
  misc_feature: SGI cDNA ID NO. 568089
  misc_feature: Reduced expression when VOC is produced
  misc_feature: Encodes the peptide sequence at SEQ ID NO 23759
atggcttccaagcaagctagcaagcgcttggcgcgtgaatacaagactatttcagagaaccccccgccatacatctcagcccacccctcagattccaacattctcgagtggcattacatcatcacaggtcctgaggacactccttaccatggcgggcagtactggggaacgctagtgttcccgcccaactaccctttcgctcccccggctattcgcatgcacacgccctctggtcgctttcagccctcgacccgactctgcctctccatctccgacttccaccctaaatcattcaaccctgcgtgggaggtgtcgacgattttaataggacttctttcgttcatgacttccgaggaaatgacaaccggctctgtctcagcttcagcacgtgatcgcaaactatttgccgagcgcacgagatggtggaactcgaccggcggtggctcacatgccaagaaccccgcgcagaagggcaacgtcaaggctggcgatggcggtgccaagtttcggtcagagtggcccgaggtcgacaaggagaactggaagtggatggaagagcacagcatgaacaccgttactggtgagatcgtacgtgcttcgtgtgggccagctctcggggcaacaggcgctagtggccaggcccaggcagttgtcgacactgtggttcagcagagaaacgccggccaaggatggttgagtcggaacaagctgatggtctttggcggtgtggtctttatctacgtattaattgcgcgtttactaggcgagctggaggatgtataa

SEQ ID NO: 23759 - protein, 260 aa, Muscodor strobelii
  misc_feature: SGI Peptide ID NO. 568089
  misc_feature (9)..(143): Pfam Id: PF00179 Pfam Desc: Ubiquitin-conjugating enzyme
  misc_feature (9)..(117): Pfam Id: PF00179 Pfam Desc: Ubiquitin-conjugating enzyme
  misc_feature (1)..(256): NCBI GI: 171678096 Blast Desc: protein product [Podospora anserina] gi|170937117|emb|CAP61775.1| protein product [Podospora anserina]
  misc_feature (1)..(254): NCBI GI: 46127873 Blast Desc: FG08314.1 [Gibberella zeae PH-1]
  misc_feature (1)..(258): NCBI GI: 39965774 Blast Desc: MGG_09977 [Magnaporthe grisea 70-15] gi|145015402|gb|EDJ99938.1| MGG_09977 [Magnaporthe grisea 70-15]
  misc_feature (1)..(256): NCBI GI: 164425536 Blast Desc: NCU05592 [Neurospora crassa OR74A] gi|157070965|gb|EAA31318.2| conserved [Neurospora crassa OR74A]
  misc_feature (1)..(256): NCBI GI: 156057273 Blast Desc: ubiquitin-conjugating enzyme [Sclerotinia sclerotiorum 1980] gi|154702153|gb|EDO01892.1| ubiquitin-conjugating enzyme [Sclerotinia sclerotiorum 1980]
  misc_feature (9)..(248): NCBI GI: 116201711 Blast Desc: CHGG_08740 [Chaetomium globosum CBS 148.51] gi|88177258|gb|EAQ84726.1| CHGG_08740 [Chaetomium globosum CBS 148.51]
  misc_feature (1)..(256): NCBI GI: 154295885 Blast Desc: BC1G_13312 [Botryotinia fuckeliana B05.10] gi|150843862|gb|EDN19055.1| BC1G_13312 [Botryotinia fuckeliana B05.10]
  misc_feature (1)..(256): NCBI GI: 189204662 Blast Desc: ubiquitin-conjugating enzyme E2 6 [Pyrenophora tritici-repentis Pt-1C-BFP] gi|187985765|gb|EDU51253.1| ubiquitin-conjugating enzyme E2 6 [Pyrenophora tritici-repentis
  misc_feature (1)..(256): NCBI GI: 169609911 Blast Desc: SNOG_08047 [Phaeosphaeria nodorum SN15] gi|111063203|gb|EAT84323.1| SNOG_08047 [Phaeosphaeria nodorum SN15]
  misc_feature (1)..(258): NCBI GI: 212535924 Blast Desc: ubiquitin-conjugating enzyme Ubc6, [Penicillium marneffei ATCC 18224] gi|210070517|gb|EEA24607.1| ubiquitin-conjugating enzyme Ubc6, [Penicillium marneffei ATCC
  misc_feature (1)..(190): SWISSPROT Homolog: EC 6.3.2.19 Ubiquitin--protein ligase
  misc_feature: Useful for introducing or modulating the production of volatile compounds
MASKQASKRLAREYKTISENPPPYISAHPSDSNILEWHYIITGPEDTPYHGGQYWGTLVFPPNYPFAPPAIRMHTPSGRFQPSTRLCLSISDFHPKSFNPAWEVSTILIGLLSFMTSEEMTTGSVSASARDRKLFAERTRWWNSTGGGSHAKNPAQKGNVKAGDGGAKFRSEWPEVDKENWKWMEEHSMNTVTGEIVRASCGPALGATGASGQAQAVVDTVVQQRNAGQGWLSRNKLMVFGGVVFIYVLIARLLGELEDV

SEQ ID NO: 23760 - DNA, 1748 bp, Muscodor strobelii
  misc_feature: SGI EST ID NO. CUFF.55979.0
  misc_feature: Variant of the nucleotide sequence at SEQ ID NO 23758
gtgccaagaaaaagatcacttccggtttataattagtctccgataacgaccagatttcaggcgtctctaggattctggggcgaaacactcatccctccatcccttccgtcatcattcaggccaacatcccaacatctgtcttttacatcgccatctcagtctatcataccggcccgattcatttacaaccccttcggatttaaccacgactatcattattacttccttcgctggggatttcgccatcatcgcctacgttcattcaggttcctgccacttagcccgaccgaggctgccctcttatctagagccttatagaccgatttcattactgtattcatatttccacagccttgcgcccgagacgacgtctgttaaatctcgcgcttttagacaacttacgcgaccacaacgagtaaagccgccatggcttccaagcaagctagcaagcgcttggcgcgtgaatacaagactatttcagagaaccccccgccatacatctcagcccacccctcagattccaacattctcgagtggcattacatcatcacaggtcctgaggacactccttaccatggcgggcagtactggggaacgctagtgttcccgcccaactaccctttcgctcccccggctattcgcatgcacacgccctctggtcgctttcagccctcgacccgactctgcctctccatctccgacttccaccctaaatcattcaaccctgcgtgggaggtgtcgacgattttaataggacttctttcgttcatgacttccgaggaaatgacaaccggctctgtctcagcttcagcacgtgatcgcaaactatttgccgagcgcacgagatggtggaactcgaccggcggtggctcacatgccaagaaccccgcgcagaagggcaacgtcaaggctggcgatggcggtgccaagtttcggtcagagtggcccgaggtcgacaaggagaactggaagtggatggaagagcacagcatgaacaccgttactggtgagatcgtacgtgcttcgtgtgggccagctctcggggcaacaggcgctagtggccaggcccaggcagttgtcgacactgtggttcagcagagaaacgccggccaaggatggttgagtcggaacaagctgatggtctttggcggtgtggtctttatctacgtattaattgcgcgtttactaggcgagctggaggatgtataaagcaacgcgcaacaccatacagctcagtccatgaactggatttgatttcaaccctgagaggataatatccatcatatggacatctacattttgcctcaatatttcgcaagaaatataagaggaaaactgacgatttcgtagtgaatgctagggaaagcacagggtgtgcacaagcttttcagagagagggcgtcaatattcttgctcggcagaaacttacaggctacataccaaagcggtgggagcaattcgctaaaggagacgaaaatgggtttatgccccgtctatttgtatgatacacgataatttgtctcgatagagagaaacggacttgcatggcattgctgattcctataatttagcctaccaaagtaccttatcccacgtccaattcatatatgcatacataccggcttgggcagtatttcttcgctcgtaaaagcctctaattgacaagtgataaattggatgattcttgctatgcccaaggggctgcttgaagggcttagatctctaagaccctaccgccttcattgcgc

SEQ ID NO: 23761 - DNA, 1539 bp, Muscodor strobelii
  misc_feature: SGI cDNA ID NO. 568090
  misc_feature: Reduced expression when VOC is produced
  misc_feature: Encodes the peptide sequence at SEQ ID NO 23762
atggctaacaacggttctccggcagatgacgatgacgtcttcgagggcttactcaagaaagagggaagctctgtacagaaccgttcacattcaaacccaaagccgaccgtgccaaatcaagccgcgaacgatgttctcgcttcaaatcaaaccctcccggtctcaattaattccatccaaatccatggcgccaaaaacaccaggcgttcattcctcgatcccatgttgaagcccttcttggaaaagagtctcaatgccgactttactcttggagagctcacaaatgaagcccagggactcatggcacaactgtcgcaaacgggaatcttcaagcccgaaatgtacctatacctgtcccaaccttctcaattcgaccccaacacatcgcccactgatctcgatgtctccattagggtgtacgaggcacccaggatcacactaaagacaggaacagaggcaggcaactcagaaggttctgcatttggatcgctcacacttcgaaacatattcggcggtgccgaatccctgacggtcaacgcatcagccggcacaaggactagatctgcttacaatgtcgaattcggcgcgccgctcggaatccacaaaggtgctaggatgtgctttgatggctccatgactagtactgtcaagccatgggctagtcacgaggaaaccatgaacggagttggcatacggtacctatgggcaaacgagaaaggcgatcgattccaggcaggacagtcacacgcatcgcgccaggttactggcctcgctgctaaggccagccctaccattcgacgcgatgctggctacacctccaagaatgccctgtcctacatgttcacgagagaccgcagagacaacccgatgctccctcaaagtggctacatcatcaagacagtatctgagttggcaggatggggccctttaggaggtgacgttgccttcaccaagaacgagatggaggtctcaggtgctgtacctctctctttcctggcccgtttcaagggtctttctgggatctcgcttggcgctgggcttcgagctggcatgctttatccactccctctgtcttacggcttcaatggagcacaagcgagtcgagtcaatgatagatttactcttggaggccctacggatgttcgcggattttctctaggcggcatgggccccagagatggcccagatgcgatcggtggagatgtattcaccgcattcaacatcaacatgctcatgcctttacctcgactgggcccagactctcccttcaggttccagattttcgccaacagcggtagactggtcgcgatgaggaacgatggcgacgaatcaatgacatctggcacagttgccaaaaacatgatatctgccaccaaggacatcgtcaccgggatgcccagtatctcggccggtttcggcctggtctacggacaccctgccgccagattcgagctcaacttctgcttgcctttggttatgcgccggggtgaagtcccggctagaggcctccaagttggcgtcggcttgagttttctttga

SEQ ID NO: 23762 - protein, 512 aa, Muscodor strobelii
  misc_feature: SGI Peptide ID NO. 568090
  misc_feature (168)..(511): Pfam Id: PF01103 Pfam Desc: Surface antigen
  misc_feature (259)..(511): Pfam Id: PF01103 Pfam Desc: Surface antigen
  misc_feature (45)..(512): NCBI GI: 145607924 Blast Desc: MGG_09978 [Magnaporthe grisea 70-15] gi|145015401|gb|EDJ99937.1| MGG_09978 [Magnaporthe grisea 70-15]
  misc_feature (31)..(512): NCBI GI: 85098006 Blast Desc: NCU05593 [Neurospora crassa OR74A] gi|28922048|gb|EAA31319.1| NCU05593 [Neurospora crassa OR74A] gi|45758781|gb|AAS76651.1| mitochondrial outer membrane protein
  misc_feature (45)..(512): NCBI GI: 46127871 Blast Desc: FG08313.1 [Gibberella zeae PH-1]
  misc_feature (21)..(512): NCBI GI: 116201709 Blast Desc: CHGG_08739 [Chaetomium globosum CBS 148.51] gi|88177257|gb|EAQ84725.1| CHGG_08739 [Chaetomium globosum CBS 148.51]
  misc_feature (45)..(512): NCBI GI: 256733406 Blast Desc: [Nectria haematococca mpVI 77-13-4]
  misc_feature (9)..(512): NCBI GI: 119179633 Blast Desc: CIMG_08534 [Coccidioides immitis RS]
  misc_feature (9)..(512): NCBI GI: 240110161 Blast Desc: outer membrane protein, OMP85 family protein [Coccidioides posadasii C735 delta SOWgp]
  misc_feature (10)..(512): NCBI GI: 261188071 Blast Desc: outer membrane protein [Ajellomyces dermatitidis SLH14081] gi|239593327|gb|EEQ75908.1| outer membrane protein [Ajellomyces dermatitidis SLH14081] gi|239609070|gb|EEQ86057.1|
  misc_feature (40)..(512): NCBI GI: 156057275 Blast Desc: SS1G_04368 [Sclerotinia sclerotiorum 1980] gi|154702154|gb|EDO01893.1| SS1G_04368 [Sclerotinia sclerotiorum 1980]
  misc_feature (44)..(512): NCBI GI: 238839897 Blast Desc: sorting assembly machinery subunit [Microsporum canis CBS 113480]
  misc_feature: Useful for introducing or modulating the production of volatile compounds
MANNGSPADDDDVFEGLLKKEGSSVQNRSHSNPKPTVPNQAANDVLASNQTLPVSINSIQIHGAKNTRRSFLDPMLKPFLEKSLNADFTLGELTNEAQGLMAQLSQTGIFKPEMYLYLSQPSQFDPNTSPTDLDVSIRVYEAPRITLKTGTEAGNSEGSAFGSLTLRNIFGGAESLTVNASAGTRTRSAYNVEFGAPLGIHKGARMCFDGSMTSTVKPWASHEETMNGVGIRYLWANEKGDRFQAGQSHASRQVTGLAAKASPTIRRDAGYTSKNALSYMFTRDRRDNPMLPQSGYIIKTVSELAGWGPLGGDVAFTKNEMEVSGAVPLSFLARFKGLSGISLGAGLRAGMLYPLPLSYGFNGAQASRVNDRFTLGGPTDVRGFSLGGMGPRDGPDAIGGDVFTAFNINMLMPLPRLGPDSPFRFQIFANSGRLVAMRNDGDESMTSGTVAKNMISATKDIVTGMPSISAGFGLVYGHPAARFELNFCLPLVMRRGEVPARGLQVGVGLSFL

SEQ ID NO: 23763 - DNA, 4118 bp, Muscodor strobelii
  misc_feature: SGI EST ID NO. CUFF.56232.0
  misc_feature: Variant of the nucleotide sequence at SEQ ID NO 23761
tagcaatactgttgtattatagaagtagtagaggaagctcgatcgagagagattatagcagctcctatgagttactgcacatgtttgatgcttcctgcaccaccattttgtgactgtttgcttatctgcaaatgtttagatgttaggaaagtacgatcactagtgtttggggaaattgaggctaaagctacagggatgctctcttcgtcttggctggcgagctaggtattttgcagtcgcgaatcttggagctactctccgatgcattcatcgcacgaaacacttctgactgaccacgattcacacccactcactgccgcgatactcgagaactagccgtcatggctaacaacggttctccggcagatgacgatgacgtcttcgagggcttactcaagaaagagggaagctctgtacagaaccgttcacattcaaacccaaagccgaccgtgccaaatcaagccgcgaacgatgttctcgcttcaaatcaaaccctcccggtctcaattaattccatccaaatccatggcgccaaaaacaccaggcgttcattcctcgatcccatgttgaagcccttcttggaaaagagtctcaatgccgactttactcttggagagctcacaaatgaagcccagggactcatggcacaactgtcgcaaacgggaatcttcaagcccgaaatgtacctatacctgtcccaaccttctcaattcgaccccaacacatcgcccactgatctcgatgtctccattagggtgtacgaggcacccaggatcacactaaagacaggaacagaggcaggcaactcagaaggttctgcatttggatcgctcacacttcgaaacatattcggcggtgccgaatccctgacggtcaacgcatcagccggcacaaggactagatctgcttacaatgtcgaattcggcgcgccgctcggaatccacaaaggtgctaggatgtgctttgatggctccatgactagtactgtcaagccatgggctagtcacgaggaaaccatgaacggagttggcatacggtacctatgggcaaacgagaaaggcgatcgattccaggcaggacagtcacacgcatcgcgccaggttactggcctcgctgctaaggccagccctaccattcgacgcgatgctggctacacctccaagaatgccctgtcctacatgttcacgagagaccgcagagacaacccgatgctccctcaaagtggctacatcatcaagacagtatctgagttggcaggatggggccctttaggaggtgacgttgccttcaccaagaacgagatggaggtctcaggtgctgtacctctctctttcctggcccgtttcaagggtctttctgggatctcgcttggcgctgggcttcgagctggcatgctttatccactccctctgtcttacggcttcaatggagcacaagcgagtcgagtcaatgatagatttactcttggaggccctacggatgttcgcggattttctctaggcggcatgggccccagagatggcccagatgcgatcggtggagatgtattcaccgcattcaacatcaacatgctcatgcctttacctcgactgggcccagactctcccttcaggttccagattttcgccaacagcggtagactggtcgcgatgaggaacgatggcgacgaatcaatgacatctggcacagttgccaaaaacatgatatctgccaccaaggacatcgtcaccgggatgcccagtatctcggccggtttcggcctggtctacggacaccctgccgccagattcgagctcaacttctgcttgcctttggttatgcgccggggtgaagtcccggctagaggcctccaagttggcgtcggcttgagttttctttgatccgaaggcacttgtcctcgccttttctatataatacccaaagtcattagctaagctggacttagcacataattgtatatacatgtacaagtactgtattctagatcccactccggaagcttctgatgaacagcaccatagcagtccgtctgcttttgcgcggcatcttgtactctatcgcaatatcctgaacgaatgaagaccgataaaattctttattaccatcactctctcagagaggaatatctgaattggattgacttgcgtcagtatggcttctacaatctagatcgctgattctaagtcaattgggtcatgatgattagttcttcaacggccattcggcaacactctctcggactcgaacttctttctccacccatattacggctttatttcgatcttggtatcctgatattagatcctccacactatccctacgaccgtgacttgagtatgtcggcggaggtggcctgatgtgatcctctttgagatccgagatatcggagtgtcgctgtgttgcagtgtgatattgtgggagttctgtgtcatctccgccgagattgcgggagtccgctgacccgcgtagatggatgaagagtggccgtagagttggaatgccgatgcataccattgctactgcgatctctgctccggcccaggcgaagtacttgacgaatgtctctgcgttctcgtcagtatgtctgccaggcatctgccactataaagcagctactcacgtgtatagtcgagcacgttgagctgtgaaagcacgaccgttctaatgataccacagacaccggctctatccattgatcagcaatccattcacattgccacaagcaatagagtagggagtctttaacttacactacgccaagactcataccactacccagcaccagtttctcccgcttcggcatagagagcttccagataaacaaccacgggaaaatcgcaaagaagaaatcaacaatactcgaccacacgcccaatcccacgctcaatggctgaatgcttaaatgccaagtcccctgcgtcctaagcgggtcccaacttaatttcctcggcgtagtctgattccacaacaacgtcgccagaacaatactcgtgacgaccgtcgctatacaagcgagccaaagagccgccttatgccacctcacctgcacaacacgcaggaggaagagtcccatagagagtttcgccatcgcgttcccgaggatggcgaatgtgttcgctacgtaggtccagaagatggttttgctcgatgcgtcgacggataggacgaagaaattctgtcccaggccgtgggatacggagatttggaggaagagcgtgtataaaaggaaaaataactgtcttttgttagaggaagaggtatctgggaggtgagggagggagacatacgccagtgctagcatacatgtaatcctccgccccgacaaacttgacgatgcagacccgcgtgtaccatcgtaatccgaccagcgcgagacatagcgccgtcaatgcccatgatgcgaaggctaactggtatcccgagttccacatggtgtttacctttgttgtcagcttgtcatcctacgcatggtgacgagctgccggacagacagacgagagtatgtgtgtctaggagagggtatgacgagcggagcaagggtgaagggctagaagggcttttgtaggccttgtacaatgtagggagagggcactctgattatagacgtaattgtcgagaaaacggcccgaggcgtatgcccacgcagcgtgggaggctgataagactaactaacttgaaatatcatacattcgcgaacaatcgcgtgatcaacaataacacgttccatctctgggctgaagtccgatcgggagctaattcgtcacgttttttattgtcctcttttgtcgtcaaatggacgagattttggatgtgttcggccagttagagacggtttcgaggcgttggttactggattggtcgatatgtgtgagtttgtggccaattggagtgctgggcaggggtctgttgaggcaccccgtgttgccaagataaatgagtggtggtttgtggattgacgctaacatagtcctaagcgcctggtaagttgttggtgcaggcttctcccgttactgccgttgctgtgggttttgcagtgaggggattgagggatgaattgagtcatattgatagcgggagcaaatggagttgacatcatcatgctacaatgattctcgaag

SEQ ID NO: 23764 - DNA, 1056 bp, Muscodor strobelii
  misc_feature: SGI cDNA ID NO. 568091
  misc_feature: Reduced expression when VOC is produced
  misc_feature: Encodes the peptide sequence at SEQ ID NO 23765
atgtggaactcgggataccagttagccttcgcatcatgggcattgacggcgctatgtctcgcgctggtcggattacgatggtacacgcgggtctgcatcgtcaagtttgtcggggcggaggattacatgtatgctagcactggcttatttttccttttatacacgctcttcctccaaatctccgtatcccacggcctgggacagaatttcttcgtcctatccgtcgacgcatcgagcaaaaccatcttctggacctacgtagcgaacacattcgccatcctcgggaacgcgatggcgaaactctctatgggactcttcctcctgcgtgttgtgcaggtgaggtggcataaggcggctctttggctcgcttgtatagcgacggtcgtcacgagtattgttctggcgacgttgttgtggaatcagactacgccgaggaaattaagttgggacccgcttaggacgcaggggacttggcatttaagcattcagccattgagcgtgggattgggcgtgtggtcgagtattgttgatttcttctttgcgattttcccgtggttgtttatctggaagctctctatgccgaagcgggagaaactggtgctgggtagtggtatgagtcttggcgtagtagccggtgtctgtggtatcattagaacggtcgtgctttcacagctcaacgtgctcgactatacacagacattcgtcaagtacttcgcctgggccggagcagagatcgcagtagcaatggtatgcatcggcattccaactctacggccactcttcatccatctacgcgggtcagcggactcccgcaatctcggcggagatgacacagaactcccacaatatcacactgcaacacagcgacactccgatatctcggatctcaaagaggatcacatcaggccacctccgccgacatactcaagtcacggtcgtagggatagtgtggaggatctaatatcaggataccaagatcgaaataaagccgtaatatgggtggagaaagaagttcgagtccgagagagtgttgccgaatggccgttgaagaactaa

SEQ ID NO: 23765 - protein, 351 aa, Muscodor strobelii
  misc_feature: SGI Peptide ID NO. 568091
  misc_feature (2)..(300): NCBI GI: 39953156 Blast Desc: MGG_01890 [Magnaporthe grisea 70-15] gi|145020240|gb|EDK04369.1| MGG_01890 [Magnaporthe grisea 70-15]
  misc_feature (3)..(306): NCBI GI: 171677053 Blast Desc: protein product [Podospora anserina] gi|170936594|emb|CAP61253.1| protein product [Podospora anserina]
  misc_feature (1)..(308): NCBI GI: 85110156 Blast Desc: NCU08447 [Neurospora crassa OR74A] gi|28924965|gb|EAA34054.1| [Neurospora crassa OR74A]
  misc_feature (3)..(264): NCBI GI: 119470605 Blast Desc: NFIA_055050 [Neosartorya fischeri NRRL 181] gi|119406205|gb|EAW16156.1| conserved [Neosartorya fischeri NRRL 181]
  misc_feature (13)..(340): NCBI GI: 256723706 Blast Desc: NECHADRAFT_52132 [Nectria haematococca mpVI 77-13-4]
  misc_feature (3)..(317): NCBI GI: 238506193 Blast Desc: conserved [Aspergillus flavus NRRL3357] gi|220689011|gb|EED45362.1| conserved [Aspergillus flavus NRRL3357]
  misc_feature (13)..(322): NCBI GI: 256727789 Blast Desc: NECHADRAFT_83276 [Nectria haematococca mpVI 77-13-4]
  misc_feature (13)..(292): NCBI GI: 256719973 Blast Desc: NECHADRAFT_56607 [Nectria haematococca mpVI 77-13-4]
  misc_feature (46)..(317): NCBI GI: 169785217 Blast Desc: [Aspergillus oryzae RIB40] gi|83775817|dbj|BAE65936.1| protein product [Aspergillus oryzae]
  misc_feature (3)..(233): NCBI GI: 115400089 Blast Desc: conserved [Aspergillus terreus NIH2624] gi|114191299|gb|EAU32999.1| conserved [Aspergillus terreus NIH2624]
  misc_feature: Useful for introducing or modulating the production of volatile compounds
MWNSGYQLAFASWALTALCLALVGLRWYTRVCIVKFVGAEDYMYASTGLFFLLYTLFLQISVSHGLGQNFFVLSVDASSKTIFWTYVANTFAILGNAMAKLSMGLFLLRVVQVRWHKAALWLACIATVVTSIVLATLLWNQTTPRKLSWDPLRTQGTWHLSIQPLSVGLGVWSSIVDFFFAIFPWLFIWKLSMPKREKLVLGSGMSLGVVAGVCGIIRTVVLSQLNVLDYTQTFVKYFAWAGAEIAVAMVCIGIPTLRPLFIHLRGSADSRNLGGDDTELPQYHTATQRHSDISDLKEDHIRPPPPTYSSHGRRDSVEDLISGYQDRNKAVIWVEKEVRVRESVAEWPLKN

SEQ ID NO: 23766 - DNA, 4219 bp, Muscodor strobelii
  misc_feature: SGI EST ID NO. CUFF.56233.1
  misc_feature: Variant of the nucleotide sequence at SEQ ID NO 23764
cttcgagaatcattgtagcatgatgatgtcaactccatttgctcccgctatcaatatgactcaattcatccctcaatcccctcactgcaaaacccacagcaacggcagtaacgggagaagcctgcaccaacaacttaccaggcgcttaggactatgttagcgtcaatccacaaaccaccactcatttatcttggcaacacggggtgcctcaacagacccctgcccagcactccaattggccacaaactcacacatatcgaccaatccagtaaccaacgcctcgaaaccgtctctaactggccgaacacatccaaaatctcgtccatttgacgacaaaagaggacaataaaaaacgtgacgaattagctcccgatcggacttcagcccagagatggaacgtgttattgttgatcacgcgattgttcgcgaatgtatgatatttcaagttagttagtcttatcagcctcccacgctgcgtgggcatacgcctcgggccgttttctcgacaattacgtctataatcagagtgccctctccctacattgtacaaggcctacaaaagcccttctagcccttcacccttgctccgctcgtcataccctctcctagacacacatactctcgtctgtctgtccggcagctcgtcaccatgcgtaggatgacaagctgacaacaaaggtaaacaccatgtggaactcgggataccagttagccttcgcatcatgggcattgacggcgctatgtctcgcgctggtcggattacgatggtacacgcgggtctgcatcgtcaagtttgtcggggcggaggattacatgtatgctagcactggcttatttttccttttatacacgctcttcctccaaatctccgtatcccacggcctgggacagaatttcttcgtcctatccgtcgacgcatcgagcaaaaccatcttctggacctacgtagcgaacacattcgccatcctcgggaacgcgatggcgaaactctctatgggactcttcctcctgcgtgttgtgcaggtgaggtggcataaggcggctctttggctcgcttgtatagcgacggtcgtcacgagtattgttctggcgacgttgttgtggaatcagactacgccgaggaaattaagttgggacccgcttaggacgcaggggacttggcatttaagcattcagccattgagcgtgggattgggcgtgtggtcgagtattgttgatttcttctttgcgattttcccgtggttgtttatctggaagctctctatgccgaagcgggagaaactggtgctgggtagtggtatgagtcttggcgtagtagccggtgtctgtggtatcattagaacggtcgtgctttcacagctcaacgtgctcgactatacacgtgagtagctgctttatagtggcagatgcctggcagacatactgacgagaacgcagagacattcgtcaagtacttcgcctgggccggagcagagatcgcagtagcaatggtatgcatcggcattccaactctacggccactcttcatccatctacgcgggtcagcggactcccgcaatctcggcggagatgacacagaactcccacaatatcacactgcaacacagcgacactccgatatctcggatctcaaagaggatcacatcaggccacctccgccgacatactcaagtcacggtcgtagggatagtgtggaggatctaatatcaggataccaagatcgaaataaagccgtaatatgggtggagaaagaagttcgagtccgagagagtgttgccgaatggccgttgaagaactaatcatcatgacccaattgacttagaatcagcgatctagattgtagaagccatactgacgcaagtcaatccaattcagatattcctctctgagagagtgatggtaataaagaattttatcggtcttcattcgttcaggatattgcgatagagtacaagatgccgcgcaaaagcagacggactgctatggtgctgttcatcagaagcttccggagtgggatctagaatacagtacttgtacatgtatatacaattatgtgctaagtccagcttagctaatgactttgggtattatatagaaaaggcgaggacaagtgccttcggatcaaagaaaactcaagccgacgccaacttggaggcctctagccgggacttcaccccggcgcataaccaaaggcaagcagaagttgagctcgaatctggcggcagggtgtccgtagaccaggccgaaaccggccgagatactgggcatcccggtgacgatgtccttggtggcagatatcatgtttttggcaactgtgccagatgtcattgattcgtcgccatcgttcctcatcgcgaccagtctaccgctgttggcgaaaatctggaacctgaagggagagtctgggcccagtcgaggtaaaggcatgagcatgttgatgttgaatgcggtgaatacatctccaccgatcgcatctgggccatctctggggcccatgccgcctagagaaaatccgcgaacatccgtagggcctccaagagtaaatctatcattgactcgactcgcttgtgctccattgaagccgtaagacagagggagtggataaagcatgccagctcgaagcccagcgccaagcgagatcccagaaagacccttgaaacgggccaggaaagagagaggtacagcacctgagacctccatctcgttcttggtgaaggcaacgtcacctcctaaagggccccatcctgccaactcagatactgtcttgatgatgtagccactttgagggagcatcgggttgtctctgcggtctctcgtgaacatgtaggacagggcattcttggaggtgtagccagcatcgcgtcgaatggtagggctggccttagcagcgaggccagtaacctggcgcgatgcgtgtgactgtcctgcctggaatcgatcgcctttctcgtttgcccataggtaccgtatgccaactccgttcatggtttcctcgtgactagcccatggcttgacagtactagtcatggagccatcaaagcacatcctagcacctttgtggattccgagcggcgcgccgaattcgacattgtaagcagatctagtccttgtgccggctgatgcgttgaccgtcagggattcggcaccgccgaatatgtttcgaagtgtgagcgatccaaatgcagaaccttctgagttgcctgcctctgttcctgtctttagtgtgatcctgggtgcctcgtacaccctaatggagacatcgagatcagtgggcgatgtgttggggtcgaattgagaaggttgggacaggtataggtacatttcgggcttgaagattcctgtactatcgtgtcaacatgctggttctctggcatcacagcatcattttgatgttgtgagagaccatgaagttttggttcggcgcgactgacccgtttgcgacagttgtgccatgagtccctgggcttcatttgtgagctctccaagagtaaagtcggcattgagactcttttccaagaagggcttcaacatgggatcgaggaatgaacgcctggtgtttttggcgccatggatttggatggaattaattgagaccgggagggtttgatttgaagcgagcttgtataagtcagcgcttgatttatgtcattcagacgaagagaatatgctgacaacatcgttcgcggcttgatttggcacggtcggctttgggtttgaatgtgaacggttctgtacagagcttccctctttcttgagtaagccctcgaagacctagagttagagtaggatgcatcagtcctcatagctttgttgggaaaacatgattaaaacttgacacttacgtcatcgtcatctgccggagaaccgttgttagccatgacggctagttctcgagtatcgcggcagtgagtgggtgtgaatcgtggtcagtcagaagtgtttcgtgcgatgaatgcatcggagagtagctccaagattcgcgactgcaaaatacctagctcgccagccaagacgaagagagcatccctgtagctttagcctcaatttccccaaacactagtgatcgtactttcctaacatctaaacatttgcagataagcaaacagtcacaaaatggtggtgcaggaagcatcaaacatgtgcagtaactcataggagctgctataatctctctcgatcgagcttcctctactacttctataatacaacagtattgcta

SEQ ID NO: 23767 - DNA, 699 bp, Muscodor strobelii
  misc_feature: SGI cDNA ID NO. 568092
  misc_feature: Encodes the peptide sequence at SEQ ID NO 23768
atgcgcggttcatttgccctcgctctactccccgtcgctctcgggcaaatcacccaggacttcgagagtggttgggaccagacagcatggccggtctacgcgcctgactgcaatcagggcggaaaagtgactctcgacagcacgaccgcgcacagtgggaagaactcaattcgggttgatggagctggtggctattgtggacacatcttcgtcggcacgacaagcgtcccgagtggcgatatctacattcgggtttacctaaaagcatctaaggccctgaccgactcccacgtatccttcatcaccatgcccgacgctgcacaagggtcaaacaagcacctccgaattggaggacagagcaagatcctgatgtacaaccgagagtccgacgacgctactctgcccgatctctcgccgaacggtatcgcggcctcggccgctctgccaactggtgcatggcagtgcttcgagtcccatcttggcacggacggaactgttgagacttggctcaacaacaatactattgctggtttgactgcgaagaagggcgtcacgaacgcaaatgccgcgcagtggcagagaagcagcatcatccctaagccgactgccgtctacttcggctgggaatcctatggcggagatactaataccttctggtacgatgatattgccatctcgtcaacccgtgttggatgttag

SEQ ID NO: 23768 - protein, 232 aa, Muscodor strobelii
  misc_feature: SGI Peptide ID NO. 568092
  misc_feature (20)..(232): NCBI GI: 116205289 Blast Desc: CHGG_10528 [Chaetomium globosum CBS 148.51] gi|88176656|gb|EAQ84124.1| CHGG_10528 [Chaetomium globosum CBS 148.51]
  misc_feature (10)..(232): NCBI GI: 116194286 Blast Desc: CHGG_03741 [Chaetomium globosum CBS 148.51] gi|88179654|gb|EAQ87122.1| CHGG_03741 [Chaetomium globosum CBS 148.51]
  misc_feature (8)..(232): NCBI GI: 39968957 Blast Desc: MGG_10089 [Magnaporthe grisea 70-15] gi|145015276|gb|EDJ99812.1| MGG_10089 [Magnaporthe grisea 70-15]
  misc_feature (5)..(232): NCBI GI: 171682848 Blast Desc: protein product [Podospora anserina] gi|170941383|emb|CAP67033.1| protein product [Podospora anserina]
  misc_feature (16)..(232): NCBI GI: 169595118 Blast Desc: SNOG_00293 [Phaeosphaeria nodorum SN15] gi|160701023|gb|EAT91788.2| SNOG_00293 [Phaeosphaeria nodorum SN15]
  misc_feature (5)..(232): NCBI GI: 256720543 Blast Desc: NECHADRAFT_54486 [Nectria haematococca mpVI 77-13-4]
  misc_feature (6)..(232): NCBI GI: 46124177 Blast Desc: FG06466.1 [Gibberella zeae PH-1]
  misc_feature (8)..(232): NCBI GI: 31747158 Blast Desc: Cip1 [Hypocrea jecorina]
  misc_feature (16)..(232): NCBI GI: 189202858 Blast Desc: Cip1 [Pyrenophora tritici-repentis Pt-1C-BFP] gi|187984864|gb|EDU50352.1| Cip1 [Pyrenophora tritici-repentis Pt-1C-BFP]
  misc_feature (17)..(232): NCBI GI: 254405229 Blast Desc: secreted hydrolase [Streptomyces sviceus ATCC 29083] gi|197714681|gb|EDY58715.1| secreted hydrolase [Streptomyces sviceus ATCC 29083]
MRGSFALALLPVALGQITQDFESGWDQTAWPVYAPDCNQGGKVTLDSTTAHSGKNSIRVDGAGGYCGHIFVGTTSVPSGDIYIRVYLKASKALTDSHVSFITMPDAAQGSNKHLRIGGQSKILMYNRESDDATLPDLSPNGIAASAALPTGAWQCFESHLGTDGTVETWLNNNTIAGLTAKKGVTNANAAQWQRSSIIPKPTAVYFGWESYGGDTNTFWYDDIAISSTRVGC

SEQ ID NO: 23769 - DNA, 1124 bp, Muscodor strobelii
  misc_feature: SGI EST ID NO. CUFF.55931.0
  misc_feature: Variant of the nucleotide sequence at SEQ ID NO 23767
tgccactggtggaatacgctgccacggccgtaacctggtaagccctcacgcggcgagatggacgatcaatgcatgaacgttccgaaatagaatatttaagcatgtaacgacgcactattttggaaacgcggcccgaaattgtggcgcatgcggaggcgagacggaggaggcgagcgagctgtcgatataggctatttgccggaggctgctattccgctccggaagccagcacatatataaggccacgagcatctttgagacaccgcgttctcgtcggtctgtcatcaccctgcagtattcccggcaattcatcacaatgcgcggttcatttgccctcgctctactccccgtcgctctcgggcaaatcacccaggacttcgagagtggttgggaccagacagcatggccggtctacgcgcctgactgcaatcagggcggaaaagtgactctcgacagcacgaccgcgcacagtgggaagaactcaattcgggttgatggagctggtggctattgtggacacatcttcgtcggcacgacaagcgtcccgagtggcgatatctacattcgggtttacctaaaagcatctaaggccctgaccgactcccacgtatccttcatcaccatgcccgacgctgcacaagggtcaaacaagcacctccgaattggaggacagagcaagatcctgatgtacaaccgagagtccgacgacgctactctgcccgatctctcgccgaacggtatcgcggcctcggccgctctgccaactggtgcatggcagtgcttcgagtcccatcttggcacggacggaactgttgagacttggctcaacaacaatactattgctggtttgactgcgaagaagggcgtcacgaacgcaaatgccgcgcagtggcagagaagcagcatcatccctaagccgactgccgtctacttcggctgggaatcctatggcggagatactaataccttctggtacgatgatattgccatctcgtcaacccgtgttggatgttagaacccgagccagcgatggtgggtgcaaatttcgatgtcaaaatgtatatatttaggagacattgaaaactttgccccgcgatacttcttgacaccgggcatgccttgtt

SEQ ID NO: 23770 - DNA, 393 bp, Muscodor strobelii
  misc_feature: SGI cDNA ID NO. 568093
  misc_feature: Encodes the peptide sequence at SEQ ID NO 23771
atgcccgacgctgcacaagggtcaaacaagcacctccgaattggaggacagagcaagatcctgatgtacaaccgagagtccgacgacgctactctgcccgatctctcgccgaacggtatcgcggcctcggccgctctgccaactggtgcatggcagtgcttcgagtcccatcttggcacggacggaactgttgagacttggctcaacaacaatactattgctggtttgactgcgaagaagggcgtcacgaacgcaaatgccgcgcagtggcagagaagcagcatcatccctaagccgactgccgtctacttcggctgggaatcctatggcggagatactaataccttctggtacgatgatattgccatctcgtcaacccgtgttggatgttag

SEQ ID NO: 23771 - protein, 130 aa, Muscodor strobelii
  misc_feature: SGI Peptide ID NO. 568093
  misc_feature (1)..(130): NCBI GI: 116205289 Blast Desc: CHGG_10528 [Chaetomium globosum CBS 148.51] gi|88176656|gb|EAQ84124.1| CHGG_10528 [Chaetomium globosum CBS 148.51]
  misc_feature (1)..(130): NCBI GI: 116194286 Blast Desc: CHGG_03741 [Chaetomium globosum CBS 148.51] gi|88179654|gb|EAQ87122.1| CHGG_03741 [Chaetomium globosum CBS 148.51]
  misc_feature (1)..(130): NCBI GI: 171682848 Blast Desc: protein product [Podospora anserina] gi|170941383|emb|CAP67033.1| protein product [Podospora anserina]
  misc_feature (1)..(130): NCBI GI: 39968957 Blast Desc: MGG_10089 [Magnaporthe grisea 70-15] gi|145015276|gb|EDJ99812.1| MGG_10089 [Magnaporthe grisea 70-15]
  misc_feature (1)..(130): NCBI GI: 169595118 Blast Desc: SNOG_00293 [Phaeosphaeria nodorum SN15] gi|160701023|gb|EAT91788.2| SNOG_00293 [Phaeosphaeria nodorum SN15]
  misc_feature (1)..(130): NCBI GI: 189202858 Blast Desc: Cip1 [Pyrenophora tritici-repentis Pt-1C-BFP] gi|187984864|gb|EDU50352.1| Cip1 [Pyrenophora tritici-repentis Pt-1C-BFP]
  misc_feature (1)..(130): NCBI GI: 31747158 Blast Desc: Cip1 [Hypocrea jecorina]
  misc_feature (1)..(130): NCBI GI: 256720543 Blast Desc: NECHADRAFT_54486 [Nectria haematococca mpVI 77-13-4]
  misc_feature (1)..(130): NCBI GI: 46124177 Blast Desc: FG06466.1 [Gibberella zeae PH-1]
  misc_feature (1)..(130): NCBI GI: 254405229 Blast Desc: secreted hydrolase [Streptomyces sviceus ATCC 29083] gi|197714681|gb|EDY58715.1| secreted hydrolase [Streptomyces sviceus ATCC 29083]
MPDAAQGSNKHLRIGGQSKILMYNRESDDATLPDLSPNGIAASAALPTGAWQCFESHLGTDGTVETWLNNNTIAGLTAKKGVTNANAAQWQRSSIIPKPTAVYFGWESYGGDTNTFWYDDIAISSTRVGC

SEQ ID NO: 23772 - DNA, 1124 bp, Muscodor strobelii; identical to SEQ ID NO: 23769
  misc_feature: SGI EST ID NO. CUFF.55931.0
  misc_feature: Variant of the nucleotide sequence at SEQ ID NO 23770

SEQ ID NO: 23773 - DNA, 654 bp, Muscodor strobelii
  misc_feature: SGI cDNA ID NO. 568094
  misc_feature: Encodes the peptide sequence at SEQ ID NO 23774
atgcgatcactcgtacctgcgctcgctctcagcgcgatcgcagcgctctcctcgagctcttcctcgttacgcttcagtccgattctattttcggcattgactgtcctcttccgatatgccttgaagctacacaggcaatacgtcatcaagccgacggccgacagatatccatttccggaatggtacagcgcggaagacgtgccgtatcttaagtccatatacagacaagctttcgtcgcgcaagctcttgtgcacatcgcgacagtctcttatgtgagatggtcgctcgatttatcgctatctaatgttttctttgccgcattttattcggtcaacaccgcctcggatgtgatgagctacagtctccttgctaccgcagttggcatcatggctcataatctgttctcagtctggcagctccgactccaagcttacattactaccgaacaggcttacaaagcctgtatagccgttctagtaggacaggtatttgtaggatcaggtgcgacgtgggccggtctttgggcctggagagaggatgtgtatgtgaagatgtcgaccttgtcaggtgacaccgccgataaggtcttcccgttgacgaatgacgatgtcaaggcattggcagctgcgaaagcagacaagcgtgcatcgtaa

SEQ ID NO: 23774 - protein, 217 aa, Muscodor strobelii
  misc_feature: SGI Peptide ID NO. 568094
  misc_feature (24)..(181): NCBI GI: 238496933 Blast Desc: monooxygenase, [Aspergillus flavus NRRL3357] gi|220694582|gb|EED50926.1| monooxygenase, [Aspergillus flavus NRRL3357]
  misc_feature (24)..(186): NCBI GI: 115401122 Blast Desc: [Aspergillus terreus NIH2624] gi|114190090|gb|EAU31790.1| [Aspergillus terreus NIH2624]
  misc_feature (3)..(179): NCBI GI: 119494160 Blast Desc: FAD binding domain protein [Neosartorya fischeri NRRL 181] gi|119412152|gb|EAW22093.1| FAD binding domain protein [Neosartorya fischeri NRRL 181]
  misc_feature (2)..(186): NCBI GI: 261360691 Blast Desc: FAD binding domain-containing protein [Verticillium albo-atrum VaMs.102]
  misc_feature (24)..(186): NCBI GI: 212533543 Blast Desc: monooxygenase, [Penicillium marneffei ATCC 18224] gi|210072292|gb|EEA26381.1| monooxygenase, [Penicillium marneffei ATCC 18224]
  misc_feature (81)..(181): NCBI GI: 169774511 Blast Desc: [Aspergillus oryzae RIB40] gi|83769586|dbj|BAE59721.1| protein product [Aspergillus oryzae]
  misc_feature (50)..(182): NCBI GI: 39975645 Blast Desc: MGG_00031 [Magnaporthe grisea 70-15] gi|145019142|gb|EDK03421.1| MGG_00031 [Magnaporthe grisea 70-15]
  misc_feature (60)..(181): NCBI GI: 171694496 Blast Desc: protein product [Podospora anserina] gi|170947490|emb|CAP59651.1| protein product [Podospora anserina]
  misc_feature (70)..(185): NCBI GI: 256730454 Blast Desc: NECHADRAFT_89571 [Nectria haematococca mpVI 77-13-4]
  misc_feature (133)..(185): NCBI GI: 55823911 Blast Desc: monooxygenase [Fusarium heterosporum]
MRSLVPALALSAIAALSSSSSSLRFSPILFSALTVLFRYALKLHRQYVIKPTADRYPFPEWYSAEDVPYLKSIYRQAFVAQALVHIATVSYVRWSLDLSLSNVFFAAFYSVNTASDVMSYSLLATAVGIMAHNLFSVWQLRLQAYITTEQAYKACIAVLVGQVFVGSGATWAGLWAWREDVYVKMSTLSGDTADKVFPLTNDDVKALAAAKADKRAS

SEQ ID NO: 23775 - DNA, 648 bp, Muscodor strobelii
  misc_feature: SGI EST ID NO. CUFF.55933.0
  misc_feature: Variant of the nucleotide sequence at SEQ ID NO 23773
ccgatatgccttgaagctacacaggcaatacgtcatcaagccgacggccgacagatatccatttccggaatggtacagcgcggaagacgtgccgtatcttaagtccatatacagacaagctttcgtcgcgcaagctcttgtgcacatcgcgacagtctcttatgtgagatggtcgctcgatttatcgctatctaatgttttctttgccgcattttattcggtcaacaccgcctcggatgtgatgagctacagtctccttgctaccgcagttggcatcatggctcataatctgttctcagtctggcagctccgactccaagcttacattactaccgaacaggcttacaaagcctgtatagccgttctagtaggacaggtatttgtaggatcaggtgcgacgtgggccggtctttgggcctggagagaggatgtgtatgtgaagatgtcgaccttgtcaggtgacaccgccgataaggtcttcccgttgacgaatgacgatgtcaaggcattggcagctgcgaaagcagacaagcgtgcatcgtaaattgcaatacgaatcatgcccattgaatggcgttgctgtacttgataccctttaaaaaaagttcgatgatcatgcctcatataggatgtgcaatataattctta

SEQ ID NO: 23776 - DNA, 2430 bp, Muscodor strobelii
  misc_feature: SGI cDNA ID NO. 568095
  misc_feature: Encodes the peptide sequence at SEQ ID NO 23777
atggcttcgacaaagcctttcaaggtcatcgtggttggaggtggtgttgccgggttgacattggcaaatatgttcgagaaatttggcattgaatataccatcctcgaagctcataacgagatacatcctccggctggagcatcaattgctctctgggcaaatggttcgtatatattggatcaattgggaatgtacgaagctgtcgagaagatctcccataccacgaagtatgccgatacattcattcgcgagtgcactgggatagcagccaccaactcgagatttgtccaatatcatcacgagagaataggcggctaccctctgatcttcttcgaacgacaaatgcttttgaaagtgctttacgaaaatcttcaaaacaaagatcacatttatctcaacagtcgcgtcagtagaattaatcatttacaagacggcgttgaagtcataaccgaagatggctatctacataaaggagatattgtcctaggagccgacggcattcacagcaatgttaggagagagatgcggcgcatagcacgaatggacgacccaacctattttgatcccgatgaagaggacaaagttccttgccattaccaatgcagctttggaattgcgcagaatgtagaggcatggggaaccgatgaacagtgctttacaactggaactggtcattcgttcttggtcacagctggcccagacagtaaggtctactggtttctcttcgtcagactacctaaaactgcgtacggaacagagatcccaaggtacacgaagcaggatgaggcacaattcgccgagaaatacaagcatctcaagatcaaggagaacgtcacatttggccaggtttatgctaagcgcttgtctggaatgttgactcccttgcatgaattcgtgtttaagaagtggtttttcggccggatgttcctgctaggtgactcggtccacaagcccaacccgataggcggtctaggtggtaacggagccatcgagacggcagctgagctcgtgaaccatctcttagatctcaaaaaccaacgagccggtagcttggacggcgtgtccgtcgaagagctcacgcctgtgttccagcagactcaagatattcgttacgagagggcaatgggtttcgtggaaagctctcacgaaatgcaagcactgcaagcgacggaaaataagctgatatacaatatcgcattccggcttgtgatgcctgtcgtcggcccaagactcttcgttcaaaaccagtctcgagaccaaagtctagctccacgactgaagtatctggacgcacccaaggatcgacctcacttccttcccttcctccacgaattaccagccaagcctatcacctcgcggcgtaggaatcaggtgttagctttcttcgctctactcatgataaccatttgttaccttacgaacagggtgattgggggcttttcccaatctgttactatgaacacacagtcggtcaactttttctcccgttacagtctgaactggccggcaatcgtctttttttcacccgggacagatgcaagccgcatacttagtgtgcagcatcaatactccctagcgcaatcaatttcgcctcttattttcttcacaatcgagggccacagaatcggtcgatcggttagcatatttgccttccctattctcttcacagcagctatgcagctacgcagcctttcagaagtcatgcccgtgtttgccctcctcagcgcattatcagcagaccaagcgacggtagatagacccgtcaatgcggacgcgatgcgatcactcgtacctgcgctcgctctcagcgcgatcgcagcgctctcctcgagctcttcctcgttacgcttcagtccgattctattttcggcattgactgtcctcttccgatatgccttgaagctacacaggcaatacgtcatcaagccgacggccgacagatatccatttccggaatggtacagcgcggaagacgtgccgtatcttaagtccatatacagacaagctttcgtcgcgcaagctcttgtgcacatcgcgacagtctcttatgtgagatggtcgctcgatttatcgctatctaatgttttctttgccgcattttattcggtcaacaccgcctcggatgtgatgagctacagtctccttgctaccgcagttggcatcatggctcataatctgttctcagtctggcagctccgactccaagcttacattactaccgaacaggcttacaaagcctgtatagccgttctagtaggacaggtatttgtaggatcaggtgcgacgtgggccggtctttgggcctggagagaggatgtgtatgtgaagatgtcgaccttgtcaggtgacaccgccgataaggtcttcccgttgacgaatgacgatgtcaaggcattggcagctgcgaaagcagacaagcgtgcatcgtaa

SEQ ID NO: 23777 - protein, 809 aa, Muscodor strobelii
  misc_feature: SGI Peptide ID NO. 568095
  misc_feature (6)..(370): Pfam Id: PF01494 Pfam Desc: FAD binding domain
  misc_feature (294)..(330): Pfam Id: PF01494 Pfam Desc: FAD binding domain
  misc_feature (1)..(771): NCBI GI: 119494160 Blast Desc: FAD binding domain protein [Neosartorya fischeri NRRL 181] gi|119412152|gb|EAW22093.1| FAD binding domain protein [Neosartorya fischeri NRRL 181]
  misc_feature (1)..(777): NCBI GI: 212533543 Blast Desc: monooxygenase, [Penicillium marneffei ATCC 18224] gi|210072292|gb|EEA26381.1| monooxygenase, [Penicillium marneffei ATCC 18224]
  misc_feature (19)..(778): NCBI GI: 238496933 Blast Desc: monooxygenase, [Aspergillus flavus NRRL3357] gi|220694582|gb|EED50926.1| monooxygenase, [Aspergillus flavus NRRL3357]
  misc_feature (1)..(777): NCBI GI: 55823911 Blast Desc: monooxygenase [Fusarium heterosporum]
  misc_feature (6)..(773): NCBI GI: 171694496 Blast Desc: protein product [Podospora anserina] gi|170947490|emb|CAP59651.1| protein product [Podospora anserina]
  misc_feature (1)..(774): NCBI GI: 39975645 Blast Desc: MGG_00031 [Magnaporthe grisea 70-15] gi|145019142|gb|EDK03421.1| MGG_00031 [Magnaporthe grisea 70-15]
  misc_feature (7)..(778): NCBI GI: 256720114 Blast Desc: NECHADRAFT_88533 [Nectria haematococca mpVI 77-13-4]
  misc_feature (1)..(596): NCBI GI: 242778338 Blast Desc: monooxygenase, [Talaromyces stipitatus ATCC 10500] gi|218722837|gb|EED22255.1| monooxygenase, [Talaromyces stipitatus ATCC 10500]
  misc_feature (7)..(773): NCBI GI: 46102717 Blast Desc: FG00057.1 [Gibberella zeae PH-1]
  misc_feature (193)..(778): NCBI GI: 261360691 Blast Desc: FAD binding domain-containing protein [Verticillium albo-atrum VaMs.102]
MASTKPFKVIVVGGGVAGLTLANMFEKFGIEYTILEAHNEIHPPAGASIALWANGSYILDQLGMYEAVEKISHTTKYADTFIRECTGIAATNSRFVQYHHERIGGYPLIFFERQMLLKVLYENLQNKDHIYLNSRVSRINHLQDGVEVITEDGYLHKGDIVLGADGIHSNVRREMRRIARMDDPTYFDPDEEDKVPCHYQCSFGIAQNVEAWGTDEQCFTTGTGHSFLVTAGPDSKVYWFLFVRLPKTAYGTEIPRYTKQDEAQFAEKYKHLKIKENVTFGQVYAKRLSGMLTPLHEFVFKKWFFGRMFLLGDSVHKPNPIGGLGGNGAIETAAELVNHLLDLKNQRAGSLDGVSVEELTPVFQQTQDIRYERAMGFVESSHEMQALQATENKLIYNIAFRLVMPVVGPRLFVQNQSRDQSLAPRLKYLDAPKDRPHFLPFLHELPAKPITSRRRNQVLAFFALLMITICYLTNRVIGGFSQSVTMNTQSVNFFSRYSLNWPAIVFFSPGTDASRILSVQHQYSLAQSISPLIFFTIEGHRIGRSVSIFAFPILFTAAMQLRSLSEVMPVFALLSALSADQATVDRPVNADAMRSLVPALALSAIAALSSSSSSLRFSPILFSALTVLFRYALKLHRQYVIKPTADRYPFPEWYSAEDVPYLKSIYRQAFVAQALVHIATVSYVRWSLDLSLSNVFFAAFYSVNTASDVMSYSLLATAVGIMAHNLFSVWQLRLQAYITTEQAYKACIAVLVGQVFVGSGATWAGLWAWREDVYVKMSTLSGDTADKVFPLTNDDVKALAAAKADKRAS

SEQ ID NO: 23778 - DNA, 3222 bp, Muscodor strobelii
  misc_feature: SGI cDNA ID NO. 568096
  misc_feature: Encodes the peptide sequence at SEQ ID NO 23779
atggcaaatatgccgagcctagccgtctcggctgtgacagcaaagaatgaaaaccaactcgctcttgccaacctaaactttgacttttcgctcgtcaagcttgccgctccggctgaatatgggcctctgggtcatgccctgtcttcctggcgacgagcaactgcagagagtggtcctgctcatcgaacagcgcgcaaacttggcgcattgtttgatcaagtcgtgcatccgggagatgagctggtcaaagcttacgggaaacgggcatcagaaatattttcatcgccaaaagctaggtcaacatcggcatataagtttggtttatttgagaaacatgcaggagcagatgggaccgctatttgggcagcagcgacgtctggtaaatccgctatcgcagttgtacttttagctttcatgctcgctagactctgggacggccccaaagcgatttcaatctggtcagagctggttgagaagaggaaaagtcagatcgccgagacatgtgacggaacggaaccctcacatatggcacctttggcggcggcacagcaggaaatcagtcgtcgagagctggccgagtgggactccagcgcacggtcatggctcgccatcgcggaccaggtgaaggcaaatgagcatagactaatggagtctgtactcttgaagctgtctcttcctgttgataacagttccgacgtattcctaagcgtggtcagagcgtggggtacggccatgaaaacgatggaaaagctaatcataggaataccgcaacgcatacacaacggcgccgcccttgtcggcatctccgcttggcatatttatcccgatgtcgacttgttcggctctcatacgatggcggtccgccaacaagatattcttgttcagccaggcgggcgtctgacagttggtcttgaagacgccgatccagtgtccggtcaaggtgtttattggtctctatctcttgcgaatcttcgatattatggggatccgatctacgccacaaaccatgttaaagatgaagcccgagtctctttcagcgagatcaccctcgtagctcttgggagcctatttgctagttgggagggccccggcttcgatgcgcattttgatcggctagaagctgccaagttcatcaccacattgtgggccacgctgaacaaaatctatgccagtagagcatttcctgtatcgcgcgacataaaaggccagcttcacgacattgtctctcaaaagagctggctgaatctcttagtcatggcctcagagagtatgttggacaaagacccagtacaggcactgcgagctcagaaacttgtggctctaggtggtcgtgatggcaaagatttcatgcagcccaaggagccgcgtatcgagccttttttcggcttctcggagccaagtcttgttcttccattattgagggatgccgatgctaggattggggtcctgaggaagatagctcagaagatatcccttggaaaagcatgcagcgacgcaattatacgctatgttaacaaagaaacaaacatgatagagtacgcgagtgcactgcctcgccagcaggaccaaaaagttgatcgtccaggcattctcggcgtgaccaaacgtcacaagcgctggatccaagagaaacaggaagcagaccgatctagtcgcaggaagctcgagattgagagcatgggggaggaatatgaagagttcgatccccattacgtttcctctgtattggtcgaccagtgcattgtgtggtacgagcagccaaacccagctgcggccttagattcggccatggcttaccaaacggcactggccaatggtactgctgaaagcgatctgtcatggatggacgaggtgctcgagcttgacagactgactaaatcgaggtctgttacgtatgaatatctaattggccatatagatagtgcggcgctcttcgtccaatatgaaagcgagagctgctcgagtgccgaagcccacaaacccattcagcaatcattaccagcgttcgagatcacacagataatgctctccggtcgcttctctgagatcaagttagtaaatcatatgagcaacatccacgcaagcaccgggactgctgtagatgatgcagtaaaccagcgagggaagattaattttgctgctcggcatccagagtacgatgacacggccaacccccccgcgatttaccgatcactacaggctttgactacagctgcacgcgtatatgccttgctcccggaagctaagatagctctacgtgttttggagtgtaggctatgggatgttgagtggatgccgccatcgtcctcaactggatgctcaaccttccaacctcgacacctgagtcttccccaaaccttatcttgcgttgcgatgtttgacacaggcaccctgaacattagagctgaggaattggacaaagttttcgccatatcgctggggagctccatttttgccgcaacacgactgctcattgacccgtttgaggaatgcgaggaatccgagctgcgtcacatcgtaggaaatgtaggacgcgctggagtgtcgatgctcatgccgcccggaaatccggtgcttcgaaaacccggcatgaatagctggcaagcaatcagtcacaaccccttcacgtcagagacaaagtgccaggaccatttcagtaatacgagcttacatgtcacgtttacggggtatgagcagccagttgcaagcgcagtgcgccacggcgcccaggatatcgaagcgtgctacctcgaaacactggtgtccgtatttgacggaagccgcaagataggtgacgtagatattctaaaagctctgaagagcccgatactgcaccgttatgatcaagctttggatgatgtgtgtcagcatcgcacccgcagccagaggggcgaccgccaaaataagagaaggaggacacaaatgccccgatggatctgtgtcgactcctggaacgagccccttgaacttccggagggcaagactggtatagttcgcgcgcatcaaaatccgtttgctcgactcgctgccgccgctgtctgttttcaaaaggagtttgtacagtgtgaaatcttacccccgggccctgttacttttgccttgatggaaggatatctgcggatggtccgagacgggccgctcttatatgctagggatcaggcggagttcaaagtatcagtccttcctccgaatcatatacagtgtaaaaaagaggctttataa

SEQ ID NO: 23779 - protein, 1073 aa, Muscodor strobelii
  misc_feature: SGI Peptide ID NO. 568096
  misc_feature (1)..(1017): NCBI GI: 238844746 Blast Desc: conserved [Microsporum canis CBS 113480]
  misc_feature (1)..(1017): NCBI GI: 261360699 Blast Desc: conserved [Verticillium albo-atrum VaMs.102]
  misc_feature (2)..(1026): NCBI GI: 145244114 Blast Desc: An11g05770 [Aspergillus niger] gi|134079251|emb|CAK40734.1| [Aspergillus niger]
  misc_feature (17)..(1026): NCBI GI: 255945597 Blast Desc: Pc20g10770 [Penicillium chrysogenum Wisconsin 54-1255] gi|211588301|emb|CAP86406.1| Pc20g10770 [Penicillium chrysogenum Wisconsin 54-1255]
  misc_feature (7)..(541): NCBI GI: 256731930 Blast Desc: NECHADRAFT_80807 [Nectria haematococca mpVI 77-13-4]
  misc_feature (7)..(560): NCBI GI: 115492241 Blast Desc: [Aspergillus terreus NIH2624] gi|114197608|gb|EAU39308.1| [Aspergillus terreus NIH2624]
  misc_feature (1)..(541): NCBI GI: 46137867 Blast Desc: FG10449.1 [Gibberella zeae PH-1]
  misc_feature (7)..(360): NCBI GI: 169604668 Blast Desc: SNOG_05349 [Phaeosphaeria nodorum SN15] gi|160706620|gb|EAT87740.2| SNOG_05349 [Phaeosphaeria nodorum SN15]
  misc_feature (7)..(452): NCBI GI: 169605903 Blast Desc: SNOG_05984 [Phaeosphaeria nodorum SN15] gi|111065928|gb|EAT87048.1| SNOG_05984 [Phaeosphaeria nodorum SN15]
  misc_feature (7)..(357): NCBI GI: 240111731 Blast Desc: CPC735_011940 [Coccidioides posadasii C735 delta SOWgp]
MANMPSLAVSAVTAKNENQLALANLNFDFSLVKLAAPAEYGPLGHALSSWRRATAESGPAHRTARKLGALFDQVVHPGDELVKAYGKRASEIFSSPKARSTSAYKFGLFEKHAGADGTAIWAAATSGKSAIAVVLLAFMLARLWDGPKAISIWSELVEKRKSQIAETCDGTEPSHMAPLAAAQQEISRRELAEWDSSARSWLAIADQVKANEHRLMESVLLKLSLPVDNSSDVFLSVVRAWGTAMKTMEKLIIGIPQRIHNGAALVGISAWHIYPDVDLFGSHTMAVRQQDILVQPGGRLTVGLEDADPVSGQGVYWSLSLANLRYYGDPIYATNHVKDEARVSFSEITLVALGSLFASWEGPGFDAHFDRLEAAKFITTLWATLNKIYASRAFPVSRDIKGQLHDIVSQKSWLNLLVMASESMLDKDPVQALRAQKLVALGGRDGKDFMQPKEPRIEPFFGFSEPSLVLPLLRDADARIGVLRKIAQKISLGKACSDAIIRYVNKETNMIEYASALPRQQDQKVDRPGILGVTKRHKRWIQEKQEADRSSRRKLEIESMGEEYEEFDPHYVSSVLVDQCIVWYEQPNPAAALDSAMAYQTALANGTAESDLSWMDEVLELDRLTKSRSVTYEYLIGHIDSAALFVQYESESCSSAEAHKPIQQSLPAFEITQIMLSGRFSEIKLVNHMSNIHASTGTAVDDAVNQRGKINFAARHPEYDDTANPPAIYRSLQALTTAARVYALLPEAKIALRVLECRLWDVEWMPPSSSTGCSTFQPRHLSLPQTLSCVAMFDTGTLNIRAEELDKVFAISLGSSIFAATRLLIDPFEECEESELRHIVGNVGRAGVSMLMPPGNPVLRKPGMNSWQAISHNPFTSETKCQDHFSNTSLHVTFTGYEQPVASAVRHGAQDIEACYLETLVSVFDGSRKIGDVDILKALKSPILHRYDQALDDVCQHRTRSQRGDRQNKRRRTQMPRWICVDSWNEPLELPEGKTGIVRAHQNPFARLAAAAVCFQKEFVQCEILPPGPVTFALMEGYLRMVRDGPLLYARDQAEFKVSVLPPNHIQCKKEAL

SEQ ID NO: 23780 - DNA, 3528 bp, Muscodor strobelii
  misc_feature: SGI EST ID NO. CUFF.55957.0
  misc_feature: Variant of the nucleotide sequence at SEQ ID NO 23778
gtgcgtggcattctgacgcaagaggttttgactgcgctggcacacgttgacgagatggtggcatgacgaatttattgtgcagccctgaatactgaccgatgtctcccaatttcagcaaatcttagatttcttctcctttaatctctcctcgtaaccagacacattgctgcatctcataggcgaacggaaagatatcgactgtcacacttgtctctcggggtcgaaagccccggcgcactcaaggttgaccactctcctagccataccgcagcctctttactcaactatggcaaatatgccgagcctagccgtctcggctgtgacagcaaagaatgaaaaccaactcgctcttgccaacctaaactttgacttttcgctcgtcaagcttgccgctccggctgaatatgggcctctgggtcatgccctgtcttcctggcgacgagcaactgcagagagtggtcctgctcatcgaacagcgcgcaaacttggcgcattgtttgatcaagtcgtgcatccgggagatgagctggtcaaagcttacgggaaacgggcatcagaaatattttcatcgccaaaagctaggtcaacatcggcatataagtttggtttatttgagaaacatgcaggagcagatgggaccgctatttgggcagcagcgacgtctggtaaatccgctatcgcagttgtacttttagctttcatgctcgctagactctgggacggccccaaagcgatttcaatctggtcagagctggttgagaagaggaaaagtcagatcgccgagacatgtgacggaacggaaccctcacatatggcacctttggcggcggcacagcaggaaatcagtcgtcgagagctggccgagtgggactccagcgcacggtcatggctcgccatcgcggaccaggtgaaggcaaatgagcatagactaatggagtctgtactcttgaagctgtctcttcctgttgataacagttccgacgtattcctaagcgtggtcagagcgtggggtacggccatgaaaacgatggaaaagctaatcataggaataccgcaacgcatacacaacggcgccgcccttgtcggcatctccgcttggcatatttatcccgatgtcgacttgttcggctctcatacgatggcggtccgccaacaagatattcttgttcagccaggcgggcgtctgacagttggtcttgaagacgccgatccagtgtccggtcaaggtgtttattggtctctatctcttgcgaatcttcgatattatggggatccgatctacgccacaaaccatgttaaagatgaagcccgagtctctttcagcgagatcaccctcgtagctcttgggagcctatttgctagttgggagggccccggcttcgatgcgcattttgatcggctagaagctgccaagttcatcaccacattgtgggccacgctgaacaaaatctatgccagtagagcatttcctgtatcgcgcgacataaaaggccagcttcacgacattgtctctcaaaagagctggctgaatctcttagtcatggcctcagagagtatgttggacaaagacccagtacaggcactgcgagctcagaaacttgtggctctaggtggtcgtgatggcaaagatttcatgcagcccaaggagccgcgtatcgagccttttttcggcttctcggagccaagtcttgttcttccattattgagggatgccgatgctaggattggggtcctgaggaagatagctcagaagatatcccttggaaaagcatgcagcgacgcaattatacgctatgttaacaaagaaacaaacatgatagagtacgcgagtgcactgcctcgccagcaggaccaaaaagttgatcgtccaggcattctcggcgtgaccaaacgtcacaagcgctggatccaagagaaacaggaagcagaccgatctagtcgcaggaagctcgagattgagagcatgggggaggaatatgaagagttcgatccccattacgtttcctctgtattggtcgaccagtgcattgtgtggtacgagcagccaaacccagctgcggccttagattcggccatggcttaccaaacggcactggccaatggtactgctgaaagcgatctgtcatggatggacgaggtgctcgagcttgacagactgactaaatcgaggtctgttacgtatgaatatctaattggccatatagatagtgcggcgctcttcgtccaatatgaaagcgagagctgctcgagtgccgaagcccacaaacccattcagcaatcattaccagcgttcgagatcacacagataatgctctccggtcgcttctctgagatcaagttagtaaatcatatgagcaacatccacgcaagcaccgggactgctgtagatgatgcagtaaaccagcgagggaagattaattttgctgctcggcatccagagtacgatgacacggccaacccccccgcgatttaccgatcactacaggctttgactacagctgcacgcgtatatgccttgctcccggaagctaagatagctctacgtgttttggagtgtaggctatgggatgttgagtggatgccgccatcgtcctcaactggatgctcaaccttccaacctcgacacctgagtcttccccaaaccttatcttgcgttgcgatgtttgacacaggcaccctgaacattagagctgaggaattggacaaagttttcgccatatcgctggggagctccatttttgccgcaacacgactgctcattgacccgtttgaggaatgcgaggaatccgagctgcgtcacatcgtaggaaatgtaggacgcgctggagtgtcgatgctcatgccgcccggaaatccggtgcttcgaaaacccggcatgaatagctggcaagcaatcagtcacaaccccttcacgtcagagacaaagtgccaggaccatttcagtaatacgagcttacatgtcacgtttacggggtatgagcagccagttgcaagcgcagtgcgccacggcgcccaggatatcgaagcgtgctacctcgaaacactggtgtccgtatttgacggaagccgcaagataggtgacgtagatattctaaaagctctgaagagcccgatactgcaccgttatgatcaagctttggatgatgtgtgtcagcatcgcacccgcagccagaggggcgaccgccaaaataagagaaggaggacacaaatgccccgatggatctgtgtcgactcctggaacgagccccttgaacttccggagggcaagactggtatagttcgcgcgcatcaaaatccgtttgctcgactcgctgccgccgctgtctgttttcaaaaggagtttgtacagtgtgaaatcttacccccgggccctgttacttttgccttgatggaaggatatctgcggatggtccgagacgggccgctcttatatgctagggatcaggcggagttcaaagtatcagtccttcctccgaatcatatacagtgtaaaaaagaggctttataatcctgaactacataaattcc

SEQ ID NO: 23781 - DNA, 990 bp, Muscodor strobelii
  misc_feature: SGI cDNA ID NO. 568097
  misc_feature: Encodes the peptide sequence at SEQ ID NO 23782
atgcctcaaatcgtcggaaaagaagttggtcctattgggctaggactcatgggcttcacatggcgacaagatcccccgtctatggagcaagcttttgaaaccatgcgagaggcgattagccgaggagcgacctgctggaacggcggcgaattttacggtcctccagaatacaattctctggtactgcttgaaaaatacttcgagaaatatcctgaggatgcggaaaaagtcactctcaatatcaagggaggcacgaatctcaagacccacaaacctgatggaagtcctgaaaacactcggcgaactatcgatgattgcatggcccagttgaaaggccgcaagaaaattgatatgtttgaattcgctcgccgcgatcccgatgtgcctttggaagtaactcttggtgtcatcgacaaggagtacgtccagactggcaagattggaggtatcgcactatcggaggtcagagccgagactattcatgaggctgccaagattacgaaaatcgttgcagtagagctcgaagtttcgatgttttctactgagttcttgacgaacggcgttgctgaggcatgcgctaaatacgatattcccatcatcgcatactcgccaataggtcgaggtatgctgactggtgctgtcaaaaagcgggaagaccttaactatcttctcgttgccatgaaatttcctcgattccaggaaggagcatttgaagccaatatgaaacttgttcaccaagtggaagagcttgccaagaagaagggatgtacgccagcacagctcgccatcaattggacgacggctctttcaaagcgaccaggcatgcccttgatcgtcccaattccaggcgccacaactgccgcgagagtcgaagaaaatagcaagattgttgagctcacagaggaagaaatgaaggagatcgatgctacgctggccaccttcgaacccgtaggtgatcgctaccctggtggcgttcctactaacacgtaa

SEQ ID NO: 23782 - protein, 329 aa, Muscodor strobelii
  misc_feature: SGI Peptide ID NO. 568097
  misc_feature (6)..(312): Pfam Id: PF00248 Pfam Desc: Aldo/keto reductase family
  misc_feature (1)..(329): NCBI GI: 238484713 Blast Desc: aldo/keto reductase, [Aspergillus flavus NRRL3357] gi|220701645|gb|EED57983.1| aldo/keto reductase, [Aspergillus flavus NRRL3357]
  misc_feature (1)..(329): NCBI GI: 115492031 Blast Desc: conserved [Aspergillus terreus NIH2624] gi|114197503|gb|EAU39203.1| conserved [Aspergillus terreus NIH2624]
  misc_feature (1)..(329): NCBI GI: 145257414 Blast Desc: An04g03570 [Aspergillus niger] gi|134058638|emb|CAK38622.1| protein product [Aspergillus niger]
  misc_feature (1)..(329): NCBI GI: 67904384 Blast Desc: AN9179.2 [Aspergillus nidulans FGSC A4] gi|40742280|gb|EAA61470.1| AN9179.2 [Aspergillus nidulans FGSC A4] gi|259485392|tpe|CBF82377.1| TPA: pyridoxal reductase (AKR8),
  misc_feature (1)..(329): NCBI GI: 169767802 Blast Desc: [Aspergillus oryzae RIB40] gi|83766227|dbj|BAE56370.1| protein product [Aspergillus oryzae]
  misc_feature (1)..(329): NCBI GI: 261357533 Blast Desc: pyridoxal reductase [Verticillium albo-atrum VaMs.102]
  misc_feature (1)..(329): NCBI GI: 85091461 Blast Desc: NCU09141 [Neurospora crassa OR74A] gi|28920304|gb|EAA29677.1| NCU09141 [Neurospora crassa OR74A]
  misc_feature (1)..(329): NCBI GI: 256735285 Blast Desc: NECHADRAFT_90163 [Nectria haematococca mpVI 77-13-4]
  misc_feature (1)..(329): NCBI GI: 46106514 Blast Desc: FG00427.1 [Gibberella zeae PH-1]
  misc_feature (1)..(322): NCBI GI: 154318171 Blast Desc: BC1G_03253 [Botryotinia fuckeliana B05.10] gi|150842776|gb|EDN17969.1| BC1G_03253 [Botryotinia fuckeliana B05.10]
  misc_feature (1)..(321): SWISSPROT Homolog: EC 1.1.1.65 Pyridoxine 4-dehydrogenase
MPQIVGKEVGPIGLGLMGFTWRQDPPSMEQAFETMREAISRGATCWNGGEFYGPPEYNSLVLLEKYFEKYPEDAEKVTLNIKGGTNLKTHKPDGSPENTRRTIDDCMAQLKGRKKIDMFEFARRDPDVPLEVTLGVIDKEYVQTGKIGGIALSEVRAETIHEAAKITKIVAVELEVSMFSTEFLTNGVAEACAKYDIPIIAYSPIGRGMLTGAVKKREDLNYLLVAMKFPRFQEGAFEANMKLVHQVEELAKKKGCTPAQLAINWTTALSKRPGMPLIVPIPGATTAARVEENSKIVELTEEEMKEIDATLATFEPVGDRYPGGVPTNT

SEQ ID NO: 23783 - DNA, 1611 bp, Muscodor strobelii
  misc_feature: SGI EST ID NO. CUFF.56006.0
  misc_feature: Variant of the nucleotide sequence at SEQ ID NO 23781
ccggtccccactaggtcatctcgaaagggagacagtatctccggagctatacccaattcgacttagctcatttttactcctgcattgttcgggtttaaccctcggaagacaagacatccaccatgggtgtgacgacatggaatcgtgttgcctgtgaggttgccgctacagtggagaaaatattgggcgcaaggggcacattaataacagacaggtggaacgagatgagtatatatattcagacatcgactctcaattggcatgaaattttcaagatagatcatcacagctagcctttcaatcacctgaatacagcaatctcccttccactgttcccaaacatcacgcggaaaccaagtgcaccatgcctcaaatcgtcggaaaagaagttggtcctattgggctaggactcatgggcttcacatggcgacaagatcccccgtctatggagcaagcttttgaaaccatgcgagaggcgattagccgaggagcgacctgctggaacggcggcgaattttacggtcctccagaatacaattctctggtactgcttgaaaaatacttcgagaaatatcctgaggatgcggaaaaagtcactctcaatatcaagggaggcacgaatctcaagacccacaaacctgatggaagtcctgaaaacactcggcgaactatcgatgattgcatggcccagttgaaaggccgcaagaaaattgatatgtttgaattcgctcgccgcgatcccgatgtgcctttggaagtaactcttggtgtcatcgacaaggagtacgtccagactggcaagattggaggtatcgcactatcggaggtcagagccgagactattcatgaggctgccaagattacgaaaatcgttgcagtagagctcgaagtttcgatgttttctactgagttcttgacgaacggcgttgctgaggcatgcgctaaatacgatattcccatcatcgcatactcgccaataggtcgaggtatgctgactggtgctgtcaaaaagcgggaagaccttaactatcttctcgttgccatgaaatttcctcgattccaggaaggagcatttgaagccaatatgaaacttgttcaccaagtggaagagcttgccaagaagaagggatgtacgccagcacagctcgccatcaattggacgacggctctttcaaagcgaccaggcatgcccttgatcgtcccaattccaggcgccacaactgccgcgagagtcgaagaaaatagcaagattgttgagctcacagaggaagaaatgaaggagatcgatgctacgctggccaccttcgaacccgtaggtgatcgctaccctggtggcgttcctactaacacgtaaggattttgtggttgggttatcaaacaagaaacttgtaaattatgcaattgattactagaagctgcagctgtatgatagaaagaccatcgcaccttcaaacctgcctgactcaacgtgtttgactcatgctgatgcaacaagtcatcaatgatggatgcttatagtaggggtataggagcttgaggggtgcaggcaggcagggttcgtaatgtaagattacataaaggtttcgagagacaatacaagatacaatcgcc

SEQ ID NO: 23784 - DNA, 672 bp, Muscodor strobelii
  misc_feature: SGI cDNA ID NO. 568098
  misc_feature: Elevated expression when VOC is produced
  misc_feature: Encodes the peptide sequence at SEQ ID NO 23785
atgcgcagcactacggtcctctcctttgccgcggcctttgtcggcgtcgcgctgtcagagtctgatgccgcatattgcaaatcgaaaatgagctggttccttagctgggcagaccaagtcaccacacccgctgaaatccagtcgttcgtcgctactcgaactgatatcccgcctgatgtccgttctttcgaccctgagaaacacatcgcacagctctgtgccgtctctaaggcgctgccttcgtcgttgctacatttctacgacgagtacgatgcctcagtccgcgaactcgtcgaagcctcgcctaccgtcttgatagaagtagctacggagtgtgagccagcatcaaaggcctccagtattaccacctacctccaagtcatgtacgagactccccggggtgtttgcgatcctcccccgccgccggccacaactaccgcctcggccccggcaagcagtgatagcgagtgccccatcacgagcccggcgtcgtacagctactcttaccctgtcccgaccagtacaggatacgtcacgccccccacaaacggtaccactacctcctctatctccagctcgatccccactgctgctgctgctagacccactggcatcttgctgggtgctgccgccgctgtgggcggtattctcggtgctgcggttctcctctaa

SEQ ID NO: 23785 - protein, 223 aa, Muscodor strobelii
  misc_feature: SGI Peptide ID NO. 568098
  misc_feature: Useful for introducing or modulating the production of volatile compounds
MRSTTVLSFAAAFVGVALSESDAAYCKSKMSWFLSWADQVTTPAEIQSFVATRTDIPPDVRSFDPEKHIAQLCAVSKALPSSLLHFYDEYDASVRELVEASPTVLIEVATECEPASKASSITTYLQVMYETPRGVCDPPPPPATTTASAPASSDSECPITSPASYSYSYPVPTSTGYVTPPTNGTTTSSISSSIPTAAAARPTGILLGAAAAVGGILGAAVLL

SEQ ID NO: 23786 - DNA, 3224 bp, Muscodor strobelii
  misc_feature: SGI EST ID NO. CUFF.56138.1
  misc_feature: Variant of the nucleotide sequence at SEQ ID NO 23784
cggccgcatatttcaaatactgccaggcctatatcgctacggcataggtcgcgccgcacgtataattgccaagcaatccgtatagtttataattagatccatgattactagatgtgtagttttgcgccttcaaacatcaacgccgttaacccaatccttttatcatcagtgtcctcgaggcattttcaatcattctacgaaaatggcgattgtgcgcctcggccgacattatgtctgcttgccagtgcggccgtataactctatgcagacaaatcagcagagcttttaccatcgctggcgtgaaattttgttgggattattagcaattaacacgtacaattcgtgatccgataccccatcaccagccagacagttctatgcctttgagcgatggcgctaagaaccaaacctatcggtgataatggagttcgttgcgtttcttataagattcggagccgaaacagattggtggtgattaacgccgataatgcattcatatgtcgtcctctcttaagattttgcgaaagtgaactccggatggggggtaggcgttggagttcatgtccatcccgtgtggcagatctggttgcctgattgggaagggcttatccatcagctgaattgctctggttgattggacgctgcctactactggtttcacaatttcacaatcttacaatcttaggcttgctcgtcataaaaaactcggctactacacagctagcatgttcctgatcaaggaagtcggcgcacgagtgcctaggtagtaatgctctattaataaagcgtggtcgagatcatgtcatgacggcttagcatttttcgctaagcaaggaacggatcgaaagaggatgaaccgagttagcatgttctacggtgctttgtactaactcttactaaatcaggtatataaacgatcgtcaggctcgtgaagacttcgaataactcattccttctcatcacactctcacttgagtttcattcattcgctatacagcttgggaacattcattcatccaggaaacgaaatgcgcagcactacggtcctctcctttgccgcggcctttgtcggcgtcgcgctgtcagagtctgatgccgcatattgcaaatcgaaaatgagctggttccttagctgggcagaccaagtcaccacacccgctgaaatccagtcgttcgtcgctactcgaactgatatcccgcctgatgtccgttctttcgaccctgagaaacacatcgcacagctctgtgccgtctctaaggcgctgccttcgtcgttgctacatttctacgacgagtacgatgcctcagtccgcgaactcgtcgaagcctcgcctaccgtcttgatagaagtagctacggagtgtgagccagcatcaaaggcctccagtattaccacctacctccaagtcatgtacgagactccccggggtgtttgcgatcctcccccgccgccggccacaactaccgcctcggccccggcaagcagtgatagcgagtgccccatcacgagcccggcgtcgtacagctactcttaccctgtcccgaccagtacaggatacgtcacgccccccacaaacggtaccactacctcctctatctccagctcgatccccactgctgctgctgctagacccactggcatcttgctgggtgctgccgccgctgtgggcggtattctcggtgctgcggttctcctctaagaatagacggctgttcgagatggagacaccttcaatgactgcgaaagacagttaaattggatctcagcatgcatctagggtatacttattcatactaggagcgatgggatcaaagtggttggtgaggttgattatcaatctcatgagttttcgacaagccggccctctaattctgtgttatatacttgctttcttggatttactccttaagatcttggtcggagttgacttcacgtatatacttcagattgtatataatgctctatcttgtctctataccaagaagtgttttcttcacaaacggtgaccctgttgagcgaccttcatcgcaattcaatttttctcgcctcgttcccaacgatctcccctgcgaatcccccatacaagatcccatgtatgtatgtcataggccagacgattctacagcatcgcagcatcaaattgatcaagcgacatggccgccatcagctaagtaacaataccaaccaagctccgaagtcttccaggtatcccctaatggcggctcttgagtttgaactctacacccgaaggcttattatacttcccaatgaagaagtcgccagccagtgtcacatcgtagggagtcgtgttatggaggcttagaaccccaatttcgtcaccgagagcgacctccggggtggcgtacagtcgccagatctgagctaaccctagtcgcacctctccccaggctaagttcatacccagacagatgcgactaccttttccaaatccgaccatatacttgtcgagcttcttaccttcttcgccgaggaatcggtcaggattaaatcggtagctatccgggaaattggactcgatgtggtgcagcagcacgctcgacatacccaccggcgtgcctggtgggatcacccatgtctttcccgaaaccttatcttcgtaagtcaaggcttgatccggacaggaccggagatgcggcgtcgagtttccgtagatcaggcgaatgctttctttgatgacggccgtcatataaggtagagcctcgagagccgtgagagggattttgcccacatcattgatcgaaggcataacactgtacaactcttccttcagtttcctcagcacatccgggtatgtgcacatccagtacgtcaaatgctccatgtcgtacgccatggtcagcgtacccgccatctgcaacatctgtgcatcttgagcaaggcggtccgaaagccgctcgtgggcaggcagcttttccgaatccataatagtacggaacatggggacgatatcttgtccttcccactcatccatcgatgtcgagcacagtttcgccattttggctctcacctccttcttttgcttcatgtaagcaccgagagcaggacttagggcgtaattgaaccaatcaggaagcggcatcaagacttcgttcatccaaggcacgcgcttcaatatgtggaacgattgtgccccatccagagatgcatcacgatctgatggatcgaagcccgggctttctatagcacacggctatcagcctcc

SEQ ID NO: 23787 - DNA, 1572 bp, Muscodor strobelii
  misc_feature: SGI cDNA ID NO. 568099
  misc_feature: Elevated expression when VOC is produced
  misc_feature: Encodes the peptide sequence at SEQ ID NO 23788
atggcgttaacatacattgccgccgccctggtggctgtcgcgggctatgtcgtctactgtgcgatatggcgattatacttctcgcctattgcacacttcccgggacccaaattagcggcacttacatcactctatgatatgtactataacatttggctcggtggcaagtacatttggcgtattagggacatgcacgagaagtatggtcccattatcagggtatcaccctgggacttgcatgtcagcgacccggattttcacgagatcctctacccgagcacgagtagtggacgacgtgctgacaaggaggaaaccttgaccaagtttttcgggctcgatgattctctattttccaccatggaacatgaccttcataagatgcgccgaacggctctgcttccgtatttcagtacaagctatgtgaggaggttgcagccggtcctccaagaaagactagatgttctccttagccgaatgagagaatatcatgatacagatgaacctatcaatgcaaactgcatgtttgctgcattcagcaatgatatcacccagatgacatcctttggctattgttccaagaaaatagaaagcccgggcttcgatccatcagatcgtgatgcatctctggatggggcacaatcgttccacatattgaagcgcgtgccttggatgaacgaagtcttgatgccgcttcctgattggttcaattacgccctaagtcctgctctcggtgcttacatgaagcaaaagaaggaggtgagagccaaaatggcgaaactgtgctcgacatcgatggatgagtgggaaggacaagatatcgtccccatgttccgtactattatggattcggaaaagctgcctgcccacgagcggctttcggaccgccttgctcaagatgcacagatgttgcagatggcgggtacgctgaccatggcgtacgacatggagcatttgacgtactggatgtgcacatacccggatgtgctgaggaaactgaaggaagagttgtacagtgttatgccttcgatcaatgatgtgggcaaaatccctctcacggctctcgaggctctaccttatatgacggccgtcatcaaagaaagcattcgcctgatctacggaaactcgacgccgcatctccggtcctgtccggatcaagccttgacttacgaagataaggtttcgggaaagacatgggtgatcccaccaggcacgccggtgggtatgtcgagcgtgctgctgcaccacatcgagtccaatttcccggatagctaccgatttaatcctgaccgattcctcggcgaagaaggtaagaagctcgacaagtatatggtcggatttggaaaaggtagtcgcatctgtctgggtatgaacttagcctggggagaggtgcgactagggttagctcagatctggcgactgtacgccaccccggaggtcgctctcggtgacgaaattggggttctaagcctccataacacgactccctacgatgtgacactggctggcgacttcttcattgggaagtataataagccttcgggtgtagagttcaaactcaagagccgccattag

SEQ ID NO: 23788 - protein, 523 aa, Muscodor strobelii
  misc_feature: SGI Peptide ID NO. 568099
  misc_feature (38)..(500): Pfam Id: PF00067 Pfam Desc: Cytochrome P450
  misc_feature (320)..(470): Pfam Id: PF00067 Pfam Desc: Cytochrome P450
  misc_feature (3)..(521): NCBI GI: 116208594 Blast Desc: CHGG_03590 [Chaetomium globosum CBS 148.51] gi|88184187|gb|EAQ91655.1| CHGG_03590 [Chaetomium globosum CBS 148.51]
  misc_feature (3)..(506): NCBI GI: 145234316 Blast Desc: An02g13980 [Aspergillus niger] gi|134057475|emb|CAK48829.1| protein product [Aspergillus niger]
  misc_feature (16)..(521): NCBI GI: 46129248 Blast Desc: FG08809.1 [Gibberella zeae PH-1]
  misc_feature (11)..(506): NCBI GI: 169765436 Blast Desc: [Aspergillus oryzae RIB40] gi|83765044|dbj|BAE55187.1| protein product [Aspergillus oryzae]
  misc_feature (6)..(513): NCBI GI: 255938474 Blast Desc: Pc14g00120 [Penicillium chrysogenum Wisconsin 54-1255] gi|211584628|emb|CAP74153.1| Pc14g00120 [Penicillium chrysogenum Wisconsin 54-1255]
  misc_feature (16)..(521): NCBI GI: 256734151 Blast Desc: [Nectria haematococca mpVI 77-13-4]
  misc_feature (5)..(507): NCBI GI: 259487140 Blast Desc: TPA: cytochrome P450, (Eurofung) [Aspergillus nidulans FGSC A4]
  misc_feature (10)..(503): NCBI GI: 259485196 Blast Desc: TPA: cytochrome P450, (Eurofung) [Aspergillus nidulans FGSC A4]
  misc_feature (6)..(506): NCBI GI: 119499275 Blast Desc: cytochrome P450, [Neosartorya fischeri NRRL 181] gi|119414559|gb|EAW24498.1| cytochrome P450, [Neosartorya fischeri NRRL 181]
  misc_feature (6)..(486): NCBI GI: 171688250 Blast Desc: protein product [Podospora anserina] gi|170944087|emb|CAP70197.1| protein product [Podospora anserina]
  misc_feature (34)..(476): SWISSPROT Homolog: EC 1.14.14.1 Unspecific monooxygenase
  misc_feature: Useful for introducing or modulating the production of volatile compounds
MALTYIAAALVAVAGYVVYCAIWRLYFSPIAHFPGPKLAALTSLYDMYYNIWLGGKYIWRIRDMHEKYGPIIRVSPWDLHVSDPDFHEILYPSTSSGRRADKEETLTKFFGLDDSLFSTMEHDLHKMRRTALLPYFSTSYVRRLQPVLQERLDVLLSRMREYHDTDEPINANCMFAAFSNDITQMTSFGYCSKKIESPGFDPSDRDASLDGAQSFHILKRVPWMNEVLMPLPDWFNYALSPALGAYMKQKKEVRAKMAKLCSTSMDEWEGQDIVPMFRTIMDSEKLPAHERLSDRLAQDAQMLQMAGTLTMAYDMEHLTYWMCTYPDVLRKLKEELYSVMPSINDVGKIPLTALEALPYMTAVIKESIRLIYGNSTPHLRSCPDQALTYEDKVSGKTWVIPPGTPVGMSSVLLHHIESNFPDSYRFNPDRFLGEEGKKLDKYMVGFGKGSRICLGMNLAWGEVRLGLAQIWRLYATPEVALGDEIGVLSLHNTTPYDVTLAGDFFIGKYNKPSGVEFKLKSRH

SEQ ID NO: 23789 - DNA, 3927 bp, Muscodor strobelii
  misc_feature: SGI EST ID NO. CUFF.56139.2
  misc_feature: Variant of the nucleotide sequence at SEQ ID NO 23787
cttcatgatatctaagagtttcctaatcaaggcagtcacatatatgccattactatgatactgcatagaagatgtctttttatgaccaccagtataagaacgtctgggaccttttagcagcgcttcgtatcgacataagattcgacccttgagaccttcgtcggaagaggttcagtccaattttcaaatttctgatctcatcaccgagattaatggcgttaacatacattgccgccgccctggtggctgtcgcgggctatgtcgtctactgtgcgatatggcgattatacttctcgcctattgcacacttcccgggacccaaattagcggcacttacatcactctatgatatgtactataacatttggctcggtggcaagtacatttggcgtattagggacatgcacgagaagtatggtcccattatcagggtatcaccctgggacttgcatgtcagcgacccggattttcacgagatcctctacccgagcacgagtagtggacgacgtgctgacaaggaggaaaccttgaccaagtttttcgggctcgatgattctctattttccaccatggaacatgaccttcataagatgcgccgaacggctctgcttccgtatttcagtacaagctatgtgaggaggttgcagccggtcctccaagaaagactagatgttctccttagccgaatgagagaatatcatgatacagatgaacctatcaatgcaaactgcatgtttgctgcattcagcaatgatatcacccagatgacatcctttggctattgttccaagaaaatagaaagcccgggcttcgatccatcagatcgtgatgcatctctggatggggcacaatcgttccacatattgaagcgcgtgccttggatgaacgaagtcttgatgccgcttcctgattggttcaattacgccctaagtcctgctctcggtgcttacatgaagcaaaagaaggaggtgagagccaaaatggcgaaactgtgctcgacatcgatggatgagtgggaaggacaagatatcgtccccatgttccgtactattatggattcggaaaagctgcctgcccacgagcggctttcggaccgccttgctcaagatgcacagatgttgcagatggcgggtacgctgaccatggcgtacgacatggagcatttgacgtactggatgtgcacatacccggatgtgctgaggaaactgaaggaagagttgtacagtgttatgccttcgatcaatgatgtgggcaaaatccctctcacggctctcgaggctctaccttatatgacggccgtcatcaaagaaagcattcgcctgatctacggaaactcgacgccgcatctccggtcctgtccggatcaagccttgacttacgaagataaggtttcgggaaagacatgggtgatcccaccaggcacgccggtgggtatgtcgagcgtgctgctgcaccacatcgagtccaatttcccggatagctaccgatttaatcctgaccgattcctcggcgaagaaggtaagaagctcgacaagtatatggtcggatttggaaaaggtagtcgcatctgtctgggtatgaacttagcctggggagaggtgcgactagggttagctcagatctggcgactgtacgccaccccggaggtcgctctcggtgacgaaattggggttctaagcctccataacacgactccctacgatgtgacactggctggcgacttcttcattgggaagtataataagccttcgggtgtagagttcaaactcaagagccgccattaggggatacctggaagacttcggagcttggttggtattgttacttagctgatggcggccatgtcgcttgatcaatttgatgctgcgatgctgtagaatcgtctggcctatgacatacatacatgggatcttgtatgggggattcgcaggggagatcgttgggaacgaggcgagaaaaattgaattgcgatgaaggtcgctcaacagggtcaccgtttgtgaagaaaacacttcttggtatagagacaagatagagcattatatacaatctgaagtatatacgtgaagtcaactccgaccaagatcttaaggagtaaatccaagaaagcaagtatataacacagaattagagggccggcttgtcgaaaactcatgagattgataatcaacctcaccaaccactttgatcccatcgctcctagtatgaataagtataccctagatgcatgctgagatccaatttaactgtctttcgcagtcattgaaggtgtctccatctcgaacagccgtctattcttagaggagaaccgcagcaccgagaataccgcccacagcggcggcagcacccagcaagatgccagtgggtctagcagcagcagcagtggggatcgagctggagatagaggaggtagtggtaccgtttgtggggggcgtgacgtatcctgtactggtcgggacagggtaagagtagctgtacgacgccgggctcgtgatggggcactcgctatcactgcttgccggggccgaggcggtagttgtggccggcggcgggggaggatcgcaaacaccccggggagtctcgtacatgacttggaggtaggtggtaatactggaggcctttgatgctggctcacactccgtagctacttctatcaagacggtaggcgaggcttcgacgagttcgcggactgaggcatcgtactcgtcgtagaaatgtagcaacgacgaaggcagcgccttagagacggcacagagctgtgcgatgtgtttctcagggtcgaaagaacggacatcaggcgggatatcagttcgagtagcgacgaacgactggatttcagcgggtgtggtgacttggtctgcccagctaaggaaccagctcattttcgatttgcaatatgcggcatcagactctgacagcgcgacgccgacaaaggccgcggcaaaggagaggaccgtagtgctgcgcatttcgtttcctggatgaatgaatgttcccaagctgtatagcgaatgaatgaaactcaagtgagagtgtgatgagaaggaatgagttattcgaagtcttcacgagcctgacgatcgtttatatacctgatttagtaagagttagtacaaagcaccgtagaacatgctaactcggttcatcctctttcgatccgttccttgcttagcgaaaaatgctaagccgtcatgacatgatctcgaccacgctttattaatagagcattactacctaggcactcgtgcgccgacttccttgatcaggaacatgctagctgtgtagtagccgagttttttatgacgagcaagcctaagattgtaagattgtgaaattgtgaaaccagtagtaggcagcgtccaatcaaccagagcaattcagctgatggataagcccttcccaatcaggcaaccagatctgccacacgggatggacatgaactccaacgcctaccccccatccggagttcactttcgcaaaatcttaagagaggacgacatatgaatgcattatcggcgttaatcaccaccaatctgtttcggctccgaatcttataagaaacgcaacgaactccattatcaccgataggtttggttcttagcgccatcgctcaaaggcatagaactgtctggctggtgatggggtatcggatcacgaattgtacgtgttaattgctaataatcccaacaaaatttcacgccagcgatggtaaaagctctgctgatttgtctgcatagagttatacggccgcactggcaagcagacataatgtcggccgaggcgcacaatcgccattttcgtagaatgattgaaaatgcctcgaggacactgatgataaaaggattgggttaacggcgttgatgtttgaaggcgcaaaactacacatctagtaatcatggatctaattataaactatacggattgctt

SEQ ID NO: 23790 - DNA, 705 bp, Muscodor strobelii
  misc_feature: SGI cDNA ID NO. 568100
  misc_feature: Encodes the peptide sequence at SEQ ID NO 23791
atgacagaacgtctgccttcacttatagctttcgggccacagactgagttaccgtctgctgactccctagatgctattcgtgaagagctcatcaccaactcttctctctctactctccgggaagctatttgttccctgccacgcttctgggaagacttattatgctttgacacaaaactctcccaagtccctggagacaagcacctcgctcagctaaaacactgggtcgagtatggtggcccattccctcgcccagacggggacggaccaaaccactttgttctccctgtcactgtcctcctccagataactcagtatacccgctaccttgcccagcttggcaaggacggccatgctcgagtccttcaaagcgtgaaggcagagggtattaatggcttctgcgttggatttctcgctgcaacagcggtggccagcgcagcaagagagaatgatctcggtttctacgcaactattgcacttcggctggccgtgtgctttggagcatacgtagatctagactctacatattcccctgaagcacaaccatatcgagcactggctgttcgatggcgggcaaaaagcaacgaggatcgtgatagagcctacgatttcatcaactcaatatccgatgtaagtcgatcgcccgatttttcaaacttatctctgaccaggtttcaagctttacatttcaagcatcaacgatga

SEQ ID NO: 23791 - protein, 234 aa, Muscodor strobelii
  misc_feature: SGI Peptide ID NO. 568100
  misc_feature (1)..(223): NCBI GI: 119483954 Blast Desc: polyketide synthase, [Neosartorya fischeri NRRL 181] gi|119410036|gb|EAW19983.1| polyketide synthase, [Neosartorya fischeri NRRL 181]
  misc_feature (1)..(223): NCBI GI: 159123854 Blast Desc: PKS-like enzyme, [Aspergillus fumigatus A1163]
  misc_feature (1)..(223): NCBI GI: 70982887 Blast Desc: PKS-like enzyme [Aspergillus fumigatus Af293] gi|66844596|gb|EAL84933.1| PKS-like enzyme, [Aspergillus fumigatus Af293]
  misc_feature (6)..(198): NCBI GI: 115390605 Blast Desc: ATEG_03629 [Aspergillus terreus NIH2624] gi|114193731|gb|EAU35431.1| ATEG_03629 [Aspergillus terreus NIH2624]
  misc_feature (6)..(192): NCBI GI: 67540556 Blast Desc: AN6448.2 [Aspergillus nidulans FGSC A4] gi|40739280|gb|EAA58470.1| AN6448.2 [Aspergillus nidulans FGSC A4] gi|259479323|tpe|CBF69451.1| TPA: polyketide synthase, (JCVI)
  misc_feature (6)..(207): NCBI GI: 116204489 Blast Desc: CHGG_10128 [Chaetomium globosum CBS 148.51] gi|88176256|gb|EAQ83724.1| CHGG_10128 [Chaetomium globosum CBS 148.51]
  misc_feature (1)..(191): NCBI GI: 156053880 Blast Desc: SS1G_05788 [Sclerotinia sclerotiorum 1980] gi|154703568|gb|EDO03307.1| SS1G_05788 [Sclerotinia sclerotiorum 1980]
  misc_feature (7)..(228): NCBI GI: 40787360 Blast Desc: polyketide synthase [Botryotinia fuckeliana]
  misc_feature (1)..(199): NCBI GI: 46117492 Blast Desc: FG04588.1 [Gibberella zeae PH-1]
  misc_feature (1)..(211): NCBI GI: 242821846 Blast Desc: polyketide synthase, [Talaromyces stipitatus ATCC 10500] gi|218712685|gb|EED12110.1| polyketide synthase, [Talaromyces stipitatus ATCC 10500]
MTERLPSLIAFGPQTELPSADSLDAIREELITNSSLSTLREAICSLPRFWEDLLCFDTKLSQVPGDKHLAQLKHWVEYGGPFPRPDGDGPNHFVLPVTVLLQITQYTRYLAQLGKDGHARVLQSVKAEGINGFCVGFLAATAVASAARENDLGFYATIALRLAVCFGAYVDLDSTYSPEAQPYRALAVRWRAKSNEDRDRAYDFINSISDVSRSPDFSNLSLTRFQALHFKHQR

SEQ ID NO: 23792 - DNA, 7829 bp, Muscodor strobelii
  misc_feature: SGI EST ID NO. CUFF.55984.0
  misc_feature: Variant of the nucleotide sequence at SEQ ID NO 23790
tattactgtatgacactttcacctgctatatgttctatagattggggtatcgtcatatcttgtccctactcccatgagcaccggtcgtattgtctcttagaaagcttccttgaatcatatagtctcactccccgcgaacatttcctcggcatcagttcatggccattgcgtggggagtctcaacacttcttcatattcctatcccatcagaatgacagaacgtctgccttcacttatagctttcgggccacagactgagttaccgtctgctgactccctagatgctattcgtgaagagctcatcaccaactcttctctctctactctccgggaagctatttgttccctgccacgcttctgggaagacttattatgctttgacacaaaactctcccaagtccctggagacaagcacctcgctcagctaaaacactgggtcgagtatggtggcccattccctcgcccagacggggacggaccaaaccactttgttctccctgtcactgtcctcctccagataactcagtatacccgctaccttgcccagcttggcaaggacggccatgctcgagtccttcaaagcgtgaaggcagagggtattaatggcttctgcgttggatttctcgctgcaacagcggtggccagcgcagcaagagagaatgatctcggtttctacgcaactattgcacttcggctggccgtgtgctttggagcatacgtagatctagactctacatattcccctgaagcacaaccatatcgagcactggctgttcgatggcgggcaaaaagcaacgaggatcgtgatagagcctacgatttcatcaactcaatatccgatctttacatttcaagcatcaacgatgatgcaaacatcactgtcactatgaaggcatcagatatcagcaggtttacagagcaagctagccaggctggtctgcgtgtaacgcctgttaatgtgtgtggtcgattccacttgcccagcaatcaccacctagtagacaagatcatgagcatcgcctcgagtcttgaggatatggagttcccagattccaagcaactccaatcaccggtccgcaatactgccgacggaaaggttatcactgggggctctttgactcgaattgccctcgagaacgcactgacacattgcgcagactggttcacaacgatgaagcactctatgagcaagcctaatcagaccatcgtcgtagtcgggtctagcaattgtgtcccggcatccctcgtgggcgaatattcgccacaaatagtgtcgctgagcaagttagaaaaaccatctccaaaggaacacgcagatgagatcgactctatacacagtatctacgacaaagcagacttatctcagtatccttctcattctattgctatcgtcggcatggcagggagattcccagaagcagacacggtcgacgagctatgggaccttctcgtagaaggcagatcgaccgtgaaaccggcagacgttgatcgtctccagcttccagagaacacaaagtggtggggtaatttcctcaacgatccagagcgcttcgatcacaaattctttaagaagtcatcccgcgaagcgctcgcatgggatccgcaacagcgggtcctactggaagtcgtctacgaagcgttggagtccgccggctatttcggaccctccgcaacagaagagacgctagactacggctgctacatcggcgctgtcatgagtgattactatgacgtcttgacctgtcacccgacgactgcgtatggcacggtgggtacgtcgaggtgctttgtcagtggatgcatgagccattacttcggctggacgggcccttcactgtcgattgacacggcctgctcctcatcactcgtcgccatcaacacagcttgtcgggcgatatggtccggggaatgctcacgtgctgtcgccggcgggacaaatatcatctccagtcccttcgactatcagaacctcgcggccgctgggtttctcagtccttctggacaatgcaagccctttgatgccaatggcgatggatattgtagaggagaagccgttgctgtacttgttctcaagtctctctcggatgccatgagagacaatgacaacattcttggtgtcatcaccggaagtgctgcaaatcaaaatcataactatggcccgatcacagcccctaactcatcatcgcaagcggatctctaccgaaaagtgatgaagctgagtggtgtgaagaaggaggagatttcgtacgtggaagctcatggtaccggaaccggcgtaggagaccccatcgaagtcaacagtctccgagatgccttcggcggagcagagagggactccactcttcacttcacctccatcaaaggcaatataggacatactgaagcgactgccggagttgccgggcttatcaaagtcctcttgatgatgaggaatcgacagatcccacctcaagcaagtctgaagtccctaaaccccaaactcccggcgattgatcaacatcggatgaacattcctcgaagcctcacgtcatggacatctgagactctcttagcgtgtgtcaatagttacggcgcagcaggtagcaattcaaccgccataatccgacaggcaccatctcgcgttcgattgccaaagagccgccgtgagttgtcgagtgtcccgctgatgatatcggctggtacaccgaagaacgtcgcggaatacgctcaaaagctcctagcttggctcagaaaatcgagcacggcggatgagacacatcttttcgaatcacttgcattcaaccttgcagatcgtgctaaccactcactaccacatatgctaacaagtagtgtcagcaacattaaggatctcaaggttaagctcgaagaggctgcagccggtcaggggctgaccagcgtcggtcaagagcgcagtcccgtagtgcttgtattcggaggccaagacagtaacttcatcggtctttccaaagacatctacgaatcatccaaggtcttccgtcagcacttggatgcggttaataacctcctcgtgaagtctgggttcgagagcttctacccctccatcttccaaagcgaaccggtccagaacctagtgaccctacactcagccctattcgcagttcaatatgcgtcggccaagtcctggatagactgcggactccaagtcagcgcagtcgtaggtcacagcttcggccaactcacggccctatgtatctcgggcgttctatcgctgcaagacgccttgaagctagtatcgggcagagcatcactcatgcagaagcattggggtcccgagcctggttctatgctattcgtacaagcgaatcgcgacaccgtcgaagagatccttcaaacactgaaatgcagaaacctctatgcggagatcgcgtgctacaacgggcccgagagccatgtcgttgtgggttcttccaatgctattcagtacttggttcagttcattcaagacactttccggggttcgatccgtacaaaggtgctgaacgtgaccaatggtttccactctcagttcacagagccccttctatcgcctcttggctcattggccgcgcaattagaatggaagtcgccaagcggtattcatcttgaaacaactgacgaggatgagagcgtccaggcgcccggctccaggcttgccgcggagcacacgcgaaagccagtgttctttcaaaacgccatacagaggctcgtcagcaagttctcacagtgtactttcatcgaggcaggtcgaggttcgtctgtaatgcaactcgtcaaggcatctgctgcagacaaatcacaaggacatcttttcctctctcctcaactctcctctccgaatgcaaacaattcactcgtggatgtcactgtcaatctctggaataaaggctatgctacacagcactggccattccaccggatccaaaagccggagtatgaatattttagcctaccccctatacagtttgagaagactcgtcactggcttggatatcacagacaaccattgaaagagatagatgcgagccgcgtcatagaagagcctataactcatgagcttctcactttcctcaacttcaaagacggttcgaagaaggaggcacgattcaagatcgacccgcaatccgaccggttccagaagatgctagccgggcacgttatggagggacaaaccctctgccccgcatcgctatacttcgaggtcgttgcgcgcgcagctctttatcttgccgaagacacagaggcagcaacttacgtgccgactgtagacgacttattcatgggatcgccgatcggctcaagtacaagcaaaagaatactgttgacgatgaagaaaagcaacacagatctttcatggtcgttctacatcacgacccaggatgaagaggttcaatccgctgcacccttcgagcattcaacaggtatcgtaatcttgaagaaacgcgaggacaaacagtcagcgagggggttcgagcgctttgagacattgactggtcatcgcagatgggagcaagtcatgaacaatccagatgccgacaagatgagcggaaaacatatttatcgggcctggaatactgtagtgtattacggcgaatcattccacggtatgaaggaggtggccagcacaggtgatgagtccgccgggatagttagaatcctacctgatgttgaagatccggtcgaccaacggctcaccgacactcccatgacggacagcttcatgcagttcgccgggcttctcgtgaactacttcaacctttctagtatggacgaggtctttgtttgcatgaagatcgagcacatcgagattgggggagggttcgaccctgatgccggagagtggctcgtatacgcgaccatgtcaaagagtagcgagacggaagctacggcagacgcatatgtcttcgatgcgcggaccaagaagatggtcatgtccgtcttcgggctccgcttctccaagatgtcgcgttccctactggcccgtgtattgaagagcgtcaacaagggagcgaagtcagatgccaagacaacaccaacggcagtaacagcagcggcgttgaaggaaatcgagacgacagaggaggcattggtagcacctgtttctcaggcgcgagtagctgccacagcaagaccggccggtaaacgccaggaactacttcagatcttatccaatgtcaccgacgtgccgatcaatgagattcaagacacaacaacgctcgaggatcttggtgttgactctctcatggcaactgaggttctcaatgacattcggtcagttcttggcgtcacaattgacctctcaagcttcattttcttcgagaatattcgcgctgtcgtcaacgacgtcaatgagaagctgggcctctccggtattagttctgctagcgtgagctctccttcgcttagcggagagtccacgtcaaccgacccaaacatcacatctggtgacaaatccgggattagtacaccatgctcagagtttcagattatcgaagaagacgatgtcaaagaactcgcgcctagtgtgccaagcatcatctcggcgcgcagtgctttcgaggaaacgagactcagctatgatagatcagccaagaccacacaggcgctaggctactggaaacaagcctatccacatcaagcacgaatggtcttagcctatgttgtagaagcctttgcagatctaggcgttgatgtaaggaagatccgaagcggtgaagtcgtgccacatgtgaaagctctcgagacgcacaaaagacttgtacggcagctttaccgaatccttgaggacggaaaactcgtgacatttaacggctccgactttgtccgaacagaaacccccatcgataccgcctcggctgaatccatctatcaggatatcatcggcctatacccccagtttgccaatgagaacaaactgacgcgggccgtagggtccgagatggccgcgtgcttacgaggggacaaggatgggctacaggtcgtcttcggtaatcgcgagatgaaaaagacgcttgaggatatgtatgaatgggcgccgctgtttagaacacctacactggtgctgggtgatttcttagcaagcgccttcacgcatcaagccagtgggacaggaaagtttcgcatcctagagatcggtgctggcactggcggcacaacgcgatacatcaccaaacatcttaggagccatggtatcgaatttgagtatgtctataccgacatcagcgcctctcttatcaacacggcttccaagaagttcaggagcgctggaaacgacgagggactagtcttcgaggttctagatatcgaacagccacccaagccggaatatgaaggggtcttccacgcaatcatcgcaagcaacgcgatccacgcgactaaggacctagaagtgtgcctccgacatattcggcagatgttgcgcgaggacggagttttagggttgatcgagattacgaaaaaccagttctggctagacatagtcttcggcctgttcgagggttggcagctttttgatgacggtcgagaacatgccacagtagacgtacggcactgggagcgcaggctgaaggcgtccggttttggcgacgtggcatggagcgacggcgcgtcccctgaatccaagacaatacgagtggtggcaggattccctcgtgcttcagcagcgccgccacccgagaagtcgatcaaggtggcgtacgagacggtcgtttacaagactattggtgcccttaagattcacgccgacgtgtactaccctgccgagagcgaaacgctcccggacaggccgatgccggtggcgctcatgatccacggaggtagtcacatgttgttcagcagaaaggatgtccggccggctcaaacacggctcttaattaagaagggttttctgcccgtgagcatcgattacaggctctgcccagaggtcacactcaccgagggccctatggttgacgtgtgcgacgcgctagactgggctcgacaccagcttcctaatatgcccttgaagcgcgctgggctaagtatcgatggagaatctgtagtggccatcggttggtcttccggtggccagttagccatgtccctaggctggacggcgccagtgcgtgggttacggccacctgaggcaaatctcgtcttctatgcgccaacggactacgaggacacatggtgggtcaacccaatcgagcccaatggtgcgccgtaccagggccagcagtatgatgtactcgagggcgtccgagacgaggccttctcgagctatgacatggtcggtgcctgggaggagcctataactgacccgcgttcccaacatgatgctcgttgtcgtatcgtgctgcacatcaattggaaggcccagacgctacctatcatcctcaacgggctaccaagtcgcgccaaagctgggccaaacaagaactgggacgcgctcccacagccgtcactcgaagtcatccgcgctgctagtccacgagcccaagtaaggcaaggaacgtacagagtgcctactttctttattcacggcacagctgatgacttgatcccttgggagcagagcaagggcacatatgagacgatggtagaatctggggttgatagtgagatagtgcttcttgaggacgggcagcatatatgcgacttaagtagtgatccggcgtcggacggatggagggcagtgcttcggggttatgactttatatgctcccgcacatagagtgcctagattagatattagtatatttcatgatgtaaatagtcgttccccaatttcatagagctttattttccctatagtgttaggaaagaatctcaatttcaaactcagttaacccaag

SEQ ID NO: 23793 - DNA, 6759 bp, Muscodor strobelii
  misc_feature: SGI cDNA ID NO. 568101
  misc_feature: Encodes the peptide sequence at SEQ ID NO 23794
atgagcatcgcctcgagtcttgaggatatggagttcccagattccaagcaactccaatcaccggtccgcaatactgccgacggaaaggttatcactgggggctctttgactcgaattgccctcgagaacgcactgacacattgcgcagactggttcacaacgatgaagcactctatgagcaagcctaatcagaccatcgtcgtagtcgggtctagcaattgtgtcccggcatccctcgtgggcgaatattcgccacaaatagtgtcgctgagcaagttagaaaaaccatctccaaaggaacacgcagatgagatcgactctatacacagtatctacgacaaagcagacttatctcagtatccttctcattctattgctatcgtcggcatggcagggagattcccagaagcagacacggtcgacgagctatgggaccttctcgtagaaggcagatcgaccgtgaaaccggcagacgttgatcgtctccagcttccagagaacacaaagtggtggggtaatttcctcaacgatccagagcgcttcgatcacaaattctttaagaagtcatcccgcgaagcgctcgcatgggatccgcaacagcgggtcctactggaagtcgtctacgaagcgttggagtccgccggctatttcggaccctccgcaacagaagagacgctagactacggctgctacatcggcgctgtcatgagtgattactatgacgtcttgacctgtcacccgacgactgcgtatggcacggtgggtacgtcgaggtgctttgtcagtggatgcatgagccattacttcggctggacgggcccttcactgtcgattgacacggcctgctcctcatcactcgtcgccatcaacacagcttgtcgggcgatatggtccggggaatgctcacgtgctgtcgccggcgggacaaatatcatctccagtcccttcgactatcagaacctcgcggccgctgggtttctcagtccttctggacaatgcaagccctttgatgccaatggcgatggatattgtagaggagaagccgttgctgtacttgttctcaagtctctctcggatgccatgagagacaatgacaacattcttggtgtcatcaccggaagtgctgcaaatcaaaatcataactatggcccgatcacagcccctaactcatcatcgcaagcggatctctaccgaaaagtgatgaagctgagtggtgtgaagaaggaggagatttcgtacgtggaagctcatggtaccggaaccggcgtaggagaccccatcgaagtcaacagtctccgagatgccttcggcggagcagagagggactccactcttcacttcacctccatcaaaggcaatataggacatactgaagcgactgccggagttgccgggcttatcaaagtcctcttgatgatgaggaatcgacagatcccacctcaagcaagtctgaagtccctaaaccccaaactcccggcgattgatcaacatcggatgaacattcctcgaagcctcacgtcatggacatctgagactctcttagcgtgtgtcaatagttacggcgcagcaggtagcaattcaaccgccataatccgacaggcaccatctcgcgttcgattgccaaagagccgccgtgagttgtcgagtgtcccgctgatgatatcggctggtacaccgaagaacgtcgcggaatacgctcaaaagctcctagcttggctcagaaaatcgagcacggcggatgagacacatcttttcgaatcacttgcattcaaccttgcagatcgtgctaaccactcactaccacatatgctaacaagtagtgtcagcaacattaaggatctcaaggttaagctcgaagaggctgcagccggtcaggggctgaccagcgtcggtcaagagcgcagtcccgtagtgcttgtattcggaggccaagacagtaacttcatcggtctttccaaagacatctacgaatcatccaaggtcttccgtcagcacttggatgcggttaataacctcctcgtgaagtctgggttcgagagcttctacccctccatcttccaaagcgaaccggtccagaacctagtgaccctacactcagccctattcgcagttcaatatgcgtcggccaagtcctggatagactgcggactccaagtcagcgcagtcgtaggtcacagcttcggccaactcacggccctatgtatctcgggcgttctatcgctgcaagacgccttgaagctagtatcgggcagagcatcactcatgcagaagcattggggtcccgagcctggttctatgctattcgtacaagcgaatcgcgacaccgtcgaagagatccttcaaacactgaaatgcagaaacctctatgcggagatcgcgtgctacaacgggcccgagagccatgtcgttgtgggttcttccaatgctattcagtacttggttcagttcattcaagacactttccggggttcgatccgtacaaaggtgctgaacgtgaccaatggtttccactctcagttcacagagccccttctatcgcctcttggctcattggccgcgcaattagaatggaagtcgccaagcggtattcatcttgaaacaactgacgaggatgagagcgtccaggcgcccggctccaggcttgccgcggagcacacgcgaaagccagtgttctttcaaaacgccatacagaggctcgtcagcaagttctcacagtgtactttcatcgaggcaggtcgaggttcgtctgtaatgcaactcgtcaaggcatctgctgcagacaaatcacaaggacatcttttcctctctcctcaactctcctctccgaatgcaaacaattcactcgtggatgtcactgtcaatctctggaataaaggctatgctacacagcactggccattccaccggatccaaaagccggagtatgaatattttagcctaccccctatacagtttgagaagactcgtcactggcttggatatcacagacaaccattgaaagagatagatgcgagccgcgtcatagaagagcctataactcatgagcttctcactttcctcaacttcaaagacggttcgaagaaggaggcacgattcaagatcgacccgcaatccgaccggttccagaagatgctagccgggcacgttatggagggacaaaccctctgccccgcatcgctatacttcgaggtcgttgcgcgcgcagctctttatcttgccgaagacacagaggcagcaacttacgtgccgactgtagacgacttattcatgggatcgccgatcggctcaagtacaagcaaaagaatactgttgacgatgaagaaaagcaacacagatctttcatggtcgttctacatcacgacccaggatgaagaggttcaatccgctgcacccttcgagcattcaacaggtatcgtaatcttgaagaaacgcgaggacaaacagtcagcgagggggttcgagcgctttgagacattgactggtcatcgcagatgggagcaagtcatgaacaatccagatgccgacaagatgagcggaaaacatatttatcgggcctggaatactgtagtgtattacggcgaatcattccacggtatgaaggaggtggccagcacaggtgatgagtccgccgggatagttagaatcctacctgatgttgaagatccggtcgaccaacggctcaccgacactcccatgacggacagcttcatgcagttcgccgggcttctcgtgaactacttcaacctttctagtatggacgaggtctttgtttgcatgaagatcgagcacatcgagattgggggagggttcgaccctgatgccggagagtggctcgtatacgcgaccatgtcaaagagtagcgagacggaagctacggcagacgcatatgtcttcgatgcgcggaccaagaagatggtcatgtccgtcttcgggctccgcttctccaagatgtcgcgttccctactggcccgtgtattgaagagcgtcaacaagggagcgaagtcagatgccaagacaacaccaacggcagtaacagcagcggcgttgaaggaaatcgagacgacagaggaggcattggtagcacctgtttctcaggcgcgagtagctgccacagcaagaccggccggtaaacgccaggaactacttcagatcttatccaatgtcaccgacgtgccgatcaatgagattcaagacacaacaacgctcgaggatcttggtgttgactctctcatggcaactgaggttctcaatgacattcggtcagttcttggcgtcacaattgacctctcaagcttcattttcttcgagaatattcgcgctgtcgtcaacgacgtcaatgagaagctgggcctctccggtattagttctgctagcgtgagctctccttcgcttagcggagagtccacgtcaaccgacccaaacatcacatctggtgacaaatccgggattagtacaccatgctcagagtttcagattatcgaagaagacgatgtcaaagaactcgcgcctagtgtgccaagcatcatctcggcgcgcagtgctttcgaggaaacgagactcagctatgatagatcagccaagaccacacaggcgctaggctactggaaacaagcctatccacatcaagcacgaatggtcttagcctatgttgtagaagcctttgcagatctaggcgttgatgtaaggaagatccgaagcggtgaagtcgtgccacatgtgaaagctctcgagacgcacaaaagacttgtacggcagctttaccgaatccttgaggacggaaaactcgtgacatttaacggctccgactttgtccgaacagaaacccccatcgataccgcctcggctgaatccatctatcaggatatcatcggcctatacccccagtttgccaatgagaacaaactgacgcgggccgtagggtccgagatggccgcgtgcttacgaggggacaaggatgggctacaggtcgtcttcggtaatcgcgagatgaaaaagacgcttgaggatatgtatgaatgggcgccgctgtttagaacacctacactggtgctgggtgatttcttagcaagcgccttcacgcatcaagccagtgggacaggaaagtttcgcatcctagagatcggtgctggcactgtaagtgttatttttaactcctcatgctgtaccttgagtgctaacttcagaaacttcaagggcggcacaacgcgatacatcaccaaacatcttaggagccatggtatcgaatttgagtatgtctataccgacatcagcgcctctcttatcaacacggcttccaagaagttcaggagcgctggaaacgacgagggactagtcttcgaggttctagatatcgaacagccacccaagccggaatatgaaggggtcttccacgcaatcatcgcaagcaacgcgatccacgcgactaaggacctagaagtgtgcctccgacatattcggcagatgttgcgcgaggacggagttttagggttgatcgagattacgaaaaaccagttctggctagacatagtcttcggcctgttcgagggttggcagctttttgatgacggtcgagaacatgccacagtagacgtacggcactgggagcgcaggctgaaggcgtccggttttggcgacgtggcatggagcgacggcgcgtcccctgaatccaagacaatacgagtggtggcaggattccctcgtgcttcagcagcgccgccacccgagaagtcgatcaaggtggcgtacgagacggtcgtttacaagactattggtgcccttaagattcacgccgacgtgtactaccctgccgagagcgaaacgctcccggacaggccgatgccggtggcgctcatgatccacggaggtagtcacatgttgttcagcagaaaggatgtccggccggctcaaacacggctcttaattaagaagggttttctgcccgtgagcatcgattacaggctctgcccagaggtcacactcaccgagggccctatggttgacgtgtgcgacgcgctagactgggctcgacaccagcttcctaatatgcccttgaagcgcgctgggctaagtatcgatggagaatctgtagtggccatcggttggtcttccggtggccagttagccatgtccctaggctggacggcgccagtgcgtgggttacggccacctgaggcaaatctcgtcttctatgcgccaacggactacgaggacacatggtgggtcaacccaatcgagcccaatggtgcgccgtaccagggccagcagtatgatgtactcgagggcgtccgagacgaggccttctcgagctatgacatggtcggtgcctgggaggagcctataactgacccgcgttcccaacatgatgctcgttgtcgtatcgtgctgcacatcaattggaaggcccagacgctacctatcatcctcaacgggctaccaagtcgcgccaaagctgggccaaacaagaactgggacgcgctcccacagccgtcactcgaagtcatccgcgctgctagtccacgagcccaagtaaggcaaggaacgtacagagtgcctactttctttattcacggcacagctgatgacttgatcccttgggagcagagcaagggcacatatgagacgatggtagaatctggggttgatagtgagatagtgcttcttgaggacgggcagcatatatgcgacttaagtagtgatccggcgtcggacggatggagggcagtgcttcggggttatgactttatatgctcccgcacatag

SEQ ID NO: 23794 - protein, 2252 aa, Muscodor strobelii
  misc_feature: SGI Peptide ID NO. 568101
  misc_feature (638)..(966): Pfam Id: PF00698 Pfam Desc: Acyl transferase domain
  misc_feature (123)..(360): Pfam Id: PF00109 Pfam Desc: Beta-ketoacyl synthase, N-terminal domain
  misc_feature (368)..(485): Pfam Id: PF02801 Pfam Desc: Beta-ketoacyl synthase, C-terminal domain
  misc_feature (1732)..(1828): Pfam Id: PF08242 Pfam Desc: Methyltransferase domain
  misc_feature (1379)..(1445): Pfam Id: PF00550 Pfam Desc: Phosphopantetheine attachment site
  misc_feature (700)..(848): Pfam Id: PF00698 Pfam Desc: Acyl transferase domain
  misc_feature (279)..(2248): NCBI GI: 121711976 Blast Desc: polyketide synthase, [Aspergillus clavatus NRRL 1] gi|119401755|gb|EAW12177.1| polyketide synthase, [Aspergillus clavatus NRRL 1]
  misc_feature (119)..(1904): NCBI GI: 242821846 Blast Desc: polyketide synthase, [Talaromyces stipitatus ATCC 10500] gi|218712685|gb|EED12110.1| polyketide synthase, [Talaromyces stipitatus ATCC 10500]
  misc_feature (12)..(2248): NCBI GI: 67902792 Blast Desc: AN8383.2 [Aspergillus nidulans FGSC A4] gi|40747849|gb|EAA67005.1| AN8383.2 [Aspergillus nidulans FGSC A4] gi|259484315|tpe|CBF80428.1| TPA: polyketide synthase, (JCVI)
  misc_feature (23)..(2229): NCBI GI: 115385671 Blast Desc: ATEG_10080 [Aspergillus terreus NIH2624] gi|114187829|gb|EAU29529.1| ATEG_10080 [Aspergillus terreus NIH2624]
  misc_feature (3)..(2248): NCBI GI: 171683708 Blast Desc: protein product [Podospora anserina] gi|170941814|emb|CAP67467.1| protein product [Podospora anserina]
  misc_feature (9)..(2250): NCBI GI: 169607248 Blast Desc: SNOG_06682 [Phaeosphaeria nodorum SN15] gi|111065393|gb|EAT86513.1| SNOG_06682 [Phaeosphaeria nodorum SN15]
  misc_feature (9)..(1947): NCBI GI: 52000443 Blast Desc: citrinin polyketide synthase [Monascus purpureus]
  misc_feature (1)..(1898): NCBI GI: 242821914 Blast Desc: polyketide synthase, [Talaromyces stipitatus ATCC 10500] gi|218712699|gb|EED12124.1| polyketide synthase, [Talaromyces stipitatus ATCC 10500]
  misc_feature (9)..(1902): NCBI GI: 240109915 Blast Desc: polyketide synthase, [Coccidioides posadasii C735 delta SOWgp]
  misc_feature (10)..(1895): NCBI GI: 154101582 Blast Desc: polyketide synthase [Xanthoparmelia semiviridis]
  misc_feature: Useful for fungicidal and/or biocontrol applications
MSIASSLEDMEFPDSKQLQSPVRNTADGKVITGGSLTRIALENALTHCADWFTTMKHSMSKPNQTIVVVGSSNCVPASLVGEYSPQIVSLSKLEKPSPKEHADEIDSIHSIYDKADLSQYPSHSIAIVGMAGRFPEADTVDELWDLLVEGRSTVKPADVDRLQLPENTKWWGNFLNDPERFDHKFFKKSSREALAWDPQQRVLLEVVYEALESAGYFGPSATEETLDYGCYIGAVMSDYYDVLTCHPTTAYGTVGTSRCFVSGCMSHYFGWTGPSLSIDTACSSSLVAINTACRAIWSGECSRAVAGGTNIISSPFDYQNLAAAGFLSPSGQCKPFDANGDGYCRGEAVAVLVLKSLSDAMRDNDNILGVITGSAANQNHNYGPITAPNSSSQADLYRKVMKLSGVKKEEISYVEAHGTGTGVGDPIEVNSLRDAFGGAERDSTLHFTSIKGNIGHTEATAGVAGLIKVLLMMRNRQIPPQASLKSLNPKLPAIDQHRMNIPRSLTSWTSETLLACVNSYGAAGSNSTAIIRQAPSRVRLPKSRRELSSVPLMISAGTPKNVAEYAQKLLAWLRKSSTADETHLFESLAFNLADRANHSLPHMLTSSVSNIKDLKVKLEEAAAGQGLTSVGQERSPVVLVFGGQDSNFIGLSKDIYESSKVFRQHLDAVNNLLVKSGFESFYPSIFQSEPVQNLVTLHSALFAVQYASAKSWIDCGLQVSAVVGHSFGQLTALCISGVLSLQDALKLVSGRASLMQKHWGPEPGSMLFVQANRDTVEEILQTLKCRNLYAEIACYNGPESHVVVGSSNAIQYLVQFIQDTFRGSIRTKVLNVTNGFHSQFTEPLLSPLGSLAAQLEWKSPSGIHLETTDEDESVQAPGSRLAAEHTRKPVFFQNAIQRLVSKFSQCTFIEAGRGSSVMQLVKASAADKSQGHLFLSPQLSSPNANNSLVDVTVNLWNKGYATQHWPFHRIQKPEYEYFSLPPIQFEKTRHWLGYHRQPLKEIDASRVIEEPITHELLTFLNFKDGSKKEARFKIDPQSDRFQKMLAGHVMEGQTLCPASLYFEVVARAALYLAEDTEAATYVPTVDDLFMGSPIGSSTSKRILLTMKKSNTDLSWSFYITTQDEEVQSAAPFEHSTGIVILKKREDKQSARGFERFETLTGHRRWEQVMNNPDADKMSGKHIYRAWNTVVYYGESFHGMKEVASTGDESAGIVRILPDVEDPVDQRLTDTPMTDSFMQFAGLLVNYFNLSSMDEVFVCMKIEHIEIGGGFDPDAGEWLVYATMSKSSETEATADAYVFDARTKKMVMSVFGLRFSKMSRSLLARVLKSVNKGAKSDAKTTPTAVTAAALKEIETTEEALVAPVSQARVAATARPAGKRQELLQILSNVTDVPINEIQDTTTLEDLGVDSLMATEVLNDIRSVLGVTIDLSSFIFFENIRAVVNDVNEKLGLSGISSASVSSPSLSGESTSTDPNITSGDKSGISTPCSEFQIIEEDDVKELAPSVPSIISARSAFEETRLSYDRSAKTTQALGYWKQAYPHQARMVLAYVVEAFADLGVDVRKIRSGEVVPHVKALETHKRLVRQLYRILEDGKLVTFNGSDFVRTETPIDTASAESIYQDIIGLYPQFANENKLTRAVGSEMAACLRGDKDGLQVVFGNREMKKTLEDMYEWAPLFRTPTLVLGDFLASAFTHQASGTGKFRILEIGAGTVSVIFNSSCCTLSANFRNFKGGTTRYITKHLRSHGIEFEYVYTDISASLINTASKKFRSAGNDEGLVFEVLDIEQPPKPEYEGVFHAIIASNAIHATKDLEVCLRHIRQMLREDGVLGLIEITKNQFWLDIVFGLFEGWQLFDDGREHATVDVRHWERRLKASGFGDVAWSDGASPESKTIRVVAGFPRASAAPPPEKSIKVAYETVVYKTIGALKIHADVYYPAESETLPDRPMPVALMIHGGSHMLFSRKDVRPAQTRLLIKKGFLPVSIDYRLCPEVTLTEGPMVDVCDALDWARHQLPNMPLKRAGLSIDGESVVAIGWSSGGQLAMSLGWTAPVRGLRPPEANLVFYAPTDYEDTWWVNPIEPNGAPYQGQQYDVLEGVRDEAFSSYDMVGAWEEPITDPRSQHDARCRIVLHINWKAQTLPIILNGLPSRAKAGPNKNWDALPQPSLEVIRAASPRAQVRQGTYRVPTFFIHGTADDLIPWEQSKGTYETMVESGVDSEIVLLEDGQHICDLSSDPASDGWRAVLRGYDFICSRT

SEQ ID NO: 23795 - DNA, 7829 bp, Muscodor strobelii; identical to SEQ ID NO: 23792
  misc_feature: SGI EST ID NO. CUFF.55984.0
  misc_feature: Variant of the nucleotide sequence at SEQ ID NO 23793

SEQ ID NO: 23796 - DNA, 6699 bp, Muscodor strobelii
  misc_feature: SGI cDNA ID NO. 568102
  misc_feature: Elevated expression when VOC is produced
  misc_feature: Encodes the peptide sequence at SEQ ID NO 23797
atgagcatcgcctcgagtcttgaggatatggagttcccagattccaagcaactccaatcaccggtccgcaatactgccgacggaaaggttatcactgggggctctttgactcgaattgccctcgagaacgcactgacacattgcgcagactggttcacaacgatgaagcactctatgagcaagcctaatcagaccatcgtcgtagtcgggtctagcaattgtgtcccggcatccctcgtgggcgaatattcgccacaaatagtgtcgctgagcaagttagaaaaaccatctccaaaggaacacgcagatgagatcgactctatacacagtatctacgacaaagcagacttatctcagtatccttctcattctattgctatcgtcggcatggcagggagattcccagaagcagacacggtcgacgagctatgggaccttctcgtagaaggcagatcgaccgtgaaaccggcagacgttgatcgtctccagcttccagagaacacaaagtggtggggtaatttcctcaacgatccagagcgcttcgatcacaaattctttaagaagtcatcccgcgaagcgctcgcatgggatccgcaacagcgggtcctactggaagtcgtctacgaagcgttggagtccgccggctatttcggaccctccgcaacagaagagacgctagactacggctgctacatcggcgctgtcatgagtgattactatgacgtcttgacctgtcacccgacgactgcgtatggcacggtgggtacgtcgaggtgctttgtcagtggatgcatgagccattacttcggctggacgggcccttcactgtcgattgacacggcctgctcctcatcactcgtcgccatcaacacagcttgtcgggcgatatggtccggggaatgctcacgtgctgtcgccggcgggacaaatatcatctccagtcccttcgactatcagaacctcgcggccgctgggtttctcagtccttctggacaatgcaagccctttgatgccaatggcgatggatattgtagaggagaagccgttgctgtacttgttctcaagtctctctcggatgccatgagagacaatgacaacattcttggtgtcatcaccggaagtgctgcaaatcaaaatcataactatggcccgatcacagcccctaactcatcatcgcaagcggatctctaccgaaaagtgatgaagctgagtggtgtgaagaaggaggagatttcgtacgtggaagctcatggtaccggaaccggcgtaggagaccccatcgaagtcaacagtctccgagatgccttcggcggagcagagagggactccactcttcacttcacctccatcaaaggcaatataggacatactgaagcgactgccggagttgccgggcttatcaaagtcctcttgatgatgaggaatcgacagatcccacctcaagcaagtctgaagtccctaaaccccaaactcccggcgattgatcaacatcggatgaacattcctcgaagcctcacgtcatggacatctgagactctcttagcgtgtgtcaatagttacggcgcagcaggtagcaattcaaccgccataatccgacaggcaccatctcgcgttcgattgccaaagagccgccgtgagttgtcgagtgtcccgctgatgatatcggctggtacaccgaagaacgtcgcggaatacgctcaaaagctcctagcttggctcagaaaatcgagcacggcggatgagacacatcttttcgaatcacttgcattcaaccttgcagatcgtgctaaccactcactaccacatatgctaacaagtagtgtcagcaacattaaggatctcaaggttaagctcgaagaggctgcagccggtcaggggctgaccagcgtcggtcaagagcgcagtcccgtagtgcttgtattcggaggccaagacagtaacttcatcggtctttccaaagacatctacgaatcatccaaggtcttccgtcagcacttggatgcggttaataacctcctcgtgaagtctgggttcgagagcttctacccctccatcttccaaagcgaaccggtccagaacctagtgaccctacactcagccctattcgcagttcaatatgcgtcggccaagtcctggatagactgcggactccaagtcagcgcagtcgtaggtcacagcttcggccaactcacggccctatgtatctcgggcgttctatcgctgcaagacgccttgaagctagtatcgggcagagcatcactcatgcagaagcattggggtcccgagcctggttctatgctattcgtacaagcgaatcgcgacaccgtcgaagagatccttcaaacactgaaatgcagaaacctctatgcggagatcgcgtgctacaacgggcccgagagccatgtcgttgtgggttcttccaatgctattcagtacttggttcagttcattcaagacactttccggggttcgatccgtacaaaggtgctgaacgtgaccaatggtttccactctcagttcacagagccccttctatcgcctcttggctcattggccgcgcaattagaatggaagtcgccaagcggtattcatcttgaaacaactgacgaggatgagagcgtccaggcgcccggctccaggcttgccgcggagcacacgcgaaagccagtgttctttcaaaacgccatacagaggctcgtcagcaagttctcacagtgtactttcatcgaggcaggtcgaggttcgtctgtaatgcaactcgtcaaggcatctgctgcagacaaatcacaaggacatcttttcctctctcctcaactctcctctccgaatgcaaacaattcactcgtggatgtcactgtcaatctctggaataaaggctatgctacacagcactggccattccaccggatccaaaagccggagtatgaatattttagcctaccccctatacagtttgagaagactcgtcactggcttggatatcacagacaaccattgaaagagatagatgcgagccgcgtcatagaagagcctataactcatgagcttctcactttcctcaacttcaaagacggttcgaagaaggaggcacgattcaagatcgacccgcaatccgaccggttccagaagatgctagccgggcacgttatggagggacaaaccctctgccccgcatcgctatacttcgaggtcgttgcgcgcgcagctctttatcttgccgaagacacagaggcagcaacttacgtgccgactgtagacgacttattcatgggatcgccgatcggctcaagtacaagcaaaagaatactgttgacgatgaagaaaagcaacacagatctttcatggtcgttctacatcacgacccaggatgaagaggttcaatccgctgcacccttcgagcattcaacaggtatcgtaatcttgaagaaacgcgaggacaaacagtcagcgagggggttcgagcgctttgagacattgactggtcatcgcagatgggagcaagtcatgaacaatccagatgccgacaagatgagcggaaaacatatttatcgggcctggaatactgtagtgtattacggcgaatcattccacggtatgaaggaggtggccagcacaggtgatgagtccgccgggatagttagaatcctacctgatgttgaagatccggtcgaccaacggctcaccgacactcccatgacggacagcttcatgcagttcgccgggcttctcgtgaactacttcaacctttctagtatggacgaggtctttgtttgcatgaagatcgagcacatcgagattgggggagggttcgaccctgatgccggagagtggctcgtatacgcgaccatgtcaaagagtagcgagacggaagctacggcagacgcatatgtcttcgatgcgcggaccaagaagatggtcatgtccgtcttcgggctccgcttctccaagatgtcgcgttccctactggcccgtgtattgaagagcgtcaacaagggagcgaagtcagatgccaagacaacaccaacggcagtaacagcagcggcgttgaaggaaatcgagacgacagaggaggcattggtagcacctgtttctcaggcgcgagtagctgccacagcaagaccggccggtaaacgccaggaactacttcagatcttatccaatgtcaccgacgtgccgatcaatgagattcaagacacaacaacgctcgaggatcttggtgttgactctctcatggcaactgaggttctcaatgacattcggtcagttcttggcgtcacaattgacctctcaagcttcattttcttcgagaatattcgcgctgtcgtcaacgacgtcaatgagaagctgggcctctccggtattagttctgctagcgtgagctctccttcgcttagcggagagtccacgtcaaccgacccaaacatcacatctggtgacaaatccgggattagtacaccatgctcagagtttcagattatcgaagaagacgatgtcaaagaactcgcgcctagtgtgccaagcatcatctcggcgcgcagtgctttcgaggaaacgagactcagctatgatagatcagccaagaccacacaggcgctaggctactggaaacaagcctatccacatcaagcacgaatggtcttagcctatgttgtagaagcctttgcagatctaggcgttgatgtaaggaagatccgaagcggtgaagtcgtgccacatgtgaaagctctcgagacgcacaaaagacttgtacggcagctttaccgaatccttgaggacggaaaactcgtgacatttaacggctccgactttgtccgaacagaaacccccatcgataccgcctcggctgaatccatctatcaggatatcatcggcctatacccccagtttgccaatgagaacaaactgacgcgggccgtagggtccgagatggccgcgtgcttacgaggggacaaggatgggctacaggtcgtcttcggtaatcgcgagatgaaaaagacgcttgaggatatgtatgaatgggcgccgctgtttagaacacctacactggtgctgggtgatttcttagcaagcgccttcacgcatcaagccagtgggacaggaaagtttcgcatcctagagatcggtgctggcactggcggcacaacgcgatacatcaccaaacatcttaggagccatggtatcgaatttgagtatgtctataccgacatcagcgcctctcttatcaacacggcttccaagaagttcaggagcgctggaaacgacgagggactagtcttcgaggttctagatatcgaacagccacccaagccggaatatgaaggggtcttccacgcaatcatcgcaagcaacgcgatccacgcgactaaggacctagaagtgtgcctccgacatattcggcagatgttgcgcgaggacggagttttagggttgatcgagattacgaaaaaccagttctggctagacatagtcttcggcctgttcgagggttggcagctttttgatgacggtcgagaacatgccacagtagacgtacggcactgggagcgcaggctgaaggcgtccggttttggcgacgtggcatggagcgacggcgcgtcccctgaatccaagacaatacgagtggtggcaggattccctcgtgcttcagcagcgccgccacccgagaagtcgatcaaggtggcgtacgagacggtcgtttacaagactattggtgcccttaagattcacgccgacgtgtactaccctgccgagagcgaaacgctcccggacaggccgatgccggtggcgctcatgatccacggaggtagtcacatgttgttcagcagaaaggatgtccggccggctcaaacacggctcttaattaagaagggttttctgcccgtgagcatcgattacaggctctgcccagaggtcacactcaccgagggccctatggttgacgtgtgcgacgcgctagactgggctcgacaccagcttcctaatatgcccttgaagcgcgctgggctaagtatcgatggagaatctgtagtggccatcggttggtcttccggtggccagttagccatgtccctaggctggacggcgccagtgcgtgggttacggccacctgaggcaaatctcgtcttctatgcgccaacggactacgaggacacatggtgggtcaacccaatcgagcccaatggtgcgccgtaccagggccagcagtatgatgtactcgagggcgtccgagacgaggccttctcgagctatgacatggtcggtgcctgggaggagcctataactgacccgcgttcccaacatgatgctcgttgtcgtatcgtgctgcacatcaattggaaggcccagacgctacctatcatcctcaacgggctaccaagtcgcgccaaagctgggccaaacaagaactgggacgcgctcccacagccgtcactcgaagtcatccgcgctgctagtccacgagcccaagtaaggcaaggaacgtacagagtgcctactttctttattcacggcacagctgatgacttgatcccttgggagcagagcaagggcacatatgagacgatggtagaatctggggttgatagtgagatagtgcttcttgaggacgggcagcatatatgcgacttaagtagtgatccggcgtcggacggatggagggcagtgcttcggggttatgactttatatgctcccgcacatag

SEQ ID NO: 23797 - protein, 2232 aa, Muscodor strobelii
  misc_feature: SGI Peptide ID NO. 568102
  misc_feature (638)..(966): Pfam Id: PF00698 Pfam Desc: Acyl transferase domain
  misc_feature (123)..(360): Pfam Id: PF00109 Pfam Desc: Beta-ketoacyl synthase, N-terminal domain
  misc_feature (368)..(485): Pfam Id: PF02801 Pfam Desc: Beta-ketoacyl synthase, C-terminal domain
  misc_feature (1705)..(1810): Pfam Id: PF08241 Pfam Desc: Methyltransferase domain
  misc_feature (1705)..(1808): Pfam Id: PF08242 Pfam Desc: Methyltransferase domain
  misc_feature (1379)..(1445): Pfam Id: PF00550 Pfam Desc: Phosphopantetheine attachment site
  misc_feature (700)..(848): Pfam Id: PF00698 Pfam Desc: Acyl transferase domain
  misc_feature (279)..(2228): NCBI GI: 121711976 Blast Desc: polyketide synthase, [Aspergillus clavatus NRRL 1] gi|119401755|gb|EAW12177.1| polyketide synthase, [Aspergillus clavatus NRRL 1]
  misc_feature (119)..(1884): NCBI GI: 242821846 Blast Desc: polyketide synthase, [Talaromyces stipitatus ATCC 10500] gi|218712685|gb|EED12110.1| polyketide synthase, [Talaromyces stipitatus ATCC 10500]
  misc_feature (12)..(2228): NCBI GI: 67902792 Blast Desc: AN8383.2 [Aspergillus nidulans FGSC A4] gi|40747849|gb|EAA67005.1| AN8383.2 [Aspergillus nidulans FGSC A4] gi|259484315|tpe|CBF80428.1| TPA: polyketide synthase, (JCVI)
  misc_feature (23)..(2209): NCBI GI: 115385671 Blast Desc: ATEG_10080 [Aspergillus terreus NIH2624] gi|114187829|gb|EAU29529.1| ATEG_10080 [Aspergillus terreus NIH2624]
  misc_feature (3)..(2228): NCBI GI: 171683708 Blast Desc: protein product [Podospora anserina] gi|170941814|emb|CAP67467.1| protein product [Podospora anserina]
  misc_feature (2)..(2230): NCBI GI: 169607248 Blast Desc: SNOG_06682 [Phaeosphaeria nodorum SN15] gi|111065393|gb|EAT86513.1| SNOG_06682 [Phaeosphaeria nodorum SN15]
  misc_feature (9)..(1927): NCBI GI: 52000443 Blast Desc: citrinin polyketide synthase [Monascus purpureus]
  misc_feature (1)..(1878): NCBI GI: 242821914 Blast Desc: polyketide synthase, [Talaromyces stipitatus ATCC 10500] gi|218712699|gb|EED12124.1| polyketide synthase, [Talaromyces stipitatus ATCC 10500]
  misc_feature (9)..(1882): NCBI GI: 240109915 Blast Desc: polyketide synthase, [Coccidioides posadasii C735 delta SOWgp]
  misc_feature (10)..(1875): NCBI GI: 154101582 Blast Desc: polyketide synthase [Xanthoparmelia semiviridis]
  misc_feature: Useful for fungicidal and/or biocontrol applications
  misc_feature: Useful for introducing or modulating the production of volatile compounds
MSIASSLEDMEFPDSKQLQSPVRNTADGKVITGGSLTRIALENALTHCADWFTTMKHSMSKPNQTIVVVGSSNCVPASLVGEYSPQIVSLSKLEKPSPKEHADEIDSIHSIYDKADLSQYPSHSIAIVGMAGRFPEADTVDELWDLLVEGRSTVKPADVDRLQLPENTKWWGNFLNDPERFDHKFFKKSSREALAWDPQQRVLLEVVYEALESAGYFGPSATEETLDYGCYIGAVMSDYYDVLTCHPTTAYGTVGTSRCFVSGCMSHYFGWTGPSLSIDTACSSSLVAINTACRAIWSGECSRAVAGGTNIISSPFDYQNLAAAGFLSPSGQCKPFDANGDGYCRGEAVAVLVLKSLSDAMRDNDNILGVITGSAANQNHNYGPITAPNSSSQADLYRKVMKLSGVKKEEISYVEAHGTGTGVGDPIEVNSLRDAFGGAERDSTLHFTSIKGNIGHTEATAGVAGLIKVLLMMRNRQIPPQASLKSLNPKLPAIDQHRMNIPRSLTSWTSETLLACVNSYGAAGSNSTAIIRQAPSRVRLPKSRRELSSVPLMISAGTPKNVAEYAQKLLAWLRKSSTADETHLFESLAFNLADRANHSLPHMLTSSVSNIKDLKVKLEEAAAGQGLTSVGQERSPVVLVFGGQDSNFIGLSKDIYESSKVFRQHLDAVNNLLVKSGFESFYPSIFQSEPVQNLVTLHSALFAVQYASAKSWIDCGLQVSAVVGHSFGQLTALCISGVLSLQDALKLVSGRASLMQKHWGPEPGSMLFVQANRDTVEEILQTLKCRNLYAEIACYNGPESHVVVGSSNAIQYLVQFIQDTFRGSIRTKVLNVTNGFHSQFTEPLLSPLGSLAAQLEWKSPSGIHLETTDEDESVQAPGSRLAAEHTRKPVFFQNAIQRLVSKFSQCTFIEAGRGSSVMQLVKASAADKSQGHLFLSPQLSSPNANNSLVDVTVNLWNKGYATQHWPFHRIQKPEYEYFSLPPIQFEKTRHWLGYHRQPLKEIDASRVIEEPITHELLTFLNFKDGSKKEARFKIDPQSDRFQKMLAGHVMEGQTLCPASLYFEVVARAALYLAEDTEAATYVPTVDDLFMGSPIGSSTSKRILLTMKKSNTDLSWSFYITTQDEEVQSAAPFEHSTGIVILKKREDKQSARGFERFETLTGHRRWEQVMNNPDADKMSGKHIYRAWNTVVYYGESFHGMKEVASTGDESAGIVRILPDVEDPVDQRLTDTPMTDSFMQFAGLLVNYFNLSSMDEVFVCMKIEHIEIGGGFDPDAGEWLVYATMSKSSETEATADAYVFDARTKKMVMSVFGLRFSKMSRSLLARVLKSVNKGAKSDAKTTPTAVTAAALKEIETTEEALVAPVSQARVAATARPAGKRQELLQILSNVTDVPINEIQDTTTLEDLGVDSLMATEVLNDIRSVLGVTIDLSSFIFFENIRAVVNDVNEKLGLSGISSASVSSPSLSGESTSTDPNITSGDKSGISTPCSEFQIIEEDDVKELAPSVPSIISARSAFEETRLSYDRSAKTTQALGYWKQAYPHQARMVLAYVVEAFADLGVDVRKIRSGEVVPHVKALETHKRLVRQLYRILEDGKLVTFNGSDFVRTETPIDTASAESIYQDIIGLYPQFANENKLTRAVGSEMAACLRGDKDGLQVVFGNREMKKTLEDMYEWAPLFRTPTLVLGDFLASAFTHQASGTGKFRILEIGAGTGGTTRYITKHLRSHGIEFEYVYTDISASLINTASKKFRSAGNDEGLVFEVLDIEQPPKPEYEGVFHAIIASNAIHATKDLEVCLRHIRQMLREDGVLGLIEITKNQFWLDIVFGLFEGWQLFDDGREHATVDVRHWERRLKASGFGDVAWSDGASPESKTIRVVAGFPRASAAPPPEKSIKVAYETVVYKTIGALKIHADVYYPAESETLPDRPMPVALMIHGGSHMLFSRKDVRPAQTRLLIKKGFLPVSIDYRLCPEVTLTEGPMVDVCDALDWARHQLPNMPLKRAGLSIDGESVVAIGWSSGGQLAMSLGWTAPVRGLRPPEANLVFYAPTDYEDTWWVNPIEPNGAPYQGQQYDVLEGVRDEAFSSYDMVGAWEEPITDPRSQHDARCRIVLHINWKAQTLPIILNGLPSRAKAGPNKNWDALPQPSLEVIRAASPRAQVRQGTYRVPTFFIHGTADDLIPWEQSKGTYETMVESGVDSEIVLLEDGQHICDLSSDPASDGWRAVLRGYDFICSRT

SEQ ID NO: 23798 - DNA, 7829 bp, Muscodor strobelii; identical to SEQ ID NO: 23792
  misc_feature: SGI EST ID NO. CUFF.55984.0
  misc_feature: Variant of the nucleotide sequence at SEQ ID NO 23796

SEQ ID NO: 23799 - DNA, 2541 bp, Muscodor strobelii
  misc_feature: SGI cDNA ID NO. 568103
  misc_feature: Reduced expression when VOC is produced
  misc_feature: Encodes the peptide sequence at SEQ ID NO 23800
atggcgcccgctgcaaagtctgcccccaagggtcagactaagactgcgaatgcaaagactgcctccagcaatgcgaaaactaaacagggccctccggccgctgcccccgtcgccaatcgacaggtcgtagtccctgtcatcccgctgcctctaatgcagaagcagcagaccagcagtcccaacagcgccggcaagacaaccactaagcacactaaacacacacccagtgcctccgtctcctccaacggcgttcctgcctcctccctcgaggctgccctcatcgaccgcgaccccatgccctccagtaagggccccgagaacgaagcaaacaaagctgtggagaagcccggttctgttgccgatgttgctgccctggctactcctgttgctgctcccagtcaggcgcaaccgcagcaggtcccctctcagactgatagcgaggccggacacgataacctcgtcacccctcagcagtcctctggcccctcggttgcagatgctgagcctgccgctgctacgggtgtggaggaggctccgggtaagccacctgctcaagcccgacagctgtccctgcagactcgcatggctggactgagccttgctgatgtttccttctccccagctacaaacggccatcctgtgatgaacccctcacaacctcagtcggccacctcgtctcgaccggagttccctcctttccagcctcccccgccgcacatgatcccgcagcccatgatggagcctggtttcccgcctcatcccatgtatccccttcagcaccggccccagctgagcaatggtggtggaatcatgttcggcgttatggattcccatacaccctccccggtccctccgggaggcttcttaccccctccaccccctatgaatggcgaccatcacttcaagcatctaaacggtcaccaccatacccactccaacagcaacggtttcctgcctcctgccaatggtcagttccgagacatggcgccgatttccacggttgatggttacggtccagtcccggctcctgcacctgctcattttgagcccttcccccacggcatgaaccgctacgagccccagacacctcatagtttccacggatctcacacctcgggcgagatgaacggccatgatggtgcccacgtgccgtacgccaacggcgcacctcacatgcaccctcgacccgaccagccacttgcacacccgcatgcgccacccttcccgcctttcatgcatccccaggctttcagaggacccttcatgcccgagcagaatgtcatggacacggcagctgcgtacatcaagagccagtttaataacaaagagtttgccgattgtgtcttggagctcgtgtctaccaaaggccgacgtcaccctgtcaagatagacgcccacaagatgatcctggcccagagtcctgcaatcaagcgctttgtcgaggctgctggctctgccaagattggctctcggaagcctatcgagactatcaccattcaagacgacgatccatatctgcgatcagatgcttggtggacggcgctccagcgcctgtacatgcacccgcttttcgacccttcgatgaatggcattgatttcgctggagacaaggctaaccgcttcagtttctgtcttggctatgctgctgcaggctctatccttgagatggaggatgttctggtgcgcggtctgcaactggctagggaccttctgacctgggacaccattgagacagcgctggacttcgtgtatcagaacacgactcgacgtcatttcgaccatgtgctcgactcccgtcagccaaaccagccgcccacttctctggagtttggatacggaccccagaccgagattctcttggccgcaatcatgagctttctcatcaacgagttcccctctaacttcgagcttgactgcacagtcgtcgattctcacggcttttcgagattccctgcccatccgctggcaaatggcgttgcaccatccgggtataccagcaagaccggccctaccattgctagaggcacgaacacccgtcatccgtctaaatcacgtttgcccaacatcaaatttggcgatctccctgccacttatcccgaagacagttcgatccccaaccgccaacctgcagcatacgcatccaccatgtctcgtgttctattgaacctcccatacgacgagctctgtggagttctctcttccagcagccacggtgtctcaggctggaacaccgcccaggaccgataccatgctgtttctgcggttgttgccgagagagaagccagacgtttgcgtgcagttgatgccgtccgctctggacttgttccacatgcccatgagattcagcagcggctctccgctgttcatagaccaaccattgccggcgagtgggatgatctgaattggcaagagcgtgtggtcatggacgagggccctgtcccgcgtatcattcggcgttgggtgcctcaatttgacgttgtacctcaagtgaccccccacagagccgcgctggcatacgacatgcctgactccatggtttaa

SEQ ID NO: 23800 - protein, 846 aa, Muscodor strobelii
  misc_feature: SGI Peptide ID NO. 568103
  misc_feature (251)..(824): NCBI GI: 256733877 Blast Desc: NECHADRAFT_36706 [Nectria haematococca mpVI 77-13-4]
  misc_feature (268)..(825): NCBI GI: 46127875 Blast Desc: FG08315.1 [Gibberella zeae PH-1]
  misc_feature (217)..(821): NCBI GI: 156061497 Blast Desc: SS1G_02893 [Sclerotinia sclerotiorum 1980] gi|154700295|gb|EDO00034.1| SS1G_02893 [Sclerotinia sclerotiorum 1980]
  misc_feature (238)..(820): NCBI GI: 116201757 Blast Desc: CHGG_08763 [Chaetomium globosum CBS 148.51] gi|88177281|gb|EAQ84749.1| CHGG_08763 [Chaetomium globosum CBS 148.51]
  misc_feature (348)..(822): NCBI GI: 145607936 Blast Desc: MGG_09970 [Magnaporthe grisea 70-15] gi|145015411|gb|EDJ99947.1| MGG_09970 [Magnaporthe grisea 70-15]
  misc_feature (316)..(821): NCBI GI: 85097946 Blast Desc: NCU05579 [Neurospora crassa OR74A] gi|28922034|gb|EAA31305.1| [Neurospora crassa OR74A]
  misc_feature (432)..(776): NCBI GI: 169598534 Blast Desc: SNOG_02071 [Phaeosphaeria nodorum SN15] gi|111069163|gb|EAT90283.1| SNOG_02071 [Phaeosphaeria nodorum SN15]
  misc_feature (257)..(820): NCBI GI: 171681692 Blast Desc: protein product [Podospora anserina] gi|170940805|emb|CAP66454.1| protein product [Podospora anserina]
  misc_feature (432)..(765): NCBI GI: 189204470 Blast Desc: conserved [Pyrenophora tritici-repentis Pt-1C-BFP] gi|187985669|gb|EDU51157.1| conserved [Pyrenophora tritici-repentis Pt-1C-BFP]
  misc_feature (426)..(769): NCBI GI: 121715422 Blast Desc: ACLA_069230 [Aspergillus clavatus NRRL 1] gi|119403477|gb|EAW13894.1| ACLA_069230 [Aspergillus clavatus NRRL 1]
  misc_feature: Useful for introducing or modulating the production of volatile compounds
MAPAAKSAPKGQTKTANAKTASSNAKTKQGPPAAAPVANRQVVVPVIPLPLMQKQQTSSPNSAGKTTTKHTKHTPSASVSSNGVPASSLEAALIDRDPMPSSKGPENEANKAVEKPGSVADVAALATPVAAPSQAQPQQVPSQTDSEAGHDNLVTPQQSSGPSVADAEPAAATGVEEAPGKPPAQARQLSLQTRMAGLSLADVSFSPATNGHPVMNPSQPQSATSSRPEFPPFQPPPPHMIPQPMMEPGFPPHPMYPLQHRPQLSNGGGIMFGVMDSHTPSPVPPGGFLPPPPPMNGDHHFKHLNGHHHTHSNSNGFLPPANGQFRDMAPISTVDGYGPVPAPAPAHFEPFPHGMNRYEPQTPHSFHGSHTSGEMNGHDGAHVPYANGAPHMHPRPDQPLAHPHAPPFPPFMHPQAFRGPFMPEQNVMDTAAAYIKSQFNNKEFADCVLELVSTKGRRHPVKIDAHKMILAQSPAIKRFVEAAGSAKIGSRKPIETITIQDDDPYLRSDAWWTALQRLYMHPLFDPSMNGIDFAGDKANRFSFCLGYAAAGSILEMEDVLVRGLQLARDLLTWDTIETALDFVYQNTTRRHFDHVLDSRQPNQPPTSLEFGYGPQTEILLAAIMSFLINEFPSNFELDCTVVDSHGFSRFPAHPLANGVAPSGYTSKTGPTIARGTNTRHPSKSRLPNIKFGDLPATYPEDSSIPNRQPAAYASTMSRVLLNLPYDELCGVLSSSSHGVSGWNTAQDRYHAVSAVVAEREARRLRAVDAVRSGLVPHAHEIQQRLSAVHRPTIAGEWDDLNWQERVVMDEGPVPRIIRRWVPQFDVVPQVTPHRAALAYDMPDSMV

SEQ ID NO: 23801 - DNA, 4357 bp, Muscodor strobelii
  misc_feature: SGI EST ID NO. CUFF.56242.1
  misc_feature: Variant of the nucleotide sequence at SEQ ID NO 23799
cgtgcagtcttctttaggataaaggccgataggctctgattgctcatcactctgggcagtccgagattatttcagcttgataggtcttgtctgccggtggttttgggtgcctgctgtcttgttgcctatgtaccttccggcgtatcggagctgtgcctgcctgcctgcctgtccgtctgagtgcagcagcacgcagtggcctggaatttcttaccaagccattgattgaaagcagcataggcctgcaacaattttttcgggcatccgccggatctatccattcattcgcccatttgcacatctgctccattcattttgtttccccccatatcatcatccccgatccccatctacaactccgtcaccttcgacgtctctctcgcctgcacgcccgcccatcatcttcatccgagggcacagcgcatgtcaaggtggcctacaggcgggacggtcttcgtcactcttcatcactgttagattgcatcagtactcacccctcgccatcacttaacccaccctctcctctcctctctctctcgcctccccgctactcttctccaacctgcggcctcagccactacataggtacaacccacagtccacttttgatttcggactgcctacctgccttgcaaacgcgctcacagcatccccttcagagcttctcgcccacaccacgacgcagttccagctgcttgtctggcactgctcgcgaacctgctgcatcgcgcgccaaaggctgggcatgctgcactcgtcactcatgacacctgagagcttgggttgagttgccagcttcgggtcctgggcgaccgatggttacggtctgcggttcactgttcacggtccctcgactaaactttgttaatcctttgcgcactcgcactcgcactcgtcaccggcgttgtggccactgactgttgcgtcggtcatcggttgcagccaagtctacagtcttctgcaccatcctctattatttcttcttcttgcgcctgtcgcctgggtctgccacgagcttcgttccacatttaacctagctctgcaaattccacatcgtccttgcgacagctccacctctgcgcgctgacagctttctcccactgagctgtcaacgaggtactgtggcctgcagcagcaatggcgcccgctgcaaagtctgcccccaagggtcagactaagactgcgaatgcaaagactgcctccagcaatgcgaaaactaaacagggccctccggccgctgcccccgtcgccaatcgacaggtcgtagtccctgtcatcccgctgcctctaatgcagaagcagcagaccagcagtcccaacagcgccggcaagacaaccactaagcacactaaacacacacccagtgcctccgtctcctccaacggcgttcctgcctcctccctcgaggctgccctcatcgaccgcgaccccatgccctccagtaagggccccgagaacgaagcaaacaaagctgtggagaagcccggttctgttgccgatgttgctgccctggctactcctgttgctgctcccagtcaggcgcaaccgcagcaggtcccctctcagactgatagcgaggccggacacgataacctcgtcacccctcagcagtcctctggcccctcggttgcagatgctgagcctgccgctgctacgggtgtggaggaggctccggctacaaacggccatcctgtgatgaacccctcacaacctcagtcggccacctcgtctcgaccggagttccctcctttccagcctcccccgccgcacatgatcccgcagcccatgatggagcctggtttcccgcctcatcccatgtatccccttcagcaccggccccagctgagcaatggtggtggaatcatgttcggcgttatggattcccatacaccctccccggtccctccgggaggcttcttaccccctccaccccctatgaatggcgaccatcacttcaagcatctaaacggtcaccaccatacccactccaacagcaacggtttcctgcctcctgccaatggtcagttccgagacatggcgccgatttccacggttgatggttacggtccagtcccggctcctgcacctgctcattttgagcccttcccccacggcatgaaccgctacgagccccagacacctcatagtttccacggatctcacacctcgggcgagatgaacggccatgatggtgcccacgtgccgtacgccaacggcgcacctcacatgcaccctcgacccgaccagccacttgcacacccgcatgcgccacccttcccgcctttcatgcatccccaggctttcagaggacccttcatgcccgagcagaatgtcatggacacggcagctgcgtacatcaagagccagtttaataacaaagagtttgccgattgtgtcttggagctcgtgtctaccaaaggccgacgtcaccctgtcaagatagacgcccacaagatgatcctggcccagagtcctgcaatcaagcgctttgtcgaggctgctggctctgccaagattggctctcggaagcctatcgagactatcaccattcaagacgacgatccatatctgcgatcagatgcttggtggacggcgctccagcgcctgtacatgcacccgcttttcgacccttcgatgaatggcattgatttcgctggagacaaggctaaccgcttcagtttctgtcttggctatgctgctgcaggctctatccttgagatggaggatgttctggtgcgcggtctgcaactggctagggaccttctgacctgggacaccattgagacagcgctggacttcgtgtatcagaacacgactcgacgtcatttcgaccatgtgctcgactcccgtcagccaaaccagccgcccacttctctggagtttggatacggaccccagaccgagattctcttggccgcaatcatgagctttctcatcaacgagttcccctctaacttcgagcttgactgcacagtcgtcgattctcacggcttttcgagattccctgcccatccgctggcaaatggcgttgcaccatccgggtataccagcaagaccggccctaccattgctagaggcacgaacacccgtcatccgtctaaatcacgtttgcccaacatcaaatttggcgatctccctgccacttatcccgaagacagttcgatccccaaccgccaacctgcagcatacgcatccaccatgtctcgtgttctattgaacctcccatacgacgagctctgtggagttctctcttccagcagccacggtgtctcaggctggaacaccgcccaggaccgataccatgctgtttctgcggttgttgccgagagagaagccagacgtttgcgtgcagttgatgccgtccgctctggacttgttccacatgcccatgagattcagcagcggctctccgctgttcatagaccaaccattgccggcgagtgggatgatctgaattggcaagagcgtgtggtcatggacgagggccctgtcccgcgtatcattcggcgttgggtgcctcaatttgacgttgtacctcaagtgaccccccacagagccgcgctggcatacgacatgcctgactccatggtttaacgtatagcctaaggttttgcagtttcacgggcacatgggattcacgacgaaatgacagagcaatcattggcatgggtaaaataaaagtctctacagtgcgtggcatcatggctcttgggcattgacattcggattggttttttcggtcggcattgcgttcggtgtttgtttgtgtatttcggtttctcttctgtgtggacatattgatttgggaggcatggcttgtgagccgcaatgcatcgttgttttgttgttggtgaagggatggttttcttctcggtctgcatgcttgcgctgagccgaaggaggataaaggagataccaaagaaagctcatcatgcgatggagatggtcgagcatgacgagcgaggattacataatacccattttacagacccgtaccactgttctcgaactcaactcgcaatgagttagaggcaactggtctggtatgaaggttgtaagaaggttgctccagaagcaaaaaagctttgctacactcgagcggagaggcaaggggcccaaagatagttgctttgcattatcttacgctacggtgcagcaggccggagaaaaggagagatggaccggaaagggacatgagatatcctgacgagcaacatagcatcgcacatgacgatgtctgatggctccagtaaatactccgaatcctacagaacttattcgttacgctgcttttatcctgcaagtgacttaatatgtatcgtatgatgaagtatggggagatacgaatgcaaaagcc

SEQ ID NO: 23802 - DNA, 1605 bp, Muscodor strobelii
  misc_feature: SGI cDNA ID NO. 568104
  misc_feature: Reduced expression when VOC is produced
  misc_feature: Encodes the peptide sequence at SEQ ID NO 23803
atggaagaaggcgggcttcgcaaccgagcagctcgtgcgagcctctccgacgatgccgccggcctcgcacaattaggccacacccaggagttgaagcgaagcttctccacggtctccatgttgggtctggcattcgcgattctcaacacgtggacagcgctcgccgcctcaatcaacctagcgttgccatctggcggccctagcgccgtcatctggggtcttgtggtcgccggtgtctgtaacctgtgtctcgccgcctcactcgctgagttcctctccgcatacccgacggccggaggtcaataccactgggcagccatcatcacacctcagaaatggagtcgtggagtttcgtacgtgacaggatggatcaacgtctccggatgggtggctttaacggctaccggtggattgctcggttcgacattcatccttcagatcgcaaccctcttgcacccgaactacgaacagaaaccgtggcaccaattcctcatctacatcactttcgcattcattgcgctcgcgatcaacaccttcgccaaccgacttctacccctactcaacaaagcggcgttcatttggtctctagcaggcttcatcataatctccatcacagtgctcgcctgcgcctcaccaacttaccagagtggtgagttcgtctacggtgaatttatcaacaataccggctggccagatggattatcctggctcctcggtcttctccaaggtgcctttgcgcttacaggattcgacgccgtcgcacacatgatcgaggagattcctaacccgcaacaccgtgggcctaccgtcatgttcgcatgtatcggcatcggtgtcttctcgggcttcgtattcctctccgctttattgttctgcgtaaaagatatcgacgccgccatcaaagcaccatacggtcctatcctccagatcttcctcgacgctacgaataacaaagccgggtctactgccttgctcatcttccctttggtgtgcatgttgtttacctccaccgccctgctcactacctcctcccgcatgagctacgcgtttgctagagataggggtttgccatttagcagcgtattcgcgaaagtccaccccacgctcgacgtccccgtcaatgccttactatggactgtgggctgggtcgttgtcttcggattgattctgctgggaagtagtagcacgttcaatgctattacggctgcgagtgttgttgcgcttggtgttacttatgctataccaccggctatcaatgtgcttcagggtaggaagaaattgcctgagggtagagcatttaaacttaatggacctttggggtggatttgcaacttggtcggaatcgcatggacaatcctaacaacagtgctcttcgtcttcccaccggagacacccgtcacgtccgagaacatgaactacgcagttgcggcatttgcagtcatcttgctcattgctggtgtcacgtggttggttgatggcaggaagcattataagggcccaaggattgatgtgcagggtttgattgatgggcgagtaatgggcgagaatatggagcaggcgcccgcgagcagtgacgatggcgacgggaaagcgcggctgagttag

SEQ ID NO: 23803 - protein, 534 aa, Muscodor strobelii
  misc_feature: SGI Peptide ID NO. 568104
  misc_feature (42)..(506): Pfam Id: PF00324 Pfam Desc: Amino acid permease
  misc_feature (1)..(528): NCBI GI: 46127939 Blast Desc: FG08347.1 [Gibberella zeae PH-1]
  misc_feature (26)..(530): NCBI GI: 154304053 Blast Desc: BC1G_09662 [Botryotinia fuckeliana B05.10] gi|150854297|gb|EDN29489.1| BC1G_09662 [Botryotinia fuckeliana B05.10]
  misc_feature (12)..(528): NCBI GI: 255944771 Blast Desc: Pc20g06240 [Penicillium chrysogenum Wisconsin 54-1255] gi|211587888|emb|CAP85953.1| Pc20g06240 [Penicillium chrysogenum Wisconsin 54-1255]
  misc_feature (16)..(530): NCBI GI: 242822756 Blast Desc: GABA permease GabA [Talaromyces stipitatus ATCC 10500] gi|218712873|gb|EED12298.1| GABA permease GabA [Talaromyces stipitatus ATCC 10500]
  misc_feature (17)..(530): NCBI GI: 169599066 Blast Desc: SNOG_02348 [Phaeosphaeria nodorum SN15] gi|111069440|gb|EAT90560.1| SNOG_02348 [Phaeosphaeria nodorum SN15]
  misc_feature (9)..(504): NCBI GI: 189208282 Blast Desc: GABA permease [Pyrenophora tritici-repentis Pt-1C-BFP] gi|187976567|gb|EDU43193.1| GABA permease [Pyrenophora tritici-repentis Pt-1C-BFP]
  misc_feature (18)..(507): NCBI GI: 4972245 Blast Desc: GABA permease [Emericella nidulans]
  misc_feature (18)..(507): NCBI GI: 67525009 Blast Desc: AN2962.2 [Aspergillus nidulans FGSC A4] gi|40744357|gb|EAA63533.1| AN2962.2 [Aspergillus nidulans FGSC A4] gi|259486093|tpe|CBF83660.1| TPA: GABA permease [Aspergillus
  misc_feature (15)..(504): NCBI GI: 255946141 Blast Desc: Pc20g13590 [Penicillium chrysogenum Wisconsin 54-1255] gi|211588573|emb|CAP86688.1| Pc20g13590 [Penicillium chrysogenum Wisconsin 54-1255]
  misc_feature (26)..(528): NCBI GI: 156030617 Blast Desc: SS1G_14404 [Sclerotinia sclerotiorum 1980] gi|154700795|gb|EDO00534.1| SS1G_14404 [Sclerotinia sclerotiorum 1980]
  misc_feature: Useful for introducing or modulating the production of volatile compounds
MEEGGLRNRAARASLSDDAAGLAQLGHTQELKRSFSTVSMLGLAFAILNTWTALAASINLALPSGGPSAVIWGLVVAGVCNLCLAASLAEFLSAYPTAGGQYHWAAIITPQKWSRGVSYVTGWINVSGWVALTATGGLLGSTFILQIATLLHPNYEQKPWHQFLIYITFAFIALAINTFANRLLPLLNKAAFIWSLAGFIIISITVLACASPTYQSGEFVYGEFINNTGWPDGLSWLLGLLQGAFALTGFDAVAHMIEEIPNPQHRGPTVMFACIGIGVFSGFVFLSALLFCVKDIDAAIKAPYGPILQIFLDATNNKAGSTALLIFPLVCMLFTSTALLTTSSRMSYAFARDRGLPFSSVFAKVHPTLDVPVNALLWTVGWVVVFGLILLGSSSTFNAITAASVVALGVTYAIPPAINVLQGRKKLPEGRAFKLNGPLGWICNLVGIAWTILTTVLFVFPPETPVTSENMNYAVAAFAVILLIAGVTWLVDGRKHYKGPRIDVQGLIDGRVMGENMEQAPASSDDGDGKARLS

SEQ ID NO: 23804 - DNA, 2557 bp, Muscodor strobelii
  misc_feature: SGI EST ID NO. CUFF.56084.1
  misc_feature: Variant of the nucleotide sequence at SEQ ID NO 23802
gcaagaaccgggtatgtctcttatcgagatgtcatttctcaaggtcagtctccaatctccaacggcactaacaaggcaagctcatcattggtgcgagctagggtgcaccccagactcgacgactcaagcttttgactaagggattttttgagagtgctggagctaaccgcattgctgcgtgaccacgaatatgggattacgctacttgcggagatgatagttgataggatgggttgcatgggatgcgaggccgatcaccgctggcttggggtagcgttcctgtacgtaagataaaatactcgcgctcgccgcatacatactgctctctattctcgcgactcttctcttgacttcgtcgttttgggagcgattgttcttgttcctgttggttcgtgtcgctcattgcaggaaccggacgcggcaggacgatacggagcgaatccgaaccgcaggaaccgcatagatatagctcgccctatagtcagtcccatcgacatcaaccaagatggaagaaggcgggcttcgcaaccgagcagctcgtgcgagcctctccgacgatgccgccggcctcgcacaattaggccacacccaggagttgaagcgaagcttctccacggtctccatgttgggtctggcattcgcgattctcaacacgtggacagcgctcgccgcctcaatcaacctagcgttgccatctggcggccctagcgccgtcatctggggtcttgtggtcgccggtgtctgtaacctgtgtctcgccgcctcactcgctgagttcctctccgcatacccgacggccggaggtcaataccactgggcagccatcatcacacctcagaaatggagtcgtggagtttcgtacgtgacaggatggatcaacgtctccggatgggtggctttaacggctaccggtggattgctcggttcgacattcatccttcagatcgcaaccctcttgcacccgaactacgaacagaaaccgtggcaccaattcctcatctacatcactttcgcattcattgcgctcgcgatcaacaccttcgccaaccgacttctacccctactcaacaaagcggcgttcatttggtctctagcaggcttcatcataatctccatcacagtgctcgcctgcgcctcaccaacttaccagagtggtgagttcgtctacggtgaatttatcaacaataccggctggccagatggattatcctggctcctcggtcttctccaaggtgcctttgcgcttacaggattcgacgccgtcgcacacatgatcgaggagattcctaacccgcaacaccgtgggcctaccgtcatgttcgcatgtatcggcatcggtgtcttctcgggcttcgtattcctctccgctttattgttctgcgtaaaagatatcgacgccgccatcaaagcaccatacggtcctatcctccagatcttcctcgacgctacgaataacaaagccgggtctactgccttgctcatcttccctttggtgtgcatgttgtttacctccaccgccctgctcactacctcctcccgcatgagctacgcgtttgctagagataggggtttgccatttagcagcgtattcgcgaaagtccaccccacgctcgacgtccccgtcaatgccttactatggactgtgggctgggtcgttgtcttcggattgattctgctgggaagtagtagcacgttcaatgctattacggctgcgagtgttgttgcgcttggtgttacttatgctataccaccggctatcaatgtgcttcagggtaggaagaaattgcctgagggtagagcatttaaacttaatggacctttggggtggatttgcaacttggtcggaatcgcatggacaatcctaacaacagtgctcttcgtcttcccaccggagacacccgtcacgtccgagaacatgaactacgcagttgcggcatttgcagtcatcttgctcattgctggtgtcacgtggttggttgatggcaggaagcattataagggcccaaggattgatgtgcagggtttgattgatgggcgagtaatgggcgagaatatggagcaggcgcccgcgagcagtgacgatggcgacgggaaagcgcggctgagttagatgtaggcaaggtaatcgcgactgagattttggacttggatatacccagtgccggagcatttcatccttggatatacctcaatttatatatattgtattgttcagtgactgtaagtggtccagaaagtgccttcctaccaatgcaggttattcgacattactgcaaacttgcccgtacgccaaccatgagattcaggcaacaacgcaaaaggctcgagcaaatacgcaaagcacctatccgtcctaatgcacaccaaccatacgtaacacagcatatgatactacaacgcgcagcccaactacaggactccgacgcatcacaattgagcgcagtagaccgtgtagcacgattcacgtctttatgcctgctgtagcggtgtagctgcagcttctatcacggtcaatcaagtcatgacacagagcatctcgtccctatgtcaatcaata

SEQ ID NO: 23805 - DNA, 1671 bp, Muscodor strobelii
  misc_feature: SGI cDNA ID NO. 568105
  misc_feature: Encodes the peptide sequence at SEQ ID NO 23806
atggaagaaggcgggcttcgcaaccgagcagctcgtgcgagcctctccgacgatgccgccggcctcgcacaattaggccacacccaggagttgaagcgaagcttctccacggtctccatgttgggtctggcattcgcgattctcaacacgtggacagcgctcgccgcctcaatcaacctagcgttgccatctggcggccctagcgccgtcatctggggtcttgtggtcgccggtgtctgtaacctgtgtctcgccgcctcactcgctgagttcctctccgcatacccgacggccggaggtcaataccactgggcagccatcatcacacctcagaaatggagtcgtggagtttcgtacgtgacaggatggatcaacgtctccggatgggtggctttaacggctaccggtggattgctcggttcgacattcatccttcagatcgcaaccctcttgcacccgaactacgaacagaaaccgtggcaccaattcctcatctacatcactttcgcattcattgcgctcgcgatcaacaccttcgccaaccgacttctacccctactcaacaaagcggcgttcatttggtctctagcaggcttcatcataatctccatcacagtgctcgcctgcgcctcaccaacttaccagagtggtgagttcgtctacggtgaatttatcaacaataccggctggccagatggattatcctggctcctcggtcttctccaaggtgcctttgcgcttacaggattcgacgccgtcgcacacatgatcgaggagattcctaacccgcaacaccgtgggcctaccgtcatgttcgcatgtatcggcatcggtgtcttctcgggcttcgtattcctctccgctttattgttctgcgtaaaagatatcgacgccgccatcaaagcaccatacggtcctatcctccagatcttcctcgacgctacgaataacaaagccgggtctactgccttgctcatcttccctttggtgtgcatgttgtttacctccaccgccctgctcactacctcctcccgcatgagctacgcgtttgctagagataggggtttgccatttagcagcgtattcgcgaaagtccaccccacgctcgacgtccccgtcaatgccttactatggactgtgggctgggtcgttgtcttcggattgattctgctgggaagtagtagcacgttcaatgctattacggctgcgagtgttgttgcgcttggtgttacttatgctataccaccggctatcaatgtgcttcagggtaggaagaaattgcctgagggtagagcatttaaacttaatggacctttggggtggatttgcaacttggtatgttcttattttcttccgcctattaccgctataaaggacgtgtgtactgatgaggcaatacaggtcggaatcgcatggacaatcctaacaacagtgctcttcgtcttcccaccggagacacccgtcacgtccgagaacatgaactacgcagttgcggcatttgcagtcatcttgctcattgctggtgtcacgtggttggttgatggcaggaagcattataagggcccaaggattgatgtgcagggtttgattgatgggcgagtaatgggcgagaatatggagcaggcgcccgcgagcagtgacgatggcgacgggaaagcgcggctgagttag

SEQ ID NO: 23806 - protein, 556 aa, Muscodor strobelii
  misc_feature: SGI Peptide ID NO. 568105
  misc_feature (42)..(488): Pfam Id: PF00324 Pfam Desc: Amino acid permease
  misc_feature (1)..(550): NCBI GI: 46127939 Blast Desc: FG08347.1 [Gibberella zeae PH-1]
  misc_feature (26)..(552): NCBI GI: 154304053 Blast Desc: BC1G_09662 [Botryotinia fuckeliana B05.10] gi|150854297|gb|EDN29489.1| BC1G_09662 [Botryotinia fuckeliana B05.10]
  misc_feature (12)..(550): NCBI GI: 255944771 Blast Desc: Pc20g06240 [Penicillium chrysogenum Wisconsin 54-1255] gi|211587888|emb|CAP85953.1| Pc20g06240 [Penicillium chrysogenum Wisconsin 54-1255]
  misc_feature (16)..(552): NCBI GI: 242822756 Blast Desc: GABA permease GabA [Talaromyces stipitatus ATCC 10500] gi|218712873|gb|EED12298.1| GABA permease GabA [Talaromyces stipitatus ATCC 10500]
  misc_feature (17)..(552): NCBI GI: 169599066 Blast Desc: SNOG_02348 [Phaeosphaeria nodorum SN15] gi|111069440|gb|EAT90560.1| SNOG_02348 [Phaeosphaeria nodorum SN15]
  misc_feature (9)..(526): NCBI GI: 189208282 Blast Desc: GABA permease [Pyrenophora tritici-repentis Pt-1C-BFP] gi|187976567|gb|EDU43193.1| GABA permease [Pyrenophora tritici-repentis Pt-1C-BFP]
  misc_feature (18)..(529): NCBI GI: 4972245 Blast Desc: GABA permease [Emericella nidulans]
  misc_feature (18)..(529): NCBI GI: 67525009 Blast Desc: AN2962.2 [Aspergillus nidulans FGSC A4] gi|40744357|gb|EAA63533.1| AN2962.2 [Aspergillus nidulans FGSC A4] gi|259486093|tpe|CBF83660.1| TPA: GABA permease [Aspergillus
  misc_feature (15)..(526): NCBI GI: 255946141 Blast Desc: Pc20g13590 [Penicillium chrysogenum Wisconsin 54-1255] gi|211588573|emb|CAP86688.1| Pc20g13590 [Penicillium chrysogenum Wisconsin 54-1255]
  misc_feature (25)..(552): NCBI GI: 71000225 Blast Desc: GABA permease GabA [Aspergillus fumigatus Af293] gi|66852452|gb|EAL92777.1| GABA permease GabA [Aspergillus fumigatus Af293] gi|159127825|gb|EDP52940.1| GABA permease GabA
MEEGGLRNRAARASLSDDAAGLAQLGHTQELKRSFSTVSMLGLAFAILNTWTALAASINLALPSGGPSAVIWGLVVAGVCNLCLAASLAEFLSAYPTAGGQYHWAAIITPQKWSRGVSYVTGWINVSGWVALTATGGLLGSTFILQIATLLHPNYEQKPWHQFLIYITFAFIALAINTFANRLLPLLNKAAFIWSLAGFIIISITVLACASPTYQSGEFVYGEFINNTGWPDGLSWLLGLLQGAFALTGFDAVAHMIEEIPNPQHRGPTVMFACIGIGVFSGFVFLSALLFCVKDIDAAIKAPYGPILQIFLDATNNKAGSTALLIFPLVCMLFTSTALLTTSSRMSYAFARDRGLPFSSVFAKVHPTLDVPVNALLWTVGWVVVFGLILLGSSSTFNAITAASVVALGVTYAIPPAINVLQGRKKLPEGRAFKLNGPLGWICNLVCSYFLPPITAIKDVCTDEAIQVGIAWTILTTVLFVFPPETPVTSENMNYAVAAFAVILLIAGVTWLVDGRKHYKGPRIDVQGLIDGRVMGENMEQAPASSDDGDGKARLS

SEQ ID NO: 23807 - DNA, 2557 bp, Muscodor strobelii; identical to SEQ ID NO: 23804
  misc_feature: SGI EST ID NO. CUFF.56084.1
  misc_feature: Variant of the nucleotide sequence at SEQ ID NO 23805

SEQ ID NO: 23808 - DNA, 1182 bp, Muscodor strobelii
  misc_feature: SGI cDNA ID NO. 568106
  misc_feature: Encodes the peptide sequence at SEQ ID NO 23809
atgggcggcatctattatggctcgttggtcactatcgcaatcagctttcgttcggacgcggaccaggggtgtttcaatgagacttcgacaagaacaacagagctagatgaaatcaaggaccatgtcatcaacatagaagggcagctcccagatggccgacggagttgtctatactttgtgtcacaccagaccgaaatccctgatgtgtatcgcgatgagatttcccggggacaattgtcgaagcgagcgtgggcctttcaagagtatgcgctgccccgtcggatactgtactacacttcgaaacagcttttctgggaatgcgaacactgcagactcagcgaggacaacttccctcaagctcggacgtcccgatcatttcctatcgctgacttcacatatccactggccaagatcaatatgccgtctatgtggtatgtcggggccattcgtgagtattctcgtcgccagatgacttttggcaaggacaaactcgtggcgatcagcgctcttgcgagagttgcccatctcgacagcaatttcgattacgtcgctggcttatggaagcaaagtttggatttggggcttgtgtggcacagagttagcgacggctgcaaatcgaagacctttgaatgtccttcgtggtcctgggcttctcaggactccgccgtgtcatatcgacttgccgcaggaagtcttgacgggtctcttgaccttgaacaagaaaggaccgatgatgggcctcaaacaagatctgttccgagattcgaaggtatcatttggacgccagatggatgtaacccgtttggtaatgtaacttctgcttacatcgatctttacacgaatattggtgaaggctttgtcacccgggacaagttcggacggagcacagagcggcaactgatactgcagtttccaaagccgacaacgcgcgacggttggctatatgcagatgctttcatggacgactcagacgcgacaagcatgcgagtcgctgtcgccctcttgcccaatctccgccgcttcagctggatactccttctcttaagtcccgcacataagcacgcgggggaatatcatcgtgtcggaatagcagagcttcttagttatgacaacttcaacagagggaaggatccgaatgagatgatcaaatcttggtcagaaaagatgatccgactagtgtag

SEQ ID NO: 23809 - protein, 393 aa, Muscodor strobelii
  misc_feature: SGI Peptide ID NO. 568106
  misc_feature (1)..(332): NCBI GI: 256723752 Blast Desc: NECHADRAFT_52118 [Nectria haematococca mpVI 77-13-4]
  misc_feature (1)..(278): NCBI GI: 256724255 Blast Desc: NECHADRAFT_87557 [Nectria haematococca mpVI 77-13-4]
  misc_feature (1)..(227): NCBI GI: 238490686 Blast Desc: conserved [Aspergillus flavus NRRL3357] gi|220696993|gb|EED53334.1| conserved [Aspergillus flavus NRRL3357]
  misc_feature (1)..(225): NCBI GI: 154316024 Blast Desc: BC1G_04584 [Botryotinia fuckeliana B05.10] gi|150846980|gb|EDN22173.1| BC1G_04584 [Botryotinia fuckeliana B05.10]
  misc_feature (1)..(227): NCBI GI: 169772777 Blast Desc: [Aspergillus oryzae RIB40] gi|83768718|dbj|BAE58855.1| protein product [Aspergillus oryzae]
  misc_feature (73)..(363): NCBI GI: 154320512 Blast Desc: BC1G_01728 [Botryotinia fuckeliana B05.10] gi|150853417|gb|EDN28609.1| BC1G_01728 [Botryotinia fuckeliana B05.10]
  misc_feature (1)..(239): NCBI GI: 256729778 Blast Desc: NECHADRAFT_83568 [Nectria haematococca mpVI 77-13-4]
  misc_feature (1)..(282): NCBI GI: 238502093 Blast Desc: conserved [Aspergillus flavus NRRL3357] gi|220691090|gb|EED47438.1| conserved [Aspergillus flavus NRRL3357]
  misc_feature (1)..(282): NCBI GI: 169617423 Blast Desc: SNOG_11890 [Phaeosphaeria nodorum SN15] gi|111059814|gb|EAT80934.1| SNOG_11890 [Phaeosphaeria nodorum SN15]
  misc_feature (1)..(278): NCBI GI: 256724258 Blast Desc: NECHADRAFT_87561 [Nectria haematococca mpVI 77-13-4]
MGGIYYGSLVTIAISFRSDADQGCFNETSTRTTELDEIKDHVINIEGQLPDGRRSCLYFVSHQTEIPDVYRDEISRGQLSKRAWAFQEYALPRRILYYTSKQLFWECEHCRLSEDNFPQARTSRSFPIADFTYPLAKINMPSMWYVGAIREYSRRQMTFGKDKLVAISALARVAHLDSNFDYVAGLWKQSLDLGLVWHRVSDGCKSKTFECPSWSWASQDSAVSYRLAAGSLDGSLDLEQERTDDGPQTRSVPRFEGIIWTPDGCNPFGNVTSAYIDLYTNIGEGFVTRDKFGRSTERQLILQFPKPTTRDGWLYADAFMDDSDATSMRVAVALLPNLRRFSWILLLLSPAHKHAGEYHRVGIAELLSYDNFNRGKDPNEMIKSWSEKMIRLV

SEQ ID NO: 23810 - DNA, 1319 bp, Muscodor strobelii
  misc_feature: SGI EST ID NO. CUFF.56087.0
  misc_feature: Variant of the nucleotide sequence at SEQ ID NO 23808
ggaagctaggaattacctatatatggattgatgccttgtgtatcgtccaggacaatgcttctgattgggctcaagaggctgcaaagatgggcggcatctattatggctcgttggtcactatcgcaatcagctttcgttcggacgcggaccaggggtgtttcaatgagacttcgacaagaacaacagagctagatgaaatcaaggaccatgtcatcaacatagaagggcagctcccagatggccgacggagttgtctatactttgtgtcacaccagaccgaaatccctgatgtgtatcgcgatgagatttcccggggacaattgtcgaagcgagcgtgggcctttcaagagtatgcgctgccccgtcggatactgtactacacttcgaaacagcttttctgggaatgcgaacactgcagactcagcgaggacaacttccctcaagctcggacgtcccgatcatttcctatcgctgacttcacatatccactggccaagatcaatatgccgtctatgtggtatgtcggggccattcgtgagtattctcgtcgccagatgacttttggcaaggacaaactcgtggcgatcagcgctcttgcgagagttgcccatctcgacagcaatttcgattacgtcgctggcttatggaagcaaagtttggatttggggcttgtgtggcacagagttagcgacggctgcaaatcgaagacctttgaatgtccttcgtggtcctgggcttctcaggactccgccgtgtcatatcgacttgccgcaggaagtcttgacgggtctcttgaccttgaacaagaaaggaccgatgatgggcctcaaacaagatctgttccgagattcgaaggtatcatttggacgccagatggatgtaacccgtttggtaatgtaacttctgcttacatcgatctttacacgaatattggtgaaggctttgtcacccgggacaagttcggacggagcacagagcggcaactgatactgcagtttccaaagccgacaacgcgcgacggttggctatatgcagatgctttcatggacgactcagacgcgacaagcatgcgagtcgctgtcgccctcttgcccaatctccgccgcttcagctggatactccttctcttaagtcccgcacataagcacgcgggggaatatcatcgtgtcggaatagcagagcttcttagttatgacaacttcaacagagggaaggatccgaatgagatgatcaaatcttggtcagaaaagatgatccgactagtgtagatcggatctttgcatagtattgaggcaacccaaaaggtactggtcactttt

SEQ ID NO: 23811 - DNA, 1812 bp, Muscodor strobelii
  misc_feature: SGI cDNA ID NO. 568107
  misc_feature: Encodes the peptide sequence at SEQ ID NO 23812
atgacttccaacgcgggtccttcgaggacttctccagtccctcccatcgagactcagattccgaaggctgctgcatcgcgacccagaaccggttcaacagcgaaacccaagtcactcgctgacccagtcctgcgcaatgctttgagatacaccatctcggtgcgcgaatatgagacgctccaccgatatgtcatttcgcgctccaaagttcttcggaaacgcaccccgagtgtcaatgccctcgagaagtatatggatggtagtgagagcaatcgaagggggtcggtgaataggcgagaatccgatgagggtaaagggaaaggaaaggggaagggcgtcgctggaggctctagttcaagaggaggcgatacttacaatgctcgcgctattcgccatgccttgcgcgtcttcttcggtctcgggataggaactaaggccttggagttgattatcgcgcgcgtcaagggacagaaagagacgggaccggcgcagaagaagcaaccattctacaaatcatcgtcgctacgactgtcgctttcgctatccacgattttgctgctctacagactcctattccgcttcctcacgcgcttgagactacagattctcgaccctgctgcagcaccattccgcgagcgcaacccccgaacttcaaataccctcacatctccctatgcgcccgcagtgggagcaagcttggctggtctggccttgggtatctacccttcagaccagctgcgcgtgaccgctatgatcactatcatgttccgcgcattagaattcggctggaatttgctcgaggatgagggcgctatatggggctggcgggcacgcgcaggcggaaagggcatggtgaagagagagcgaccgtggtgggtgggaacgtggatgttccagcccttcgcttttggccagatgctccatgccgccgtgttcgaccctgatgcttctcctactgggctagtcgattttatctggaagcagacttctacttacctccacagcccacccaaggatctacctgctggcgtcacatggcctggcgcgtgggatgttgctgagaacttgtccaagatggctaagatgaactggccaccattcgtctcaccaaccctattccctgaccaagaaaccctcccaacagccctctcagccgtcgcccccttaacatccaaagcccaccctctcatcacatccctaagctgcgcaaccctccacccctccgacccatcctgcgcaacgacatacctcaccttctgggcccgttccttcccacgcatgggccgcttcttcctaatattctactccatcctcatgctcccgcgctacaaactgctctacaacgcacctctcaaactcctcacgggactgctgtctagaaccctccgtatcactactttcgccacaggcgctatatcaactgcttgggctagcatatgtttcttccagtcatggttccctcgcacatttctcccaactcagcgattctttcttggggggtttattgccgggctgtgggcgttcgtagagagacagaatggcaagagtgttttcttgtatagcgcaaggacgagtgtggattccctttggaaagtgggggtgaagagacgttggtggaaggccatgagagggggtgatgtttggttgtttgctcttgcgctagcgattacaggtgcggtttatgagagggatgcgagagcgattagagaggataatattaggaaggggatcagttggcttaggggtactgggtttagggattggggtgctgaggaggaggatggtgagggcgaggggttgaaggaggagtag

SEQ ID NO: 23812 - protein, 603 aa, Muscodor strobelii
  misc_feature: SGI Peptide ID NO. 568107
  misc_feature (28)..(603): NCBI GI: 85097942 Blast Desc: NCU05578 [Neurospora crassa OR74A] gi|28922033|gb|EAA31304.1| [Neurospora crassa OR74A]
  misc_feature (32)..(590): NCBI GI: 171681694 Blast Desc: protein product [Podospora anserina] gi|170940806|emb|CAP66455.1| protein product [Podospora anserina]
  misc_feature (41)..(590): NCBI GI: 46127877 Blast Desc: FG08316.1 [Gibberella zeae PH-1]
  misc_feature (41)..(603): NCBI GI: 256733876 Blast Desc: [Nectria haematococca mpVI 77-13-4]
  misc_feature (41)..(589): NCBI GI: 39965708 Blast Desc: MGG_09971 [Magnaporthe grisea 70-15] gi|145015410|gb|EDJ99946.1| MGG_09971 [Magnaporthe grisea 70-15]
  misc_feature (37)..(589): NCBI GI: 116201759 Blast Desc: CHGG_08764 [Chaetomium globosum CBS 148.51] gi|88177282|gb|EAQ84750.1| CHGG_08764 [Chaetomium globosum CBS 148.51]
  misc_feature (37)..(601): NCBI GI: 154314269 Blast Desc: BC1G_05228 [Botryotinia fuckeliana B05.10] gi|150848873|gb|EDN24066.1| BC1G_05228 [Botryotinia fuckeliana B05.10]
  misc_feature (198)..(603): NCBI GI: 261361078 Blast Desc: conserved [Verticillium albo-atrum VaMs.102]
  misc_feature (12)..(588): NCBI GI: 156036126 Blast Desc: SS1G_12749 [Sclerotinia sclerotiorum 1980] gi|154698157|gb|EDN97895.1| SS1G_12749 [Sclerotinia sclerotiorum 1980]
  misc_feature (41)..(587): NCBI GI: 189204922 Blast Desc: conserved [Pyrenophora tritici-repentis Pt-1C-BFP] gi|187985895|gb|EDU51383.1| conserved [Pyrenophora tritici-repentis Pt-1C-BFP]
MTSNAGPSRTSPVPPIETQIPKAAASRPRTGSTAKPKSLADPVLRNALRYTISVREYETLHRYVISRSKVLRKRTPSVNALEKYMDGSESNRRGSVNRRESDEGKGKGKGKGVAGGSSSRGGDTYNARAIRHALRVFFGLGIGTKALELIIARVKGQKETGPAQKKQPFYKSSSLRLSLSLSTILLLYRLLFRFLTRLRLQILDPAAAPFRERNPRTSNTLTSPYAPAVGASLAGLALGIYPSDQLRVTAMITIMFRALEFGWNLLEDEGAIWGWRARAGGKGMVKRERPWWVGTWMFQPFAFGQMLHAAVFDPDASPTGLVDFIWKQTSTYLHSPPKDLPAGVTWPGAWDVAENLSKMAKMNWPPFVSPTLFPDQETLPTALSAVAPLTSKAHPLITSLSCATLHPSDPSCATTYLTFWARSFPRMGRFFLIFYSILMLPRYKLLYNAPLKLLTGLLSRTLRITTFATGAISTAWASICFFQSWFPRTFLPTQRFFLGGFIAGLWAFVERQNGKSVFLYSARTSVDSLWKVGVKRRWWKAMRGGDVWLFALALAITGAVYERDARAIREDNIRKGISWLRGTGFRDWGAEEEDGEGEGLKEE

SEQ ID NO: 23813 - DNA, 2941 bp, Muscodor strobelii
  misc_feature: SGI EST ID NO. CUFF.56009.0
  misc_feature: Variant of the nucleotide sequence at SEQ ID NO 23811
attgcacatatcttggtttatggagatccgtctattaccaggatctacatactcggcaatgtgtactagtgaatgaatgctaccgcctgtttcttccaacagtgagtgatggctgttgatcgtacagtccataacatcttaagagattgagcagcagttatatgaggtacagcttgacttgaaaagcgtaccggatttcaaatgcgcagtatctatagaaatcgcatttgttttctcgcgcagggaaaactaggtatggttgacgatggcctaattgatatctcggtcctgcccagttaaagactcggacccggtggagtaggtagagagagacccgacgctatcagaagccaaagctgccgaggcatagtgacaccaagcacctaatttccctgcccgcatcatcgcaatcctacgcttttcatgccagtcccctccccggaaatctcacggcgctgtatatctgagtaatctgtctatctctggctatctatcgacaactctctcgcttcagctcgaattctgcgaacttggtcattttattcgacttttcttctgaacactgttcccatagacgtgtaaacgcggagccaagggattgggtccgctctgtcgcgtcatcgagcgtcccggaagcttgggttcggatgcgcgagctggcattgacgtcgggctggtagtgtcatcccgtcgccatcagcttcatgcgcgagctgaaaagggcatgattcattcaacaaccacccattggcatcgattccagagcagaacctatacttctgttcttccaccattagagaatatttctcagaggaattgcgagcgcgacaactttcggatgggttgaactaagggatctggctcgtactgaaccctcgggaatccctatcgacatgacttccaacgcgggtccttcgaggacttctccagtccctcccatcgagactcagattccgaaggctgctgcatcgcgacccagaaccggttcaacagcgaaacccaagtcactcgctgacccagtcctgcgcaatgctttgagatacaccatctcggtgcgcgaatatgagacgctccaccgatatgtcatttcgcgctccaaagttcttcggaaacgcaccccgagtgtcaatgccctcgagaagtatatggatggtagtgagagcaatcgaagggggtcggtgaataggcgagaatccgatgagggtaaagggaaaggaaaggggaagggcgtcgctggaggctctagttcaagaggaggcgatacttacaatgctcgcgctattcgccatgccttgcgcgtcttcttcggtctcgggataggaactaaggccttggagttgattatcgcgcgcgtcaagggacagaaagagacgggaccggcgcagaagaagcaaccattctacaaatcatcgtcgctacgactgtcgctttcgctatccacgattttgctgctctacagactcctattccgcttcctcacgcgcttgagactacagattctcgaccctgctgcagcaccattccgcgagcgcaacccccgaacttcaaataccctcacatctccctatgcgcccgcagtgggagcaagcttggctggtctggccttgggtatctacccttcagaccagctgcgcgtgaccgctatgatcactatcatgttccgcgcattagaattcggctggaatttgctcgaggatgagggcgctatatggggctggcgggcacgcgcaggcggaaagggcatggtgaagagagagcgaccgtggtgggtgggaacgtggatgttccagcccttcgcttttggccagatgctccatgccgccgtgttcgaccctgatgcttctcctactgggctagtcgattttatctggaagcagacttctacttacctccacagcccacccaaggatctacctgctggcgtcacatggcctggcgcgtgggatgttgctgagaacttgtccaagatggctaagatgaactggccaccattcgtctcaccaaccctattccctgaccaagaaaccctcccaacagccctctcagccgtcgcccccttaacatccaaagcccaccctctcatcacatccctaagctgcgcaaccctccacccctccgacccatcctgcgcaacgacatacctcaccttctgggcccgttccttcccacgcatgggccgcttcttcctaatattctactccatcctcatgctcccgcgctacaaactgctctacaacgcacctctcaaactcctcacgggactgctgtctagaaccctccgtatcactactttcgccacaggcgctatatcaactgcttgggctagcatatgtttcttccagtcatggttccctcgcacatttctcccaactcagcgattctttcttggggggtttattgccgggctgtgggcgttcgtagagagacagaatggcaagagtgttttcttgtatagcgcaaggacgagtgtggattccctttggaaagtgggggtgaagagacgttggtggaaggccatgagagggggtgatgtttggttgtttgctcttgcgctagcgattacaggtgcggtttatgagagggatgcgagagcgattagagaggataatattaggaaggggatcagttggcttaggggtactgggtttagggattggggtgctgaggaggaggatggtgagggcgaggggttgaaggaggagtagggggcttggttcagaggctattgctgccattctcagccgaagagacgggagttgactcaaagtacagcatatggtagatgagaggtagacggaaagtgtacgtcatgtgttatgatctttacaattaatgacagtaatcgttgagtttcacttcctagcttatttttctgtgattagttcctgatcgagataagtaggtaacagtcttatttctacatagatgggtaaaatagcgg

SEQ ID NO: 23814 - DNA, 1224 bp, Muscodor strobelii
  misc_feature: SGI cDNA ID NO. 568108
  misc_feature: Encodes the peptide sequence at SEQ ID NO 23815
atggacgacaagaaagaactcggccacaatagcggaaatagaacagagcatgtcgaggtgtctcaactaccgaaggtgacggatgaggaagatttgccgcttgagcagaagcgggaagaacggcgtatcgtctggggagctgtaatgcttggtatggggtttgcgcaagattggcgcgtgattgtcgttgcgaggttcctgattggtgtttttgaggcgggtttcctgccgtgttgcatgtatttgcttgcgagttggtatatgcggtatgaggtgcagcaaagaatggcctggtggtacatgatcaatctcttcattagcgcattcggcaatattctcgcctgggccctgatccaacttgatgggcgacacggtatcgcaggttggcgatggatatttatcatcgagggcacgatcacattagggttcgccttcattggatacatcttcacgcttccctttccagatcaactgctggcaaaagggggcaaaatggctggtttcacagcccaagaactgcagaccatcctagaccgagtcgaccgcgatagacgagatgccgatccggataagcttacacgctccaaagtgttgaaatcgctgctcacttgggagctttgggtatatggactgatgttcttgacttgttctgcgcccatctacgcttttgcgtactttatccagatcattctggggacgttcggatacgggactgcggtcgtgtttttgctctgcgcgccgccatatttgttcagcattgtatggacaggagtagttgcctattttgcagataagatgcggtatcgtatgccgtggatggttgctaatgctgctattactttgacgggattgttgcttacggcttatgtgaagaatagtggcgtcagatattttggcgtcttcttgggcgtatccgggtgtaacgcaaacctaccgaccatcatcgccttccagtcaaacaatgtacgtggcaacagtcgccgatcaatgggagccgccatccagcttctattcgcatctattggcggtatctacgcatcgacgacgttcaagcaaagcgagtatcccgtttacacaactggtgtctgggcggctgttggtacgcaggcgctgcttattgggctggtggcgcttatgtggtggcggttcagtactttgaacagcgcggcagaccgccatgggaagctcattcaggacgatattctatttcgtcatactttttag

SEQ ID NO: 23815 - protein, 407 aa, Muscodor strobelii
  misc_feature: SGI Peptide ID NO. 568108
  misc_feature (18)..(347): Pfam Id: PF07690 Pfam Desc: Major Facilitator Superfamily
  misc_feature (43)..(347): Pfam Id: PF07690 Pfam Desc: Major Facilitator Superfamily
  misc_feature (43)..(407): NCBI GI: 169615425 Blast Desc: SNOG_10870 [Phaeosphaeria nodorum SN15] gi|111060249|gb|EAT81369.1| SNOG_10870 [Phaeosphaeria nodorum SN15]
  misc_feature (45)..(407): NCBI GI: 119194521 Blast Desc: CIMG_01635 [Coccidioides immitis RS]
  misc_feature (45)..(407): NCBI GI: 169610003 Blast Desc: SNOG_08094 [Phaeosphaeria nodorum SN15] gi|160701959|gb|EAT84370.2| SNOG_08094 [Phaeosphaeria nodorum SN15]
  misc_feature (45)..(399): NCBI GI: 189192691 Blast Desc: PTRG_02351 [Pyrenophora tritici-repentis Pt-1C-BFP] gi|187978248|gb|EDU44874.1| PTRG_02351 [Pyrenophora tritici-repentis Pt-1C-BFP]
  misc_feature (45)..(407): NCBI GI: 240105278 Blast Desc: Major Facilitator Superfamily protein [Coccidioides posadasii C735 delta SOWgp]
  misc_feature (45)..(407): NCBI GI: 226290050 Blast Desc: conserved [Paracoccidioides brasiliensis Pb18]
  misc_feature (4)..(392): NCBI GI: 258567274 Blast Desc: [Uncinocarpus reesii 1704] gi|237905827|gb|EEP80228.1| [Uncinocarpus reesii 1704]
  misc_feature (45)..(407): NCBI GI: 226287992 Blast Desc: conserved [Paracoccidioides brasiliensis Pb18]
  misc_feature (45)..(396): NCBI GI: 169846961 Blast Desc: CC1G_09354 [Coprinopsis cinerea okayama7#130] gi|116508777|gb|EAU91672.1| CC1G_09354 [Coprinopsis cinerea okayama7#130]
  misc_feature (45)..(367): NCBI GI: 261199820 Blast Desc: conserved [Ajellomyces dermatitidis SLH14081] gi|239594519|gb|EEQ77100.1| conserved [Ajellomyces dermatitidis SLH14081]
MDDKKELGHNSGNRTEHVEVSQLPKVTDEEDLPLEQKREERRIVWGAVMLGMGFAQDWRVIVVARFLIGVFEAGFLPCCMYLLASWYMRYEVQQRMAWWYMINLFISAFGNILAWALIQLDGRHGIAGWRWIFIIEGTITLGFAFIGYIFTLPFPDQLLAKGGKMAGFTAQELQTILDRVDRDRRDADPDKLTRSKVLKSLLTWELWVYGLMFLTCSAPIYAFAYFIQIILGTFGYGTAVVFLLCAPPYLFSIVWTGVVAYFADKMRYRMPWMVANAAITLTGLLLTAYVKNSGVRYFGVFLGVSGCNANLPTIIAFQSNNVRGNSRRSMGAAIQLLFASIGGIYASTTFKQSEYPVYTTGVWAAVGTQALLIGLVALMWWRFSTLNSAADRHGKLIQDDILFRHTF

SEQ ID NO: 23816 - DNA, 415 bp, Muscodor strobelii
  misc_feature: SGI EST ID NO. CUFF.56021.0
  misc_feature: Variant of the nucleotide sequence at SEQ ID NO 23814
tgctgatggaagttctaaaatggatatgttctgacaaagttacggagatagagcacgctgtccttgcgattcatcggcccgaggattctactaaatgctttcgtgtttagctggggagctgtaatgcttggtatggggtttgcgcaagattggcgcgtgattgtcgttgcgaggttcctgattggtgtttttgaggcgggtttcctgccgtgttgcatgtatttgcttgcgagttggtatatgcggtatgaggtgcagcaaagaatggcctggtggtacatgatcaatctcttcattagcgcattcggcaatattctcgcctgggccctgatccaacttgatgggcgacacggtatcgcaggttggcgatggatatttatcatcgagggcacgatcacattagggttcgccttca

SEQ ID NO: 23817 - DNA, 4596 bp, Muscodor strobelii
  misc_feature: SGI cDNA ID NO. 568109
  misc_feature: Encodes the peptide sequence at SEQ ID NO 23818
atgtccttcctgggcagcgccttctccaattacgaccgcacagcgcagactgcaggttccccaggagtgatgtcgccacatcgcgaggttacaggaggcgagatggaagaagccgtagcagaccacacaactaccgcagagagtgtcacaaaaacgcgtagcacatcagtaacagacacgacagccaagggcagcgaagccgaagcagaaaagaaagttgtaagcagcgatgacagcactgacgatgatgccgccgaactcgaacgtcgtgagtcaagggtacgtgatctggctagaacgtacacgacgcagtcacaagcacactatgcaccgggcacgaacccctatttagataccgacgagaactcacccttaaacccgacatcacctaacttccgcgcccgggcatgggcgaaatcaattgttgaaatgacctcggccgagggcaaagagttcagaacatcgggcgtctgctttcagaacctgaatgtacacggttttggctcagctacggattatcagaaagatgtgggcaacgtctggctggaggttgctggactcgctcgcaaagcaattggcacgggccagaggaagatcgatatcctgcgggactttgatggtttagtccgtaaaggcgagatgttggttgttttgggtcctcccggagcaggatgttcgacctttttgaagtcgattgctggggaaacatctggtatctacatcgacgataattcttatttcaactaccagggaattgatgccaacgagatgcatacccaccatcgtggtgaagccatctacacagccgaggtcgacgttcatttccccatgttgacagtcggtgaaactctcacattcgcggcacaggctcgtgcaccgcgtgaactcccagagggcgttgacaaatggcagtacgccaatcatcttcgagatgtcactatggccatgtttggcatctcccacaccatcaacacaaacgtgggcaacgaatacattcgaggtgtgtctggcggtgagcggaaacgtgtcactattgctgaggccacactcagccgtgcaccgctgcagtgctgggacaacagcacgcgcggtcttgacagtgccaatgccgtagagttttgcaagactctcagaacacagactgagttatttggcaataccgcctgcgtatcaatctatcagtctcctcaagcggcttacgactatttcgacaaggctctggtactatacgaaggccgacagattttcttcggacgggcgaacgaagccagacagtacttcgagaaacttggatttgaatgcccggcacgtcagacgacgcccgatttcttaacatccatgacaagtcctcttgagcgcgtggttcgacccgacttcaaggacaaggtcccgcgcactccagatgagtttgcccaagcatggaaggacagcgccgaatacgctgcccttcaagctgagattgaggcgtacaagacagagcatccaattggtggccccgacgcagtagctttccgtaactcaagaaaggctcagcaagctagaggtcagcgtgccaaatccccattcacgttgtcatacactcagcaaatcaacttatgtctctggcgaggatggcttcggcttaagggcgatcccagtatcactatcggttctttgatcggcaatttcgtcatgtccctcattgtcggcagtgttttctataatttacaacccgtcacatcgagcttctttcaaagaggctctctactgttcttcgcctgtctcctgaatgcattcgctagtgcgcttgaaattcttactctctacgctcaacgtccgattgtcgagaagcactcccgatacgctttgtatcatccttcggccgaagctgtttcctctatgctttgcgacttgccttataaaatcgtaaatacgatcgtgttcaacctgtcactctacttcctgaccaatctccgccgtgaaccgggagcattcttcttttacctcctcttctcgtttgtcactgttttgacaatgagcatgatcttccgaacgattgcgtcttcctcgcggtcgctgtcgcaagcacttgtgccagcggcgttcctcatcttggaccttgtcattttcaccggtttcgtcatcccgatcaattatatgttgagttggtgtcgttggttgaattacttggatccgcttgcttatgctttcgagtctttcatggttaatgaattctctggtcgtgagtttacgtgcaatgagttcgttccatcgccgcaaatttcacagtatgcaaatgtcggggccgaaaaccacatctgttcctcggttggcggtgtcgctggctcatcaaccgtcagtggtgatgcgtatattgagtcgggcttccaatactctgcagcacataagtggagaaacttggggatcctcattgcattcaccattttcttcctaatcacatacatgatatctgctgagctcgtctccgagaagaaatcaaagggagaagtgctcgttttcaggcgtggccacaaacctgctcagttcaaagagaagaaaggcgatgtggaagagagcatgggcccgcgtgtcggacctgttgcaacgaacgtcagtcgggctagtcgacctatcgcccagaaccacaaggaaggaggcgcgattcaagaatcaaccagtgttttccactggcatgacgtatgctatgatgttaagatcaagaaggaaacccgacgcattctcgaccatgttgatgggtgggtcaaacctggaacattgacagctttgatgggtgtttctggtgctggtaaaacgactctactggatgctcttgctagccgacttacaacgggcgtaattacgggtgagatgcttgttgatggccgctctcgtgacacctctttccagcgcaagaccggctatgttcagcaacaagatctgcatttgtctactacgaccgtccgcgaggcactcaacttttccgctatccttcgccagccagctgatgttcccagacaggagaagttggactacgtcgaggaagtcatcaaactattggaaatggaggaatatgctgatgctgttgttggcattcttggcgagggtctcaatgtggaacaacgcaagcgccttaccataggtgtagaacttgctgcgaagccccctctactgctcttcgtcgatgagcctacctctggtcttgactcacaaacctcatgggccattctggatttgcttgagaagcttactaaggctggccaagccgtgctctgtaccatccatcaaccttcggccatgttgttccagcgtttcgaccagttattgttcttggccaagggaggcaagaccgtctattttggcgaaattggtgaaaactcaaagacaatgacctcctatttcgaaagccacggcgcacctgcatgtccatcagacgccaaccctgccgagtggatgttggatgcaatcggtgccgctcctggaagttctacagatgttgattggttccaaacctggcgtgatagcaaggagtaccacgcagtccaagctgaacttcaacgacttaaagatgacgcacccgccgtcccaccaccgaccgaagatgatcaatcataccgtgaacacgccgctcctttcaccgttcaattaaaagaggtcacgtatcgtgtgttccaacagtactggcgaacaccggtttatatttactcgaagactgccttgtgtctgattgttgccctcttcattggctttgtcttcttccgcgcccccaacacacaacagggactgcagaaccagacattcgccattttcaatctctttacaatcttcggacagttagtacagcagacaatgccgcatttcgtggtccaacgctctctctacgaggttcgggagcggccgtctaaggtgtatggctggaaagtcttcatgctttcgcaaatcattgtcgaaataccctggaacacactgatggccgtgttgatgttcttctcctggtactaccctattggactataccggaatacatacatcgacggcgcgacaactgaacgtggtgcccttgttttcctgctacttctcgagttcatgttgttcacttgcacatttaccgacatgatcattgcggctttcgacaccgccgaggcaggtggcaatgtagctaatctcctgttcacgctttgtcttattttctgcggtgttctagcgagaccggatcagttcccccatttctggatcttcctgtacagagtcagcccatttacctacttagcctccgcacttattactgcgggtgtggcaaacacggatgtcgtgtgtgcaaacaacgaatacttgagatttgcgccccccgacggaatgaactgcatggactacctgcaatatcagcccggcggttatctcacgccagattccgagaacagcatgactgaatgcgtgtattgcgcaatcggatcaaccaatggctatcttaccggactgggtgttaattatgccgatcgctggcgcaactttggaatcatcttcgcatacatcattttcaacgtattcggcgcactgtttttgtactggctcacccgtgtaccaaagaagcccaaggaggagaagaccaagaaagaataa

SEQ ID NO: 23818 - protein, 1531 aa, Muscodor strobelii
  misc_feature: SGI Peptide ID NO. 568109
  misc_feature (528)..(738): Pfam Id: PF01061 Pfam Desc: ABC-2 type transporter
  misc_feature (1206)..(1424): Pfam Id: PF01061 Pfam Desc: ABC-2 type transporter
  misc_feature (917)..(1106): Pfam Id: PF00005 Pfam Desc: ABC transporter
  misc_feature (212)..(412): Pfam Id: PF00005 Pfam Desc: ABC transporter
  misc_feature (747)..(906): Pfam Id: PF06422 Pfam Desc: CDR ABC transporter
  misc_feature (1)..(1520): NCBI GI: 171678100 Blast Desc: protein product [Podospora anserina] gi|170937119|emb|CAP61777.1| protein product [Podospora anserina]
  misc_feature (77)..(1520): NCBI GI: 224969385 Blast Desc: ABC transporter ABCl1 [Glomerella lindemuthiana]
  misc_feature (51)..(1520): NCBI GI: 256733407 Blast Desc: [Nectria haematococca mpVI 77-13-4]
  misc_feature (1)..(1522): NCBI GI: 85097998 Blast Desc: ABC transporter CDR4 [Neurospora crassa OR74A] gi|28922046|gb|EAA31317.1| ABC transporter CDR4 [Neurospora crassa OR74A]
  misc_feature (1)..(1520): NCBI GI: 46127869 Blast Desc: FG08312.1 [Gibberella zeae PH-1]
  misc_feature (46)..(1529): NCBI GI: 256719982 Blast Desc: NECHADRAFT_56589 [Nectria haematococca mpVI 77-13-4]
  misc_feature (18)..(1522): NCBI GI: 2625138 Blast Desc: ABC1 transporter [Magnaporthe grisea]
  misc_feature (29)..(1520): NCBI GI: 256726293 Blast Desc: [Nectria haematococca mpVI 77-13-4]
  misc_feature (82)..(1530): NCBI GI: 115402775 Blast Desc: ABC transporter CDR4 [Aspergillus terreus NIH2624] gi|114189310|gb|EAU31010.1| ABC transporter CDR4 [Aspergillus terreus NIH2624]
  misc_feature (43)..(1520): NCBI GI: 86604547 Blast Desc: ABC transporter [Gibberella moniliformis]
  misc_feature: Useful for introducing or modulating the production of volatile compounds
  misc_feature: Useful for fungicidal and/or biocontrol applications
MSFLGSAFSNYDRTAQTAGSPGVMSPHREVTGGEMEEAVADHTTTAESVTKTRSTSVTDTTAKGSEAEAEKKVVSSDDSTDDDAAELERRESRVRDLARTYTTQSQAHYAPGTNPYLDTDENSPLNPTSPNFRARAWAKSIVEMTSAEGKEFRTSGVCFQNLNVHGFGSATDYQKDVGNVWLEVAGLARKAIGTGQRKIDILRDFDGLVRKGEMLVVLGPPGAGCSTFLKSIAGETSGIYIDDNSYFNYQGIDANEMHTHHRGEAIYTAEVDVHFPMLTVGETLTFAAQARAPRELPEGVDKWQYANHLRDVTMAMFGISHTINTNVGNEYIRGVSGGERKRVTIAEATLSRAPLQCWDNSTRGLDSANAVEFCKTLRTQTELFGNTACVSIYQSPQAAYDYFDKALVLYEGRQIFFGRANEARQYFEKLGFECPARQTTPDFLTSMTSPLERVVRPDFKDKVPRTPDEFAQAWKDSAEYAALQAEIEAYKTEHPIGGPDAVAFRNSRKAQQARGQRAKSPFTLSYTQQINLCLWRGWLRLKGDPSITIGSLIGNFVMSLIVGSVFYNLQPVTSSFFQRGSLLFFACLLNAFASALEILTLYAQRPIVEKHSRYALYHPSAEAVSSMLCDLPYKIVNTIVFNLSLYFLTNLRREPGAFFFYLLFSFVTVLTMSMIFRTIASSSRSLSQALVPAAFLILDLVIFTGFVIPINYMLSWCRWLNYLDPLAYAFESFMVNEFSGREFTCNEFVPSPQISQYANVGAENHICSSVGGVAGSSTVSGDAYIESGFQYSAAHKWRNLGILIAFTIFFLITYMISAELVSEKKSKGEVLVFRRGHKPAQFKEKKGDVEESMGPRVGPVATNVSRASRPIAQNHKEGGAIQESTSVFHWHDVCYDVKIKKETRRILDHVDGWVKPGTLTALMGVSGAGKTTLLDALASRLTTGVITGEMLVDGRSRDTSFQRKTGYVQQQDLHLSTTTVREALNFSAILRQPADVPRQEKLDYVEEVIKLLEMEEYADAVVGILGEGLNVEQRKRLTIGVELAAKPPLLLFVDEPTSGLDSQTSWAILDLLEKLTKAGQAVLCTIHQPSAMLFQRFDQLLFLAKGGKTVYFGEIGENSKTMTSYFESHGAPACPSDANPAEWMLDAIGAAPGSSTDVDWFQTWRDSKEYHAVQAELQRLKDDAPAVPPPTEDDQSYREHAAPFTVQLKEVTYRVFQQYWRTPVYIYSKTALCLIVALFIGFVFFRAPNTQQGLQNQTFAIFNLFTIFGQLVQQTMPHFVVQRSLYEVRERPSKVYGWKVFMLSQIIVEIPWNTLMAVLMFFSWYYPIGLYRNTYIDGATTERGALVFLLLLEFMLFTCTFTDMIIAAFDTAEAGGNVANLLFTLCLIFCGVLARPDQFPHFWIFLYRVSPFTYLASALITAGVANTDVVCANNEYLRFAPPDGMNCMDYLQYQPGGYLTPDSENSMTECVYCAIGSTNGYLTGLGVNYADRWRNFGIIFAYIIFNVFGALFLYWLTRVPKKPKEEKTKKE

SEQ ID NO: 23819 - DNA, 5267 bp, Muscodor strobelii
  misc_feature: SGI EST ID NO. CUFF.56264.1
  misc_feature: Variant of the nucleotide sequence at SEQ ID NO 23817
tacgacccttgtaagcccctgcgagacatatttgacgttgtgagctgcttgttccgaactcgttgttttgttcctactggattcagcaacgtttcgaccgttgccatcttactttctttccttgtatgttaataagattgatcccgaaaagaagtgatatcttcttcctcagccttactcgcaccacattaccgtcacaacaagctcaactgacataatagacttttcattaaagcatcacaacgtcatcgataggatcgcgcaacaatatattggtatcaagtacgggcggttcgaccccactgaaccgccatcatgtccttcctgggcagcgccttctccaattacgaccgcacagcgcagactgcaggttccccaggagtgatgtcgccacatcgcgaggttacaggaggcgagatggaagaagccgtagcagaccacacaactaccgcagagagtgtcacaaaaacgcgtagcacatcagtaacagacacgacagccaagggcagcgaagccgaagcagaaaagaaagttgtaagcagcgatgacagcactgacgatgatgccgccgaactcgaacgtcgtgagtcaagggtacgtgatctggctagaacgtacacgacgcagtcacaagcacactatgcaccgggcacgaacccctatttagataccgacgagaactcacccttaaacccgacatcacctaacttccgcgcccgggcatgggcgaaatcaattgttgaaatgacctcggccgagggcaaagagttcagaacatcgggcgtctgctttcagaacctgaatgtacacggttttggctcagctacggattatcagaaagatgtgggcaacgtctggctggaggttgctggactcgctcgcaaagcaattggcacgggccagaggaagatcgatatcctgcgggactttgatggtttagtccgtaaaggcgagatgttggttgttttgggtcctcccggagcaggatgttcgacctttttgaagtcgattgctggggaaacatctggtatctacatcgacgataattcttatttcaactaccagggaattgatgccaacgagatgcatacccaccatcgtggtgaagccatctacacagccgaggtcgacgttcatttccccatgttgacagtcggtgaaactctcacattcgcggcacaggctcgtgcaccgcgtgaactcccagagggcgttgacaaatggcagtacgccaatcatcttcgagatgtcactatggccatgtttggcatctcccacaccatcaacacaaacgtgggcaacgaatacattcgaggtgtgtctggcggtgagcggaaacgtgtcactattgctgaggccacactcagccgtgcaccgctgcagtgctgggacaacagcacgcgcggtcttgacagtgccaatgccgtagagttttgcaagactctcagaacacagactgagttatttggcaataccgcctgcgtatcaatctatcagtctcctcaagcggcttacgactatttcgacaaggctctggtactatacgaaggccgacagattttcttcggacgggcgaacgaagccagacagtacttcgagaaacttggatttgaatgcccggcacgtcagacgacgcccgatttcttaacatccatgacaagtcctcttgagcgcgtggttcgacccgacttcaaggacaaggtcccgcgcactccagatgagtttgcccaagcatggaaggacagcgccgaatacgctgcccttcaagctgagattgaggcgtacaagacagagcatccaattggtggccccgacgcagtagctttccgtaactcaagaaaggctcagcaagctagaggtcagcgtgccaaatccccattcacgttgtcatacactcagcaaatcaacttatgtctctggcgaggatggcttcggcttaagggcgatcccagtatcactatcggttctttgatcggcaatttcgtcatgtccctcattgtcggcagtgttttctataatttacaacccgtcacatcgagcttctttcaaagaggctctctactgttcttcgcctgtctcctgaatgcattcgctagtgcgcttgaaattcttactctctacgctcaacgtccgattgtcgagaagcactcccgatacgctttgtatcatccttcggccgaagctgtttcctctatgctttgcgacttgccttataaaatcgtaaatacgatcgtgttcaacctgtcactctacttcctgaccaatctccgccgtgaaccgggagcattcttcttttacctcctcttctcgtttgtcactgttttgacaatgagcatgatcttccgaacgattgcgtcttcctcgcggtcgctgtcgcaagcacttgtgccagcggcgttcctcatcttggaccttgtcattttcaccggtttcgtcatcccgatcaattatatgttgagttggtgtcgttggttgaattacttggatccgcttgcttatgctttcgagtctttcatggttaatgaattctctggtcgtgagtttacgtgcaatgagttcgttccatcgccgcaaatttcacagtatgcaaatgtcggggccgaaaaccacatctgttcctcggttggcggtgtcgctggctcatcaaccgtcagtggtgatgcgtatattgagtcgggcttccaatactctgcagcacataagtggagaaacttggggatcctcattgcattcaccattttcttcctaatcacatacatgatatctgctgagctcgtctccgagaagaaatcaaagggagaagtgctcgttttcaggcgtggccacaaacctgctcagttcaaagagaagaaaggcgatgtggaagagagcatgggcccgcgtgtcggacctgttgcaacgaacgtcagtcgggctagtcgacctatcgcccagaaccacaaggaaggaggcgcgattcaagaatcaaccagtgttttccactggcatgacgtatgctatgatgttaagatcaagaaggaaacccgacgcattctcgaccatgttgatgggtgggtcaaacctggaacattgacagctttgatgggtgtttctggtgctggtaaaacgactctactggatgctcttgctagccgacttacaacgggcgtaattacgggtgagatgcttgttgatggccgctctcgtgacacctctttccagcgcaagaccggctatgttcagcaacaagatctgcatttgtctactacgaccgtccgcgaggcactcaacttttccgctatccttcgccagccagctgatgttcccagacaggagaagttggactacgtcgaggaagtcatcaaactattggaaatggaggaatatgctgatgctgttgttggcattcttggcgagggtctcaatgtggaacaacgcaagcgccttaccataggtgtagaacttgctgcgaagccccctctactgctcttcgtcgatgagcctacctctggtcttgactcacaaacctcatgggccattctggatttgcttgagaagcttactaaggctggccaagccgtgctctgtaccatccatcaaccttcggccatgttgttccagcgtttcgaccagttattgttcttggccaagggaggcaagaccgtctattttggcgaaattggtgaaaactcaaagacaatgacctcctatttcgaaagccacggcgcacctgcatgtccatcagacgccaaccctgccgagtggatgttggatgcaatcggtgccgctcctggaagttctacagatgttgattggttccaaacctggcgtgatagcaaggagtaccacgcagtccaagctgaacttcaacgacttaaagatgacgcacccgccgtcccaccaccgaccgaagatgatcaatcataccgtgaacacgccgctcctttcaccgttcaattaaaagaggtcacgtatcgtgtgttccaacagtactggcgaacaccggtttatatttactcgaagactgccttgtgtctgattgttgccctcttcattggctttgtcttcttccgcgcccccaacacacaacagggactgcagaaccagacattcgccattttcaatctctttacaatcttcggacagttagtacagcagacaatgccgcatttcgtggtccaacgctctctctacgaggttcgggagcggccgtctaaggtgtatggctggaaagtcttcatgctttcgcaaatcattgtcgaaataccctggaacacactgatggccgtgttgatgttcttctcctggtactaccctattggactataccggaatacatacatcgacggcgcgacaactgaacgtggtgcccttgttttcctgctacttctcgagttcatgttgttcacttgcacatttaccgacatgatcattgcggctttcgacaccgccgaggcaggtggcaatgtagctaatctcctgttcacgctttgtcttattttctgcggtgttctagcgagaccggatcagttcccccatttctggatcttcctgtacagagtcagcccatttacctacttagcctccgcacttattactgcgggtgtggcaaacacggatgtcgtgtgtgcaaacaacgaatacttgagatttgcgccccccgacggaatgaactgcatggactacctgcaatatcagcccggcggttatctcacgccagattccgagaacagcatgactgaatgcgtgtattgcgcaatcggatcaaccaatggctatcttaccggactgggtgttaattatgccgatcgctggcgcaactttggaatcatcttcgcatacatcattttcaacgtattcggcgcactgtttttgtactggctcacccgtgtaccaaagaagcccaaggaggagaagaccaagaaagaataaggaagaaacgacgtgtagatgagattcgtgttacatattgatattagaaggattgagttccgggacatgcttggtgtttagatgggttgttttaggactcttaataattcgttgcgttacaacgcagataatttcctatgttgggagataccggaagatggatgttgagacactgtaggctgaagaggaactgcacatagatggaaatgacttgaggagacaagattagatggatggtacctgcatgtatctggcgttagtcctgtctgctttcaattgaagcctttcaatacaggtaacaatcagctttgttctaagcgtaaggtactccaggcgtgtagcgggctttgatgcta

SEQ ID NO: 23820 - DNA, 384 bp, Muscodor strobelii
  misc_feature: SGI cDNA ID NO. 568110
  misc_feature: Reduced expression when VOC is produced
  misc_feature: Encodes the peptide sequence at SEQ ID NO 23821
atggccgaagacaagacccaccatatcacctcctcatcagagctgcagacgctcttcgaaaacacgacttatgtcgcggtagacttctttgcagattggtgtccgccatgcaaatcaatcgcgccgatctacgcgagcttagcagggaagcacagtgtgcctggtgtcctggcctttgctaaagtgaatgtggaccatgtacaggaagtggcgcggacctacggcatcacagccatgccgacattcatgttcttcaaagaaggtcgtcaggtcgctgtcaatgggcaggctgtcatgcagggtgccgatccgaggacgctcagtgctgctgctgagaagctgggtgggctggcacagaagcgggttgcggcagcgaaggcatga

SEQ ID NO: 23821 - protein, 127 aa, Muscodor strobelii
  misc_feature: SGI Peptide ID NO. 568110
  misc_feature (5)..(114): Pfam Id: PF00085 Pfam Desc: Thioredoxin
  misc_feature (25)..(114): Pfam Id: PF00085 Pfam Desc: Thioredoxin
  misc_feature (7)..(125): NCBI GI: 46111043 Blast Desc: FG02403.1 [Gibberella zeae PH-1]
  misc_feature (7)..(125): NCBI GI: 52783462 Blast Desc: THIO_FUSCU RecName: Full=Thioredoxin-like protein; AltName: Allergen=Fus c 2 gi|19879659|gb|AAL79931.1| thioredoxin-like protein [Fusarium culmorum]
  misc_feature (7)..(127): NCBI GI: 256725897 Blast Desc: [Nectria haematococca mpVI 77-13-4]
  misc_feature (4)..(125): NCBI GI: 85109377 Blast Desc: thioredoxin I [Neurospora crassa OR74A] gi|1174686|sp|P42115.1|THIO_NEUCR RecName: Full=Thioredoxin; Short=Trx gi|665590|dbj|BAA08305.1| thioredoxin [Neurospora I
  misc_feature (4)..(117): NCBI GI: 171681196 Blast Desc: protein product [Podospora anserina] gi|170940556|emb|CAP65784.1| protein product [Podospora anserina]
  misc_feature (8)..(117): NCBI GI: 116191169 Blast Desc: CHGG_05302 [Chaetomium globosum CBS 148.51] gi|88181215|gb|EAQ88683.1| CHGG_05302 [Chaetomium globosum CBS 148.51]
  misc_feature (5)..(114): NCBI GI: 46124497 Blast Desc: FG06626.1 [Gibberella zeae PH-1]
  misc_feature (8)..(125): NCBI GI: 70994138 Blast Desc: thioredoxin [Aspergillus fumigatus Af293] gi|66849550|gb|EAL89878.1| thioredoxin, [Aspergillus fumigatus Af293] gi|159125169|gb|EDP50286.1| thioredoxin, [Aspergillus
  misc_feature (8)..(125): NCBI GI: 119500714 Blast Desc: thioredoxin, [Neosartorya fischeri NRRL 181] gi|119415279|gb|EAW25217.1| thioredoxin, [Neosartorya fischeri NRRL 181]
  misc_feature (8)..(120): NCBI GI: 171680974 Blast Desc: protein product [Podospora anserina] gi|34100317|gb|AAL77221.2| cytosolic thioredoxin I [Podospora anserina] gi|170940445|emb|CAP65672.1| protein product [Podospora
  misc_feature (9)..(100): SWISSPROT Homolog: EC 3.5.1.52 Peptide-N(4)-(N-acetyl-beta-glucosaminyl)asparagine amidase
  misc_feature: Useful for introducing or modulating the production of volatile compounds
MAEDKTHHITSSSELQTLFENTTYVAVDFFADWCPPCKSIAPIYASLAGKHSVPGVLAFAKVNVDHVQEVARTYGITAMPTFMFFKEGRQVAVNGQAVMQGADPRTLSAAAEKLGGLAQKRVAAAKA

SEQ ID NO: 23822 - DNA, 3621 bp, Muscodor strobelii
  misc_feature: SGI EST ID NO. CUFF.56276.0
  misc_feature: Variant of the nucleotide sequence at SEQ ID NO 23820
aacgaatgtaagttccagctcatagaaatcgaggtgatcatcacgaagccttaggtcttctaagttgaatcaacttcagtcatatattttaatacattattaccagctatcaatctttcgcaagtaatttctcaacaaacaattttccagagataaggagagaagaaacttctagaggaccaacataatggccgaagacaagacccaccatatcacctcctcatcagagctgcagacgctcttcgaaaacacgacttatgtcgcggtagacttctttgcagattggtgtccgccatgcaaatcaatcgcgccgatctacgcgagcttagcagggaagcacagtgtgcctggtgtcctggcctttgctaaagtgaatgtggaccatgtacaggaagtggcgcggacctacggcatcacagccatgccgacattcatgttcttcaaagaaggtcgtcaggtcgctgtcaatgggcaggctgtcatgcagggtgccgatccgaggacgctcagtgctgctgctgagaagctgggtgggctggcacagaagcgggttgcggcagcgaaggcatgatacgaacacaggtatcaagttcaaggaagcggtccaattgagatcttaaatgagcgaagagagaatgatattcctatcatgaacacaatcagtctcatcgattattcaacagtgtcttctcacagctccaacggtcaccttagctggctcgagatactggtttcgcgagtgtaccggctacgcaaagacatagtacgtggtctctaggtcacggcataaacatgtgacgtaccagttgagcactgcacacatgctgcgttaaagcggccgaaacggcgacgaccgatcgcgaacgtagtcttatggctaattactacatgtagccagtccagcatgtgtccagacatatttcgaggtcgtattcaaagcatagccagaatatcaagagtccaccagagagggagcgtgtgtcatcttacccattgcccgctattgtatgtttctagggtatttggtctctaatcagcattctcgtaaatttgatccatacgttaaatgcctttgatgaaagcaaagcgtgctaatcttcatagtgatgggcctatgtatacaatgatcactcaagctccagatcattcaagtcaacatctttcctcttgattatctccccatgcatagcaccatgcacgtaggtctcgccaataaattggtatcgacctgattctaaggggcgtagagcataaggcactctaccgcctgcgagcacccaaacttcgtcattctctcgagtggtaagaggtgcattcccgaagtactcattatcagtgcggaatactctccttccgttgctgaagcgccccatcagcctcctgtactctctagcccaatgagacgttgacggcgactttaatgaggacgaatctatatcgttgggaacttcgaccttcatctttgccgctgcgtcactgcttgcggatttctcttcaggaaagtgacgattcatggcctgctcgtactgtgattctgctcgacgctgaggtcccttgaaaggctgcgcaagaatcatgtctgcttctgctgtcaagtgtggatagccttcgccaggaactaagtcatcttctgtccgttttgatgtagtgttctcggattctctgtcgctattattctgaactgacattacttcctcgggcgaggtcttagcctcgatctcttcatgttcagactcagacttagtctcatttcctgaatccttcgtggcctcttcgaatagcggcatataactcatgatgatgcgattccattcagcctcattatcggaattacgaaacttggaatgcgcgtcgattgctgcagatctcattttacttatccatatttcttcaaaaaatgttctgccaagatctggagcagggtaaagacggggcgtgcagtcggctattaacgttcgccacaatacctctgctcttttctgtgggcgtgaagaccaagggtagagttcgggcagccgggtggcaactacagcggctcttgagatggagaactcataacctgacccctcagctaaatcggctatcactcctactcgggcgccttgcacttgaagccgggttccgtagagattctcttggcagggaacctgccagcgcaacccagctcctgcatcccacttctcgtgaatgaatgcgtgaagttcatgcatgtgtgtcgccttggttctgtcccaatacggcacccacgaaggtaagatgccttccgttgggtttgacagtgtgatgtcatctggttttgggtgatcaactcgagataaaaggtccaggttgttgctcgagaggagaaggtaccaggcggcttgtaaaaatacatctccagtggagaatttactgtagtctggcacgatctcctgcctttcatgactgggatccgtggctcggaagtagggcaacttggcgacctctaggaaggcatagatcttgtcccttgggtcagtgcacatagtttcccggccttggtcaagtagtttgagaaaacgaaggccatgtccgagagctgagcggctggacagcatgggaggagtttcctggcgactctcaagtcgggtttgatccaatgataggaagtaagaaactgaattcacctttcctctctctgtagagataaaaaggcttcgctcagagtcgtctctgtcctccaacatcgcctttggcccaagattaccgtatatcttcaagtccgtgatggccttccccgatatctcccacatggcattctggtcgatggtctcatctaagtggagtttatacatggcctgacacgctgccgcgattccatgccaaggaaacatcagggttccgcacatgagtgttatctttctcgaaactatgaattcttgccgtatccaggtacgatgaaaccaagaacggttcaagaatgcgaagacgggccaccaagcagctgaccaaacgtcagggaggccgatatcctctcccttgaaccccgatggcttgttatgaagagccgttgtttgctcatcatctagcgacccgagcttaagcagtaactgcagcgctggcctgacaaactcgtcttccggacctagccagatgcatagtccttcagtgtgctgataaatagagcccatcatcgctacttgtgcgcttcgctcatctagatctggctggttgatggacaatgcgtcgatccagagcgcatcaggtatgaatatattgttctctgagatgaccttcgtacgcgcatcacctttgtcgttatgcgccttgagcatcttataccacacgatgagccattcgtacaagttgtctgccactgacagaccccggccgttgcataaaatggttcttcgcggccccggatcatcacgtctttttcggtccaggtcacgctcttcggcggagctgaaaacagtacacgctggactccatgtgtatgacagagcgccgaacgcgggattgtcattgaggtcgaccgtctcaagggatatggagatgcgccgaggcgatgatgcgggtagcagtatgcgtgctatccggatcgatgttggtgtaggaaggggttcgtattgataaaattcttccatctttcctaatcatatt

SEQ ID NO: 23823 - DNA, 1644 bp, Muscodor strobelii
  misc_feature: SGI cDNA ID NO. 568111
  misc_feature: Encodes the peptide sequence at SEQ ID NO 23824
atgtgggagatatcggggaaggccatcacggacttgaagatatacggtaatcttgggccaaaggcgatgttggaggacagagacgactctgagcgaagcctttttatctctacagagagaggaaaggtgaattcagtttcttacttcctatcattggatcaaacccgacttgagagtcgccaggaaactcctcccatgctgtccagccgctcagctctcggacatggccttcgttttctcaaactacttgaccaaggccgggaaactatgtgcactgacccaagggacaagatctatgccttcctagaggtcgccaagttgccctacttccgagccacggatcccagtcatgaaaggcaggagatcgtgccagactacagtaaattctccactggagatgtatttttacaagccgcctggtaccttctcctctcgagcaacaacctggaccttttatctcgagttgatcacccaaaaccagatgacatcacactgtcaaacccaacggaaggcatcttaccttcgtgggtgccgtattgggacagaaccaaggcgacacacatgcatgaacttcacgcattcattcacgagaagtgggatgcaggagctgggttgcgctggcaggttccctgccaagagaatctctacggaacccggcttcaagtgcaaggcgcccgagtaggagtgatagccgatttagctgaggggtcaggttatgagttctccatctcaagagccgctgtagttgccacccggctgcccgaactctacccttggtcttcacgcccacagaaaagagcagaggtattgtggcgaacgttaatagccgactgcacgccccgtctttaccctgctccagatcttggcagaacattttttgaagaaatatggataagtaaaatgagatctgcagcaatcgacgcgcattccaagtttcgtaattccgataatgaggctgaatggaatcgcatcatcatgagttatatgccgctattcgaagaggccacgaaggattcaggaaatgagactaagtctgagtctgaacatgaagagatcgaggctaagacctcgcccgaggaagtaatgtcagttcagaataatagcgacagagaatccgagaacactacatcaaaacggacagaagatgacttagttcctggcgaaggctatccacacttgacagcagaagcagacatgattcttgcgcagcctttcaagggacctcagcgtcgagcagaatcacagtacgagcaggccatgaatcgtcactttcctgaagagaaatccgcaagcagtgacgcagcggcaaagatgaaggtcgaagttcccaacgatatagattcgtcctcattaaagtcgccgtcaacgtctcattgggctagagagtacaggaggctgatggggcgcttcagcaacggaaggagagtattccgcactgataatgagtacttcgggaatgcacctcttaccactcgagagaatgacgaagtttgggtgctcgcaggcggtagagtgccttatgctctacgccccttagaatcaggtcgataccaatttattggcgagacctacgtgcatggtgctatgcatggggagataatcaagaggaaagatgttgacttgaatgatctggagcttgagtga

SEQ ID NO: 23824 - protein, 547 aa, Muscodor strobelii
  misc_feature: SGI Peptide ID NO. 568111
  misc_feature (44)..(529): NCBI GI: 256720270 Blast Desc: NECHADRAFT_98362 [Nectria haematococca mpVI 77-13-4]
  misc_feature (474)..(535): NCBI GI: 189197041 Blast Desc: conserved [Pyrenophora tritici-repentis Pt-1C-BFP] gi|187980806|gb|EDU47432.1| conserved [Pyrenophora tritici-repentis Pt-1C-BFP]
  misc_feature (79)..(302): NCBI GI: 189197041 Blast Desc: conserved [Pyrenophora tritici-repentis Pt-1C-BFP] gi|187980806|gb|EDU47432.1| conserved [Pyrenophora tritici-repentis Pt-1C-BFP]
  misc_feature (471)..(547): NCBI GI: 156043026 Blast Desc: SS1G_11313 [Sclerotinia sclerotiorum 1980] gi|154695697|gb|EDN95435.1| SS1G_11313 [Sclerotinia sclerotiorum 1980]
  misc_feature (474)..(546): NCBI GI: 169780508 Blast Desc: [Aspergillus oryzae RIB40] gi|83773458|dbj|BAE63585.1| protein product [Aspergillus oryzae]
  misc_feature (474)..(546): NCBI GI: 238505332 Blast Desc: Ankyrin and HET domain protein [Aspergillus flavus NRRL3357] gi|220690009|gb|EED46359.1| Ankyrin and HET domain protein [Aspergillus flavus NRRL3357]
  misc_feature (473)..(547): NCBI GI: 154313282 Blast Desc: BC1G_05338 [Botryotinia fuckeliana B05.10] gi|150849407|gb|EDN24600.1| BC1G_05338 [Botryotinia fuckeliana B05.10]
  misc_feature (474)..(546): NCBI GI: 115401102 Blast Desc: [Aspergillus terreus NIH2624] gi|114190080|gb|EAU31780.1| [Aspergillus terreus NIH2624]
  misc_feature (460)..(532): NCBI GI: 168037338 Blast Desc: [Physcomitrella patens subsp. patens] gi|162677541|gb|EDQ64010.1| [Physcomitrella patens subsp. patens]
  misc_feature (474)..(538): NCBI GI: 115389026 Blast Desc: [Aspergillus terreus NIH2624] gi|114194414|gb|EAU36114.1| [Aspergillus terreus NIH2624]
MWEISGKAITDLKIYGNLGPKAMLEDRDDSERSLFISTERGKVNSVSYFLSLDQTRLESRQETPPMLSSRSALGHGLRFLKLLDQGRETMCTDPRDKIYAFLEVAKLPYFRATDPSHERQEIVPDYSKFSTGDVFLQAAWYLLLSSNNLDLLSRVDHPKPDDITLSNPTEGILPSWVPYWDRTKATHMHELHAFIHEKWDAGAGLRWQVPCQENLYGTRLQVQGARVGVIADLAEGSGYEFSISRAAVVATRLPELYPWSSRPQKRAEVLWRTLIADCTPRLYPAPDLGRTFFEEIWISKMRSAAIDAHSKFRNSDNEAEWNRIIMSYMPLFEEATKDSGNETKSESEHEEIEAKTSPEEVMSVQNNSDRESENTTSKRTEDDLVPGEGYPHLTAEADMILAQPFKGPQRRAESQYEQAMNRHFPEEKSASSDAAAKMKVEVPNDIDSSSLKSPSTSHWAREYRRLMGRFSNGRRVFRTDNEYFGNAPLTTRENDEVWVLAGGRVPYALRPLESGRYQFIGETYVHGAMHGEIIKRKDVDLNDLELE

SEQ ID NO: 23825 - DNA, 2478 bp, Muscodor strobelii
  misc_feature: SGI cDNA ID NO. 568112
  misc_feature: Encodes the peptide sequence at SEQ ID NO 23826
atggaagaattttatcaatacgaaccccttcctacaccaacatcgatccggatagcacgcatactgctacccgcatcatcgcctcggcgcatctccatatcccttgagacggtcgacctcaatgacaatcccgcgttcggcgctctgtcatacacatggagtccagcgtgtactgttttcagctccgccgaagagcgtgacctggaccgaaaaagacgtgatgatccggggccgcgaagaaccattttatgcaacggccggggtctgtcagtggcagacaacttgtacgaatggctcatcgtgtggtataagatgctcaaggcgcataacgacaaaggtgatgcgcgtacgaaggtcatctcagagaacaatatattcatacctgatgcgctctggatcgacgcattgtccatcaaccagccagatctagatgagcgaagcgcacaagtagcgatgatgggctctatttatcagcacactgaaggactatgcatctggctaggtccggaagacgagtttgtcaggccagcgctgcagttactgcttaagctcgggtcgctagatgatgagcaaacaacggctcttcataacaagccatcggggttcaagggagaggatatcggcctccctgacgtttggtcagctgcttggtggcccgtcttcgcattcttgaaccgttcttggtttcatcgtacctggatacggcaagaattcatagtttcgagaaagataacactcatgtgcggaaccctgatgtttccttggcatggaatcgcggcagcgtgtcaggccatgtataaactccacttagatgagaccatcgaccagaatgccatgtgggagatatcggggaaggccatcacggacttgaagatatacggtaatcttgggccaaaggcgatgttggaggacagagacgactctgagcgaagcctttttatctctacagagagaggaaaggtgaattcagtttcttacttcctatcattggatcaaacccgacttgagagtcgccaggaaactcctcccatgctgtccagccgctcagctctcggacatggccttcgttttctcaaactacttgaccaaggccgggaaactatgtgcactgacccaagggacaagatctatgccttcctagaggtcgccaagttgccctacttccgagccacggatcccagtcatgaaaggcaggagatcgtgccagactacagtaaattctccactggagatgtatttttacaagccgcctggtaccttctcctctcgagcaacaacctggaccttttatctcgagttgatcacccaaaaccagatgacatcacactgtcaaacccaacggaaggcatcttaccttcgtgggtgccgtattgggacagaaccaaggcgacacacatgcatgaacttcacgcattcattcacgagaagtgggatgcaggagctgggttgcgctggcaggttccctgccaagagaatctctacggaacccggcttcaagtgcaaggcgcccgagtaggagtgatagccgatttagctgaggggtcaggttatgagttctccatctcaagagccgctgtagttgccacccggctgcccgaactctacccttggtcttcacgcccacagaaaagagcagaggtattgtggcgaacgttaatagccgactgcacgccccgtctttaccctgctccagatcttggcagaacattttttgaagaaatatggataagtaaaatgagatctgcagcaatcgacgcgcattccaagtttcgtaattccgataatgaggctgaatggaatcgcatcatcatgagttatatgccgctattcgaagaggccacgaaggattcaggaaatgagactaagtctgagtctgaacatgaagagatcgaggctaagacctcgcccgaggaagtaatgtcagttcagaataatagcgacagagaatccgagaacactacatcaaaacggacagaagatgacttagttcctggcgaaggctatccacacttgacagcagaagcagacatgattcttgcgcagcctttcaagggacctcagcgtcgagcagaatcacagtacgagcaggccatgaatcgtcactttcctgaagagaaatccgcaagcagtgacgcagcggcaaagatgaaggtcgaagttcccaacgatatagattcgtcctcattaaagtcgccgtcaacgtctcattgggctagagagtacaggaggctgatggggcgcttcagcaacggaaggagagtattccgcactgataatgagtacttcgggaatgcacctcttaccactcgagagaatgacgaagtttgggtgctcgcaggcggtagagtgccttatgctctacgccccttagaatcaggtcgataccaatttattggcgagacctacgtgcatggtgctatgcatggggagataatcaagaggaaagatgttgacttgaatgatctggagcttgagtga

SEQ ID NO: 23826 - protein, 825 aa, Muscodor strobelii
  misc_feature: SGI Peptide ID NO. 568112
  misc_feature (131)..(237): Pfam Id: PF06985 Pfam Desc: Heterokaryon incompatibility protein (HET)
  misc_feature (5)..(580): NCBI GI: 189197041 Blast Desc: conserved [Pyrenophora tritici-repentis Pt-1C-BFP] gi|187980806|gb|EDU47432.1| conserved [Pyrenophora tritici-repentis Pt-1C-BFP]
  misc_feature (4)..(807): NCBI GI: 256720270 Blast Desc: NECHADRAFT_98362 [Nectria haematococca mpVI 77-13-4]
  misc_feature (10)..(615): NCBI GI: 154313282 Blast Desc: BC1G_05338 [Botryotinia fuckeliana B05.10] gi|150849407|gb|EDN24600.1| BC1G_05338 [Botryotinia fuckeliana B05.10]
  misc_feature (20)..(631): NCBI GI: 156043030 Blast Desc: SS1G_11315 [Sclerotinia sclerotiorum 1980] gi|154695699|gb|EDN95437.1| SS1G_11315 [Sclerotinia sclerotiorum 1980]
  misc_feature (3)..(579): NCBI GI: 116205716 Blast Desc: CHGG_02151 [Chaetomium globosum CBS 148.51] gi|88182748|gb|EAQ90216.1| CHGG_02151 [Chaetomium globosum CBS 148.51]
  misc_feature (6)..(456): NCBI GI: 256729009 Blast Desc: NECHADRAFT_79858 [Nectria haematococca mpVI 77-13-4]
  misc_feature (5)..(265): NCBI GI: 171678233 Blast Desc: protein product [Podospora anserina] gi|170937186|emb|CAP61843.1| protein product [Podospora anserina]
  misc_feature (1)..(458): NCBI GI: 256721799 Blast Desc: NECHADRAFT_53281 [Nectria haematococca mpVI 77-13-4]
  misc_feature (2)..(598): NCBI GI: 156043026 Blast Desc: SS1G_11313 [Sclerotinia sclerotiorum 1980] gi|154695697|gb|EDN95435.1| SS1G_11313 [Sclerotinia sclerotiorum 1980]
  misc_feature (13)..(235): NCBI GI: 169606194 Blast Desc: SNOG_06133 [Phaeosphaeria nodorum SN15] gi|111064844|gb|EAT85964.1| SNOG_06133 [Phaeosphaeria nodorum SN15]
MEEFYQYEPLPTPTSIRIARILLPASSPRRISISLETVDLNDNPAFGALSYTWSPACTVFSSAEERDLDRKRRDDPGPRRTILCNGRGLSVADNLYEWLIVWYKMLKAHNDKGDARTKVISENNIFIPDALWIDALSINQPDLDERSAQVAMMGSIYQHTEGLCIWLGPEDEFVRPALQLLLKLGSLDDEQTTALHNKPSGFKGEDIGLPDVWSAAWWPVFAFLNRSWFHRTWIRQEFIVSRKITLMCGTLMFPWHGIAAACQAMYKLHLDETIDQNAMWEISGKAITDLKIYGNLGPKAMLEDRDDSERSLFISTERGKVNSVSYFLSLDQTRLESRQETPPMLSSRSALGHGLRFLKLLDQGRETMCTDPRDKIYAFLEVAKLPYFRATDPSHERQEIVPDYSKFSTGDVFLQAAWYLLLSSNNLDLLSRVDHPKPDDITLSNPTEGILPSWVPYWDRTKATHMHELHAFIHEKWDAGAGLRWQVPCQENLYGTRLQVQGARVGVIADLAEGSGYEFSISRAAVVATRLPELYPWSSRPQKRAEVLWRTLIADCTPRLYPAPDLGRTFFEEIWISKMRSAAIDAHSKFRNSDNEAEWNRIIMSYMPLFEEATKDSGNETKSESEHEEIEAKTSPEEVMSVQNNSDRESENTTSKRTEDDLVPGEGYPHLTAEADMILAQPFKGPQRRAESQYEQAMNRHFPEEKSASSDAAAKMKVEVPNDIDSSSLKSPSTSHWAREYRRLMGRFSNGRRVFRTDNEYFGNAPLTTRENDEVWVLAGGRVPYALRPLESGRYQFIGETYVHGAMHGEIIKRKDVDLNDLELE

SEQ ID NO: 23827 - DNA, 2850 bp, Muscodor strobelii
  misc_feature: SGI cDNA ID NO. 568113
  misc_feature: Elevated expression when VOC is produced
  misc_feature: Encodes the peptide sequence at SEQ ID NO 23828
atggccgctgctgaagagaactcaaagtttacattcaagctccccgaccgatatcgcgacagatacaagactgttgatgcgttgaaagatgttaaacgcaacctggtgttagcttcgggaacgtcgacacggaaacaggactcagaaggactagctgaatgcgtacccaaggcaggagtctgtgtcgagagcgacaacgatcaagacctaagagaaggcgacgcctcatgctttattgttgattctgatgtcgtcgaatctcttctagatattgctgcatcgctgcagcttcgcgatcaagccgggaagctttctaccgataacttttccgtcaggcttgtttctctaatgagacgcggccaacctttcttggacgagattgttgctcacgtggctaaagaattgagttccaacctcatttcatttgggcaacgtgatctagaggagattgcggttgacttttacgaccaagagcaaagagctattcgagatggtctgcttcccaaactggaggacggcgacgacgagcctgatttgaatacattcaacggccttccggacttctactttgctcagagagcggtccgcaaaacgaatgagaaaagcttcaaccgatgtatggatgcattctctggacttctcagcaatcctcatgttgcaaacgcatacgatggagctgctacggagcatcgcgatgaagttatctcgaaatctgaaatcaaagactctgctgtcgaagagataagcgtaacttcggacgcagcattgccagctcctggtgctgatgaagataaggattctgattccctaaccccaacaacctccgcagtacggagcccaccgacaatagttcacatcagagatggaggcagcgtaatgaacgagtcgccctatgggagaaggctgatcaggaggttcagagacgccgtcaagatacgccgcgaaaaaggtgaaaacttaatcatcttgatatctgtcgcacacaccgccacgaacgatggtaaagtcaacactccagatccgaaggagtgctggaaggtagagagctgccgatgttggatttgcaaatgcgatgacaaactgaattgcactcgtcgttcgtgtgaacttgggatgataaggcggaagttggatacgaccgagatctacacgaaactcctgatgccatcggcagtacctaaggactggccaggaccgattgatcatcctcctgagaaacgcatgctcaattggaacacgggatatttcaagcgccgattgcgctcgaaactctctcattacgaaatgacaccggctactctacttgaagacacctacgactggtcagagttccttagtcaggacgtaacaagctacctaggttccaaaatagactgggatgaagagattgtttcgaacgcaatgatcccagttattgggaggtgtgtgagaacgcgaaagctacaagcggaggatgtccaaatgcttctggcacgtgtcagaccagccgatacatccgatgaggaccatgctaccgaaaaggaggcagcgaaagaagataaagaagatcccgcggaggcggagcaaaaggcttggaagaagaagattgacgagatcgaagaggcttgcagtaagaaagaaaaagagctcctgactcatgttgtcaacccggccgaactcagatcatcgtttgacgatgtggtactcgaccaagaggtcatcgatagcatcaagacccttgtctttttgtctcggcttcaaacagaaggagcatcgcaagctctcctctcccagatcaagatacgaggcgttttgctgtacggcccaccaggaacaggcaagacccatttggcaagggccgtagctaagagctcgggttcccatatgctcgtacttaatggctcaaccatcacgagttgctgggttggcgaaacatcgaaatacatcaatgccgctttcagcttggctaagaagctacatccctgcattatcttcattgacgaagtcgattcactgttctatcggcgaagtggtgacaacaagtcttgggagcgggcagctctcacgcagtttcttcaggaaatggatgggataactcaaacgaataatgcccccttcgttttagttgcgacgaataggccaagtgacctcgacagcgctttcattcgccgattgccacagagaatccccttcgggttaccgaatgtcaaggcacgcgcggacattctgagaacactcctcaaagaggatgacttggatggcgttaatatcgaagacctagcggcattgactgagggctattctggttccgatctgaagagtctatgcggcgaagccggcttgatgtgggcaatagagcaacagctcggactaaaggacccagcgaagaaggcttatcagccggtcgcagaaattccaaaggatgattcaccaactccaaaagagcaggagagccctgatgatcaattgccttctagctctccaagcagcgacacgagcgtttcctctactaattcctctacatcgccgtcttctggtgtctcaacgcccaacacctccgctgccgacaacgatgaaacagcttcggacgaagaaccaaagctcaagcttcttctcacaaacgcccacttcgtcaaagctctaaataagataaagcctagcgtatcagcacaagatatgaatgcaatggaggatttccatcgcaagtttaattctggcaagagctctaactcggcttcgtcgtccaaaatattggagaaactgagcaagccaagtgattctctagagaagaaggctgcgacgttcaatcggcgcctccaaccacttcatcccgcggatgtgaacgttctgaagacaagcaagtggggatag

SEQ ID NO: 23828 - protein, 949 aa, Muscodor strobelii
  misc_feature: SGI Peptide ID NO. 568113
  misc_feature (596)..(778): Pfam Id: PF00004 Pfam Desc: ATPase family associated with various cellular activities (AAA)
  misc_feature (127)..(911): NCBI GI: 145230387 Blast Desc: An01g10850 [Aspergillus niger] gi|134055619|emb|CAK37265.1| protein product [Aspergillus niger]
  misc_feature (595)..(780): NCBI GI: 256720402 Blast Desc: NECHADRAFT_55976 [Nectria haematococca mpVI 77-13-4]
  misc_feature (458)..(775): NCBI GI: 145607716 Blast Desc: MGG_10118 [Magnaporthe grisea 70-15] gi|145015240|gb|EDJ99776.1| MGG_10118 [Magnaporthe grisea 70-15]
  misc_feature (253)..(900): NCBI GI: 169608470 Blast Desc: SNOG_07313 [Phaeosphaeria nodorum SN15] gi|160701649|gb|EAT84779.2| SNOG_07313 [Phaeosphaeria nodorum SN15]
  misc_feature (505)..(897): NCBI GI: 189198654 Blast Desc: ATPase family AAA domain-containing protein 1-A [Pyrenophora tritici-repentis Pt-1C-BFP] gi|187982763|gb|EDU48251.1| ATPase family AAA domain-containing
  misc_feature (537)..(798): NCBI GI: 116204757 Blast Desc: CHGG_10262 [Chaetomium globosum CBS 148.51] gi|88176390|gb|EAQ83858.1| CHGG_10262 [Chaetomium globosum CBS 148.51]
  misc_feature (503)..(782): NCBI GI: 261354874 Blast Desc: spastin [Verticillium albo-atrum VaMs.102]
  misc_feature (123)..(793): NCBI GI: 261195270 Blast Desc: mitochondrial AAA ATPase [Ajellomyces dermatitidis SLH14081] gi|239587911|gb|EEQ70554.1| mitochondrial AAA ATPase [Ajellomyces dermatitidis SLH14081] gi|239610599|gb|EEQ87586.1|
  misc_feature (405)..(780): NCBI GI: 226286674 Blast Desc: ATPase family AAA domain-containing protein [Paracoccidioides brasiliensis Pb18]
  misc_feature (405)..(774): NCBI GI: 225684762 Blast Desc: proteasome-activating nucleotidase [Paracoccidioides brasiliensis Pb03]
  misc_feature: Useful for introducing or modulating the production of volatile compounds
MAAAEENSKFTFKLPDRYRDRYKTVDALKDVKRNLVLASGTSTRKQDSEGLAECVPKAGVCVESDNDQDLREGDASCFIVDSDVVESLLDIAASLQLRDQAGKLSTDNFSVRLVSLMRRGQPFLDEIVAHVAKELSSNLISFGQRDLEEIAVDFYDQEQRAIRDGLLPKLEDGDDEPDLNTFNGLPDFYFAQRAVRKTNEKSFNRCMDAFSGLLSNPHVANAYDGAATEHRDEVISKSEIKDSAVEEISVTSDAALPAPGADEDKDSDSLTPTTSAVRSPPTIVHIRDGGSVMNESPYGRRLIRRFRDAVKIRREKGENLIILISVAHTATNDGKVNTPDPKECWKVESCRCWICKCDDKLNCTRRSCELGMIRRKLDTTEIYTKLLMPSAVPKDWPGPIDHPPEKRMLNWNTGYFKRRLRSKLSHYEMTPATLLEDTYDWSEFLSQDVTSYLGSKIDWDEEIVSNAMIPVIGRCVRTRKLQAEDVQMLLARVRPADTSDEDHATEKEAAKEDKEDPAEAEQKAWKKKIDEIEEACSKKEKELLTHVVNPAELRSSFDDVVLDQEVIDSIKTLVFLSRLQTEGASQALLSQIKIRGVLLYGPPGTGKTHLARAVAKSSGSHMLVLNGSTITSCWVGETSKYINAAFSLAKKLHPCIIFIDEVDSLFYRRSGDNKSWERAALTQFLQEMDGITQTNNAPFVLVATNRPSDLDSAFIRRLPQRIPFGLPNVKARADILRTLLKEDDLDGVNIEDLAALTEGYSGSDLKSLCGEAGLMWAIEQQLGLKDPAKKAYQPVAEIPKDDSPTPKEQESPDDQLPSSSPSSDTSVSSTNSSTSPSSGVSTPNTSAADNDETASDEEPKLKLLLTNAHFVKALNKIKPSVSAQDMNAMEDFHRKFNSGKSSNSASSSKILEKLSKPSDSLEKKAATFNRRLQPLHPADVNVLKTSKWG

SEQ ID NO: 23829 - DNA, 3428 bp, Muscodor strobelii
  misc_feature: SGI EST ID NO. CUFF.56045.0
  misc_feature: Variant of the nucleotide sequence at SEQ ID NO 23827
agagcccctaatactttagcacaaaacttttagaccttttgatacacaattctgaatgagttatgaccaagaataacaccagtccttcgttcacaatggccgctgctgaagagaactcaaagtttacattcaagctccccgaccgatatcgcgacagatacaagactgttgatgcgttgaaagatgttaaacgcaacctggtgttagcttcgggaacgtcgacacggaaacaggactcagaaggactagctgaatgcgtacccaaggcaggagtctgtgtcgagagcgacaacgatcaagacctaagagaaggcgacgcctcatgctttattgttgattctgatgtcgtcgaatctcttctagatattgctgcatcgctgcagcttcgcgatcaagccgggaagctttctaccgataacttttccgtcaggcttgtttctctaatgagacgcggccaacctttcttggacgagattgttgctcacgtggctaaagaattgagttccaacctcatttcatttgggcaacgtgatctagaggagattgcggttgacttttacgaccaagagcaaagagctattcgagatggtctgcttcccaaactggaggacggcgacgacgagcctgatttgaatacattcaacggccttccggacttctactttgctcagagagcggtccgcaaaacgaatgagaaaagcttcaaccgatgtatggatgcattctctggacttctcagcaatcctcatgttgcaaacgcatacgatggagctgctacggagcatcgcgatgaagttatctcgaaatctgaaatcaaagactctgctgtcgaagagataagcgtaacttcggacgcagcattgccagctcctggtgctgatgaagataaggattctgattccctaaccccaacaacctccgcagtacggagcccaccgacaatagttcacatcagagatggaggcagcgtaatgaacgagtcgccctatgggagaaggctgatcaggaggttcagagacgccgtcaagatacgccgcgaaaaaggtgaaaacttaatcatcttgatatctgtcgcacacaccgccacgaacgatggtaaagtcaacactccagatccgaaggagtgctggaaggtagagagctgccgatgttggatttgcaaatgcgatgacaaactgaattgcactcgtcgttcgtgtgaacttgggatgataaggcggaagttggatacgaccgagatctacacgaaactcctgatgccatcggcagtacctaaggactggccaggaccgattgatcatcctcctgagaaacgcatgctcaattggaacacgggatatttcaagcgccgattgcgctcgaaactctctcattacgaaatgacaccggctactctacttgaagacacctacgactggtcagagttccttagtcaggacgtaacaagctacctaggttccaaaatagactgggatgaagagattgtttcgaacgcaatgatcccagttattgggaggtgtgtgagaacgcgaaagctacaagcggaggatgtccaaatgcttctggcacgtgtcagaccagccgatacatccgatgaggaccatgctaccgaaaaggaggcagcgaaagaagataaagaagatcccgcggaggcggagcaaaaggcttggaagaagaagattgacgagatcgaagaggcttgcagtaagaaagaaaaagagctcctgactcatgttgtcaacccggccgaactcagatcatcgtttgacgatgtggtactcgaccaagaggtcatcgatagcatcaagacccttgtctttttgtctcggcttcaaacagaaggagcatcgcaagctctcctctcccagatcaagatacgaggcgttttgctgtacggcccaccaggaacaggcaagacccatttggcaagggccgtagctaagagctcgggttcccatatgctcgtacttaatggctcaaccatcacgagttgctgggttggcgaaacatcgaaatacatcaatgccgctttcagcttggctaagaagctacatccctgcattatcttcattgacgaagtcgattcactgttctatcggcgaagtggtgacaacaagtcttgggagcgggcagctctcacgcagtttcttcaggaaatggatgggataactcaaacgaataatgcccccttcgttttagttgcgacgaataggccaagtgacctcgacagcgctttcattcgccgattgccacagagaatccccttcgggttaccgaatgtcaaggcacgcgcggacattctgagaacactcctcaaagaggatgacttggatggcgttaatatcgaagacctagcggcattgactgagggctattctggttccgatctgaagagtctatgcggcgaagccggcttgatgtgggcaatagagcaacagctcggactaaaggacccagcgaagaaggcttatcagccggtcgcagaaattccaaaggatgattcaccaactccaaaagagcaggagagccctgatgatcaattgccttctagctctccaagcagcgacacgagcgtttcctctactaattcctctacatcgccgtcttctggtgtctcaacgcccaacacctccgctgccgacaacgatgaaacagcttcggacgaagaaccaaagctcaagcttcttctcacaaacgcccacttcgtcaaagctctaaataagataaagcctagcgtatcagcacaagatatgaatgcaatggaggatttccatcgcaagtttaattctggcaagagctctaactcggcttcgtcgtccaaaatattggagaaactgagcaagccaagtgattctctagagaagaaggctgcgacgttcaatcggcgcctccaaccacttcatcccgcggatgtgaacgttctgaagacaagcaagtggggataggggtgtcttagcgcgatatgatttggagtgatagcgttttagagacgatgtgacaagttagcatctcgagggataaatgattttcatagaaaggcgatgttcaatcgaaatttgtactcttgaaaacctcaatgtcgatggtgcatctgcgtacctacatacaggcgatcaccacatatctgctaagacccaataggtcccgaatcatcccacgaagctctccacttgcttttcactccattcccaaaatttgcgtattagatctacacctccttcgctctcgggctttgcggcaagctccaattccttgcagatagggtgaaagcgtccgaacggaaagacgtaacctgcagtctctggtgtgacctctggcgacagcccagcgaatagttccgtgtaagcacccttgatggcagggtaatgcatgatggcgacctgtaacttgcggaacaagctttgctgggagaagagattggatcgtaa

SEQ ID NO: 23830 - DNA, 1041 bp, Muscodor strobelii
  misc_feature: SGI cDNA ID NO. 568114
  misc_feature: Encodes the peptide sequence at SEQ ID NO 23831
atgccacctacgctgcttagcgggcttacccagtgcttcccatcagcagccaaattcttgatcgaagatgtgcctgatttgaccaacaaggtttttgctgagtattctcatctgtgtcaagatacagctaatagaatcaaggtatatatcgtcactggagggacctcaggcgtcggcaaagagctggcgcgcatgctttactccaagaatgccacggtctacattgctgcacgtagtgaaggcacatcattagccgatatcagggaggcagttccttcttcaactggcaaactggtcttcctattcttagatctcggggaccttcggaccgtgaagaccgccgtagagaaatttcttgagaatgagactaaactcagcgtcctcttcaacaacgccggttacatggcggctgaggataaattaccggagaagaccgttcaaggctatgaaatgcagctcggtgtgaactgcttgggtcactttctcctcacaaaattgctcatgcccattctcctatcgactgcagcagacaagaccgcgtggaccaacgaggttcgtgtgatctttgtctcttcattcgctgcagagatgtatcacgaagagaaagtgggcatcgacctagagaacctcgactatcatcgcccaaagtctagtatacaacgttacggcttgagcaaagtgggcacctgggcatatggagttgaactctctaagaggtttgggtcaagtggtgtgcttggcctaccagtaaatccgggcaatttacgatccaatctcttctcccagcaaagcttgttccgcaagttacaggtcgccatcatgcattaccctgccatcaagggtgcttacacggaactattcgctgggctgtcgccagaggtcacaccagagactgcaggttacgtctttccgttcggacgctttcaccctatctgcaaggaattggagcttgccgcaaagcccgagagcgaaggaggtgtagatctaatacgcaaattttgggaatggagtgaaaagcaagtggagagcttcgtgggatga

SEQ ID NO: 23831 - protein, 346 aa, Muscodor strobelii
  misc_feature: SGI Peptide ID NO. 568114
  misc_feature (47)..(198): Pfam Id: PF00106 Pfam Desc: short chain dehydrogenase
  misc_feature (47)..(133): Pfam Id: PF00106 Pfam Desc: short chain dehydrogenase
  misc_feature (7)..(345): NCBI GI: 256730375 Blast Desc: NECHADRAFT_95027 [Nectria haematococca mpVI 77-13-4]
  misc_feature (3)..(345): NCBI GI: 242801946 Blast Desc: estradiol 17 beta-dehydrogenase, [Talaromyces stipitatus ATCC 10500] gi|218717219|gb|EED16640.1| estradiol 17 beta-dehydrogenase, [Talaromyces stipitatus ATCC 10500]
  misc_feature (3)..(345): NCBI GI: 212545773 Blast Desc: short-chain dehydrogenase, [Penicillium marneffei ATCC 18224] gi|210064560|gb|EEA18655.1| short-chain dehydrogenase, [Penicillium marneffei ATCC 18224]
  misc_feature (1)..(344): NCBI GI: 46122791 Blast Desc: FG05773.1 [Gibberella zeae PH-1]
  misc_feature (10)..(345): NCBI GI: 240280835 Blast Desc: short-chain dehydrogenase [Ajellomyces capsulatus H143]
  misc_feature (10)..(345): NCBI GI: 225560611 Blast Desc: short-chain dehydrogenase [Ajellomyces capsulatus G186AR]
  misc_feature (4)..(345): NCBI GI: 239610907 Blast Desc: short-chain dehydrogenase [Ajellomyces dermatitidis ER-3]
  misc_feature (4)..(345): NCBI GI: 261206248 Blast Desc: short-chain dehydrogenase [Ajellomyces dermatitidis SLH14081] gi|239592920|gb|EEQ75501.1| short-chain dehydrogenase [Ajellomyces dermatitidis SLH14081]
  misc_feature (6)..(345): NCBI GI: 256727198 Blast Desc: NECHADRAFT_32256 [Nectria haematococca mpVI 77-13-4]
  misc_feature (10)..(345): NCBI GI: 154278467 Blast Desc: conserved [Ajellomyces capsulatus NAm1] gi|150413632|gb|EDN09015.1| conserved [Ajellomyces capsulatus NAm1]
MPPTLLSGLTQCFPSAAKFLIEDVPDLTNKVFAEYSHLCQDTANRIKVYIVTGGTSGVGKELARMLYSKNATVYIAARSEGTSLADIREAVPSSTGKLVFLFLDLGDLRTVKTAVEKFLENETKLSVLFNNAGYMAAEDKLPEKTVQGYEMQLGVNCLGHFLLTKLLMPILLSTAADKTAWTNEVRVIFVSSFAAEMYHEEKVGIDLENLDYHRPKSSIQRYGLSKVGTWAYGVELSKRFGSSGVLGLPVNPGNLRSNLFSQQSLFRKLQVAIMHYPAIKGAYTELFAGLSPEVTPETAGYVFPFGRFHPICKELELAAKPESEGGVDLIRKFWEWSEKQVESFVG

SEQ ID NO: 23832 - DNA, 593 bp, Muscodor strobelii
  misc_feature: SGI EST ID NO. CUFF.56048.0
  misc_feature: Variant of the nucleotide sequence at SEQ ID NO 23830
aacagtttggatgctcacgagaacaacctgaatcattgcacctttcagttattctaaattactgcgttctaagttgttcccatgccacctacgctgcttagcgggcttacccagtgcttcccatcagcagccaaattcttgatcgaagatgtgcctgatttgaccaacaaggtttttgctgagtattctcatctgtgtcaagatacagctaatagaatcaaggtatatatcgtcactggagggacctcaggcgtcggcaaagagctggcgcgcatgctttactccaagaatgccacggtctacattgctgcacgtagtgaaggcacatcattagccgatatcagggaggcagttccttcttcaactggcaaactggtcttcctattcttagatctcggggaccttcggaccgtgaagaccgccgtagagaaatttcttgagaatgagactaaactcagcgtcctcttcaacaacgccggttacatggcggctgaggataaattaccggagaagaccgttcaaggctatgaaatgcagctcggtgtgaactgcttgggtcactttctcctcacaaaattgctcatgcccattct

SEQ ID NO: 23833 - DNA, 750 bp, Muscodor strobelii
  misc_feature: SGI cDNA ID NO. 568115
  misc_feature: Encodes the peptide sequence at SEQ ID NO 23834
atgtcgtcatcaagcacgagcagcatagcgggcggaagcctgagccccaaagcgcataagatgcgcgcgaactcacatggtgcggctatggagaagaactcgacaccgttactacggtcatcatgtgatcggtgtcagagcagagctagcgatcgagtaacgaggtttgatgtacctctgatcgccatagcaagggccttcaacgctctcctcggcttcgcgactgtcatccgcatacatgttgccgtcgacttcggttggtggcccccagagaacgtagtcctctttgtcctgtgctggatccagttcttctggaacctgctgcatgccacattcagcatattgggatatcagtggtggccgtcgtcaaaacgcgccgcgggcatgcctcccataaagatcaccgtaggcagtcgcaccatctgcgactttggaggaccgaacgaagatcaaggcgagaagcaacggcgcttcaaaagaatccagttcactatcatcgacaccctcctcgcaatacccacactcgccctattaatctacgtggcacatatcatgtatccatggtggggagctcactatgtcgggcttaggcctcccaccattggcttgatcgctgctcttgtctcatccgtactcctcaccgctatcctccagctattccagttcttcgaggccaaggtcattggtgtgcaacttaccatgaaagatatttatgagagggaccatcccggaggcagattagcactatga

SEQ ID NO: 23834 - protein, 249 aa, Muscodor strobelii
  misc_feature: SGI Peptide ID NO. 568115
MSSSSTSSIAGGSLSPKAHKMRANSHGAAMEKNSTPLLRSSCDRCQSRASDRVTRFDVPLIAIARAFNALLGFATVIRIHVAVDFGWWPPENVVLFVLCWIQFFWNLLHATFSILGYQWWPSSKRAAGMPPIKITVGSRTICDFGGPNEDQGEKQRRFKRIQFTIIDTLLAIPTLALLIYVAHIMYPWWGAHYVGLRPPTIGLIAALVSSVLLTAILQLFQFFEAKVIGVQLTMKDIYERDHPGGRLAL

SEQ ID NO: 23835 - DNA, 1416 bp, Muscodor strobelii
  misc_feature: SGI EST ID NO. CUFF.56057.0
  misc_feature: Variant of the nucleotide sequence at SEQ ID NO 23833
ctttttacctagacgtgcagccagccaacgccgctggtcgcagccggtaatctgtcaaaggtcacacgatatccaacctagtggttctttggattttcttcggctgctattcctacctacacatactatttgaacaagcattgtctttagacttgcagacctaccttaacttaatggcgcggtgtcactgattgtgtgaccaagaatgggaaagaccaagcacggcagtcaatcaatctgaccctgaagcctagccgtgtccgacgtctgctagtcctagccgaagccgaagcgcaacgcgctcccgacggaaatcgcatgcaaccatcctacaggacctttcagggcaattatcgcgacgacatctctcatatggaatgattccgacttatgcgcctcccctccagccagtccagtacgagatcacgcgaccaacgagcttcacacgccgcccacgaaggtaatgccgccgccgttgtagccaacattctaaaccctcgaccacgacctatatcggtctctacgcgcagccataaccctcggtcatcatcatcacacgagcatgtcgtcatcaagcacgagcagcatagcgggcggaagcctgagccccaaagcgcataagatgcgcgcgaactcacatggtgcggctatggagaagaactcgacaccgttactacggtcatcatgtgatcggtgtcagagcagagctagcgatcgagtaacgaggtttgatgtacctctgatcgccatagcaagggccttcaacgctctcctcggcttcgcgactgtcatccgcatacatgttgccgtcgacttcggttggtggcccccagagaacgtagtcctctttgtcctgtgctggatccagttcttctggaacctgctgcatgccacattcagcatattgggatatcagtggtggccgtcgtcaaaacgcgccgcgggcatgcctcccataaagatcaccgtaggcagtcgcaccatctgcgactttggaggaccgaacgaagatcaaggcgagaagcaacggcgcttcaaaagaatccagttcactatcatcgacaccctcctcgcaatacccacactcgccctattaatctacgtggcacatatcatgtatccatggtggggagctcactatgtcgggcttaggcctcccaccattggcttgatcgctgctcttgtctcatccgtactcctcaccgctatcctccagctattccagttcttcgaggccaaggtcattggtgtgcaacttaccatgaaagatatttatgagagggaccatcccggaggcagattagcactatgacatggtagcaaagcttagcctgtatactacgattatggccaggtgctatgtcacgcctgggccaacgtttttggatgaacaaaataccctattctaatacccta

SEQ ID NO: 23836 - DNA, 642 bp, Muscodor strobelii
  misc_feature: SGI cDNA ID NO. 568116
  misc_feature: Encodes the peptide sequence at SEQ ID NO 23837
atgtcgtcatcaagcacgagcagcatagcgggcggaagcctgagccccaaagcgcataagatgcgcgcgaactcacatggtgcggctatggagaagaactcgacaccgttactacggtcatcatgtgatcggtgtcagagcagagctagcgatcgagtaacgaggtttgatgtacctctgatcgccatagcaagggccttcaacgctctcctcggcttcgcgactgtcatccgcatacatgttgccgtcgacttcggttggtggcccccagagaacgtagtcctctttgtcctgtgctggatccagttcttctggaacctgctgcatgccacattcagcatattgggatatcagtggtggccgtcgtcaaaacgcgccgcgggcatgcctcccataaagatcaccgtaggcagtcgcaccatctgcgactttggaggaccgaacgaagatcaaggcgagaagcaacggcgcttcaaaagaatccagttcactatcatcgacaccctcctcgcaatacccacactcgccctattaatctacgtggcacatatcatgtatccatggtggggagctcactatgtcgggcttaggcctcccaccattggcttgatcgctgctcttgtgtacgtactccccatttga

SEQ ID NO: 23837 - protein, 213 aa, Muscodor strobelii
  misc_feature: SGI Peptide ID NO. 568116
MSSSSTSSIAGGSLSPKAHKMRANSHGAAMEKNSTPLLRSSCDRCQSRASDRVTRFDVPLIAIARAFNALLGFATVIRIHVAVDFGWWPPENVVLFVLCWIQFFWNLLHATFSILGYQWWPSSKRAAGMPPIKITVGSRTICDFGGPNEDQGEKQRRFKRIQFTIIDTLLAIPTLALLIYVAHIMYPWWGAHYVGLRPPTIGLIAALVYVLPI

SEQ ID NO: 23838 - DNA, 1416 bp, Muscodor strobelii; identical to SEQ ID NO: 23835
  misc_feature: SGI EST ID NO. CUFF.56057.0
  misc_feature: Variant of the nucleotide sequence at SEQ ID NO 23836

SEQ ID NO: 23839 - DNA, 516 bp, Muscodor strobelii
  misc_feature: SGI cDNA ID NO. 568117
  misc_feature: Encodes the peptide sequence at SEQ ID NO 23840
atgaacacccgatccaagtccaagaccagcggcgatcaagcccacagcgccaaggccgccgatgtcccagctctcgaggacgccaatggtgtcatcttaccaaaccgcaaatacaggtgcaacgcttgttgggaagaaatgggcaacacagctcctatcatctccgcccacatctccaagaaccatcccaccagacccggcaagacgcctcatcagataatggagactggagggccctcatggtgcccctactgttccgaagttctcgagagcccttatcgtcttgtcgctcacgtcaagaaagaccacaacagaaagatgtcccatccggaggctcgcaccttttgccctggcgctcagattgccgatggatgggtctgtgaagaagcagaagaggaggctaagacagaattttggggcaagttcaggaagcgtcacgaggatgatgaccagaatggcggtaacgatcaaggcataggcggccgtgttgtccaacagctaactttgcgaggataa

SEQ ID NO: 23840 - protein, 171 aa, Muscodor strobelii
  misc_feature: SGI Peptide ID NO. 568117
MNTRSKSKTSGDQAHSAKAADVPALEDANGVILPNRKYRCNACWEEMGNTAPIISAHISKNHPTRPGKTPHQIMETGGPSWCPYCSEVLESPYRLVAHVKKDHNRKMSHPEARTFCPGAQIADGWVCEEAEEEAKTEFWGKFRKRHEDDDQNGGNDQGIGGRVVQQLTLRG

SEQ ID NO: 23841 - DNA, 1476 bp, Muscodor strobelii
  misc_feature: SGI cDNA ID NO. 568118
  misc_feature: Encodes the peptide sequence at SEQ ID NO 23842
atggccaactctgtgtcatataacattcgtccagccgtggaggaggccaacaatgacattggggacctttacgatgcccgaacggagactttccttccatgtcatttaggaatgtcgcctcgcgattgcatcaagttggagcacctcgatacatttgagaccaagaaaaatacggaatccggcttgtgccctaagttcaaccagtttcaaatctccaatgagctacgtgcgagcattctctgtggtctggtcacagtaggggggcccgtccgttgcatagagatggtcgatccaggctattctttcaatctgtaccaagagtacaaccgataccaaggaaccatacttgtcaacgttctcgggaatagattcgatctcgaccttgcgcatccccagttgaaaatgattctcagcggcaacaaaaatctggcagcgaacgcgacacacatgatcaaaagtgtcacttggggtgctcaggttcatatcaaggtagaataccgtcgccaacaagacgaattggatatatacaatatatatgaaaaccaatattacgaggatgctgatgatgatcgttgcagttacatagagcagactcgcaggcaactcgacgatggtattcagcaccttcacgcattcctgaaaatcgttcttgagcgttcgtcattaagattaccagagataagaaagttcaaagaggaactatctgcgggcgtccttggtaccgacagaacgaaaatctgcatctactcagatcttgactctcgtggacggcgcgaaaaactcagcaaccgcctccatgaattcgatatcgtgcagacagtcgactggatcctcagtcttcctcagttcctgagcttcaagacgtcccacaagccaatcttctatgagcttattccatgctcagacgcaacactccaaattcacgatgagattccgaaggctcacgccccattcttccctcttgaagagaaagttatcaactacctgacgcgattcactgcggacttttccactatggaaaaagcagtagaagactactacagagagatacgtcggttagaactgcccattcccgaagactttgagacacaatttcaaaatgctatgacgacgaagaaacagctccttggtcaactcagagaagcactgatccgagctcgtaatgacccagcctcgaacagtcaaattctggatatattcgaggggttctacaagggagaccgtcgcttcgatatctcgatctcgaatgtttacccggcgattcggcaagctcgctgggagttggtaatacagaggatgattctgagtcaaggtggacagtgcttggatcacagaactaccgaagagttgatttcgacaggcaaacatatctatgtgcttcattatgctgcagacagcataaagtggagaaagagtgtgctttattatgatgcggacagctcgggagcaaagagcaatcacggagcctatggttag

SEQ ID NO: 23842 - protein, 491 aa, Muscodor strobelii
  misc_feature: SGI Peptide ID NO. 568118
  misc_feature (10)..(159): NCBI GI: 256720396 Blast Desc: NECHADRAFT_55961 [Nectria haematococca mpVI 77-13-4]
  misc_feature (20)..(166): NCBI GI: 221123316 Blast Desc: [Hydra magnipapillata]
  misc_feature (20)..(360): NCBI GI: 85106823 Blast Desc: NCU06548 [Neurospora crassa OR74A] gi|28923856|gb|EAA33019.1| [Neurospora crassa OR74A]
MANSVSYNIRPAVEEANNDIGDLYDARTETFLPCHLGMSPRDCIKLEHLDTFETKKNTESGLCPKFNQFQISNELRASILCGLVTVGGPVRCIEMVDPGYSFNLYQEYNRYQGTILVNVLGNRFDLDLAHPQLKMILSGNKNLAANATHMIKSVTWGAQVHIKVEYRRQQDELDIYNIYENQYYEDADDDRCSYIEQTRRQLDDGIQHLHAFLKIVLERSSLRLPEIRKFKEELSAGVLGTDRTKICIYSDLDSRGRREKLSNRLHEFDIVQTVDWILSLPQFLSFKTSHKPIFYELIPCSDATLQIHDEIPKAHAPFFPLEEKVINYLTRFTADFSTMEKAVEDYYREIRRLELPIPEDFETQFQNAMTTKKQLLGQLREALIRARNDPASNSQILDIFEGFYKGDRRFDISISNVYPAIRQARWELVIQRMILSQGGQCLDHRTTEELISTGKHIYVLHYAADSIKWRKSVLYYDADSSGAKSNHGAYG

SEQ ID NO: 23843 - DNA, 1005 bp, Muscodor strobelii
  misc_feature: SGI cDNA ID NO. 568119
  misc_feature: Encodes the peptide sequence at SEQ ID NO 23844
atgcctgctctctcagaggttggtcgcaagcttctggattctggatccttttccgattgcgtcctcgtctgccagggacacgaatacaatgtccaccagtcctatgtttgcactcaatcgccagtgattgcagcagcattcaacagtagcatgaaggaagggatctccaagcgtcttgaagtgtctttcgataaagatacactgtatcgcatgctcgaatacatgtacacacgggactacaaccatgtcggcattcccagccctttcattgttgacactaaagtagtcgacgccaaagatgaagcagaggcctcaatcacgaagaagtttcgcgtgttctcactccagacagccactgaactattcacccaagctcttctccagcatgctcaagttaacatcgcggcggactattacatgatccccgaccttgctcaacgcgccgttgaaaagttaaccaccttactcgagcatcagagtttgccagtggactcgctattcaacttgatcgagcaagtcattggacaagttggtgacaagaacttctacgatctcctgatccgtcatatctcgctcaatctttgcgagctgacgcccagactctttggtgaagacggcattgccaatgagctcgcctcagacgtccttgtccaaggtctccatatcttccgaccctgggtagccgccaatactgcgatggagtttttgaagacagacaatgcgcatgctattgagggtttgagagcccgagagcgcgatatactccgcatgcgacaccgtttctttcacatggattggagcctcaagaatgttggcaaagtcctcggcagcactgaaagatgcctccgcacagattgccagcaggagtttggatgcgatgtcaaagatatctcaaaacacagcgagtatccctgcttcgctgtcatttgcaagcgctgtggcactggccacgcttacgacaggcccagcaaggtgactgaggaggatgctgctcctactagttag

SEQ ID NO: 23844 - protein, 334 aa, Muscodor strobelii
  misc_feature: SGI Peptide ID NO. 568119
  misc_feature (8)..(110): Pfam Id: PF00651 Pfam Desc: BTB/POZ domain
  misc_feature (8)..(77): Pfam Id: PF00651 Pfam Desc: BTB/POZ domain
  misc_feature (5)..(296): NCBI GI: 240274426 Blast Desc: conserved [Ajellomyces capsulatus H143]
  misc_feature (5)..(296): NCBI GI: 154282377 Blast Desc: [Ajellomyces capsulatus NAm1] gi|150410164|gb|EDN05552.1| [Ajellomyces capsulatus NAm1]
  misc_feature (21)..(157): NCBI GI: 212538299 Blast Desc: conserved [Penicillium marneffei ATCC 18224] gi|210069047|gb|EEA23138.1| conserved [Penicillium marneffei ATCC 18224]
  misc_feature (14)..(157): NCBI GI: 46138041 Blast Desc: FG10535.1 [Gibberella zeae PH-1]
  misc_feature (10)..(164): NCBI GI: 256721877 Blast Desc: NECHADRAFT_88094 [Nectria haematococca mpVI 77-13-4]
  misc_feature (10)..(222): NCBI GI: 258573109 Blast Desc: [Uncinocarpus reesii 1704] gi|237901002|gb|EEP75403.1| [Uncinocarpus reesii 1704]
  misc_feature (3)..(194): NCBI GI: 238845158 Blast Desc: conserved [Microsporum canis CBS 113480]
  misc_feature (4)..(161): NCBI GI: 242790325 Blast Desc: conserved [Talaromyces stipitatus ATCC 10500] gi|218718124|gb|EED17544.1| conserved [Talaromyces stipitatus ATCC 10500]
  misc_feature (9)..(162): NCBI GI: 156055908 Blast Desc: [Sclerotinia sclerotiorum 1980] gi|154703090|gb|EDO02829.1| [Sclerotinia sclerotiorum 1980]
  misc_feature (4)..(157): NCBI GI: 212534502 Blast Desc: PMAA_079220 [Penicillium marneffei ATCC 18224] gi|210069806|gb|EEA23896.1| PMAA_079220 [Penicillium marneffei ATCC 18224]
MPALSEVGRKLLDSGSFSDCVLVCQGHEYNVHQSYVCTQSPVIAAAFNSSMKEGISKRLEVSFDKDTLYRMLEYMYTRDYNHVGIPSPFIVDTKVVDAKDEAEASITKKFRVFSLQTATELFTQALLQHAQVNIAADYYMIPDLAQRAVEKLTTLLEHQSLPVDSLFNLIEQVIGQVGDKNFYDLLIRHISLNLCELTPRLFGEDGIANELASDVLVQGLHIFRPWVAANTAMEFLKTDNAHAIEGLRARERDILRMRHRFFHMDWSLKNVGKVLGSTERCLRTDCQQEFGCDVKDISKHSEYPCFAVICKRCGTGHAYDRPSKVTEEDAAPTS

SEQ ID NO: 23845 - DNA, 924 bp, Muscodor strobelii
  misc_feature: SGI cDNA ID NO. 568120
  misc_feature: Reduced expression when VOC is produced
  misc_feature: Encodes the peptide sequence at SEQ ID NO 23846
atgcatatcgctcaagttaacgagtggtccgaggggcctaagtacactgccgtcgaggatctcccagcaccaggtcccaatgaacttcgactccgagtcctcggagcaggaatccatcaggtagtgcgctcacgcgcctcgggcagacactactctgccagaactctgcctcatacagtcggcattgacgccgtgggacgagatgagagtacaggaaagctgtactactgcttccgcctacaaggcggtgttttcgcagagttcatcaacatcgataaagactccaccgttccggtcccagatggtgtcgatcccgttgcgctagcggcgagtgtcaatccggcgatgagcagctggatggctatcacgcatcgggcttcgaacttgcctgagaacttcacggtgcttattctcggtgctacgacggctagcggcagaatggcggttaatgccgctaaagcactcggtgccggaaaagtcatcggtgtggcgaggaatgaagagacgttgaagaatgttgagggccttgatgagtatattgtgcagaaggagaatatcaaagacacggatttctcgaagacggatcctgatttgatattggattatgtgtatggcgagctcgctgtccatgttttggagagtttgaatacgaggaaggcggtgcagtatgttacgattgggagtctgtcgcagcagactgctgagattccttcggctgtttttaggagtaaggatattactatgaggggtgcggggccgggtgcttatagtattccggctctaggaaaggagttggagaggcttgtgccggagatggcggggtggaaattacttgatgctcaggggtttgatatgaaggatattgagagggtttggggtgacaaggaacttgctgctaaggggaggttggttgctattccttga

SEQ ID NO: 23846 - protein, 307 aa, Muscodor strobelii
  misc_feature: SGI Peptide ID NO. 568120
  misc_feature (131)..(168): Pfam Id: PF00107 Pfam Desc: Zinc-binding dehydrogenase
  misc_feature (1)..(304): NCBI GI: 39958907 Blast Desc: MGG_09297 [Magnaporthe grisea 70-15] gi|145013243|gb|EDJ97884.1| MGG_09297 [Magnaporthe grisea 70-15]
  misc_feature (1)..(306): NCBI GI: 256732307 Blast Desc: NECHADRAFT_104574 [Nectria haematococca mpVI 77-13-4]
  misc_feature (1)..(307): NCBI GI: 256721780 Blast Desc: NECHADRAFT_53307 [Nectria haematococca mpVI 77-13-4]
  misc_feature (1)..(295): NCBI GI: 46105242 Blast Desc: FG00249.1 [Gibberella zeae PH-1]
  misc_feature (1)..(307): NCBI GI: 115385473 Blast Desc: [Aspergillus terreus NIH2624] gi|114187730|gb|EAU29430.1| [Aspergillus terreus NIH2624]
  misc_feature (1)..(307): NCBI GI: 116208784 Blast Desc: CHGG_03685 [Chaetomium globosum CBS 148.51] gi|88184282|gb|EAQ91750.1| CHGG_03685 [Chaetomium globosum CBS 148.51]
  misc_feature (1)..(307): NCBI GI: 115492319 Blast Desc: [Aspergillus terreus NIH2624] gi|114197647|gb|EAU39347.1| [Aspergillus terreus NIH2624]
  misc_feature (1)..(307): NCBI GI: 67903056 Blast Desc: AN8515.2 [Aspergillus nidulans FGSC A4] gi|67903062|ref|XP_681787.1| AN8518.2 [Aspergillus nidulans FGSC A4] gi|40747703|gb|EAA66859.1| AN8515.2 [Aspergillus nidulans A4]
  misc_feature (1)..(304): NCBI GI: 81429485 Blast Desc: zinc-containing alcohol dehydrogenase (oxidoreductase) [Lactobacillus sakei subsp. sakei 23K] gi|78611128|emb|CAI56181.1| zinc-containing alcohol dehydrogenase
  misc_feature (1)..(292): NCBI GI: 222082151 Blast Desc: quinone oxidoreductase protein [Agrobacterium radiobacter K84] gi|221726830|gb|ACM29919.1| quinone oxidoreductase protein [Agrobacterium radiobacter K84]
  misc_feature (1)..(184): SWISSPROT Homolog: EC 1.6.5.5 NADPH:quinone reductase
  misc_feature: Useful for introducing or modulating the production of volatile compounds
MHIAQVNEWSEGPKYTAVEDLPAPGPNELRLRVLGAGIHQVVRSRASGRHYSARTLPHTVGIDAVGRDESTGKLYYCFRLQGGVFAEFINIDKDSTVPVPDGVDPVALAASVNPAMSSWMAITHRASNLPENFTVLILGATTASGRMAVNAAKALGAGKVIGVARNEETLKNVEGLDEYIVQKENIKDTDFSKTDPDLILDYVYGELAVHVLESLNTRKAVQYVTIGSLSQQTAEIPSAVFRSKDITMRGAGPGAYSIPALGKELERLVPEMAGWKLLDAQGFDMKDIERVWGDKELAAKGRLVAIP

SEQ ID NO: 23847 - DNA, 1422 bp, Muscodor strobelii
  misc_feature: SGI EST ID NO. CUFF.56081.0
  misc_feature: Variant of the nucleotide sequence at SEQ ID NO 23845
gcaagggtgagtcaatgtaaggagatgagtccttctatagacatagtattgcagcctagatttcagattaaatatataaagcttgccatcctcaaaatgtctgctcttaatttccagatcatcacacaaagttctgcacgcaaatccccactgctcgaccggtaccaccaacacatcttagtcagcagcacgacttcaacctatcttcttgttagacaacataacacctttccaaatcaactaaaatgcatatcgctcaagttaacgagtggtccgaggggcctaagtacactgccgtcgaggatctcccagcaccaggtcccaatgaacttcgactccgagtcctcggagcaggaatccatcaggtagtgcgctcacgcgcctcgggcagacactactctgccagaactctgcctcatacagtcggcattgacgccgtgggacgagatgagagtacaggaaagctgtactactgcttccgcctacaaggcggtgttttcgcagagttcatcaacatcgataaagactccaccgttccggtcccagatggtgtcgatcccgttgcgctagcggcgagtgtcaatccggcgatgagcagctggatggctatcacgcatcgggcttcgaacttgcctgagaacttcacggtgcttattctcggtgctacgacggctagcggcagaatggcggttaatgccgctaaagcactcggtgccggaaaagtcatcggtgtggcgaggaatgaagagacgttgaagaatgttgagggccttgatgagtatattgtgcagaaggagaatatcaaagacacggatttctcgaagacggatcctgatttgatattggattatgtgtatggcgagctcgctgtccatgttttggagagtttgaatacgaggaaggcggtgcagtatgttacgattgggagtctgtcgcagcagactgctgagattccttcggctgtttttaggagtaaggatattactatgaggggtgcggggccgggtgcttatagtattccggctctaggaaaggagttggagaggcttgtgccggagatggcggggtggaaattacttgatgctcaggggtttgatatgaaggatattgagagggtttggggtgacaaggaacttgctgctaaggggaggttggttgctattccttgagagtcagtttaggaagagagcatggttggtcatgtatttgttgtgtttgagctgcgtcatggtcatttggttcaagaactcagaatacaatcgttgctggactgtgactgttggttttcgtatgagcggcagcagaatatatcgcttataaatggaataaacttccctcgattaagctctgaccgatatcttcagttcataagttgtgagacaggcatcgctattttgtataagaactaccataagacggcat

SEQ ID NO: 23848 - DNA, 3459 bp, Muscodor strobelii
  misc_feature: SGI cDNA ID NO. 568121
  misc_feature: Reduced expression when VOC is produced
  misc_feature: Encodes the peptide sequence at SEQ ID NO 23849
atgaatagattcagaacaaagaagaaggggaaggacgagggaagtggtgtgccacgatcatcacaggaagcggaatcgtcgggaccctttcggggattccgcaagggaaaaaaggccccagagaatgaaaaggcacccgtcgacttggccaccgtgctgccctcaaacgatgatttccgaaccagtctgctgatgacaggtctgtcagcacggttctcaatgttgcgagaacaggatgatccgaacaccaagattggcaaagcgagtgacgatagtgtcttattccctaagcgccaatcaagaatggatatgggcgcattccgtggactcggagatatcgcagaggtcgagtcaatcaaagctccattcgctcgcatggactcatacgattctgacgatggaggctcgctaaaagcaggaagcatcatgagccgttctaaacccactgagggcaacaatctttttggtggtcgtcaaaaaatctacaacattccggctggtgctccatcctcgggcaaggttgatggtggtatgggaggccgcgcattatacgcggacgatgtagcacagtccgcatttcaaaaatggaggaaggccgaaaaggaacgagactttctgcgagacacagaaaccgactacgatactcctgggaacagaatttctgccgacgctgatgtcgaccagactcgctccacctctccagcaccaagtagctacaatcacagacgagagacgggatcgacattttcctccacgccctccatggcaagaaactcatccgctgccacctctgtccattctcaagccgcaccatctctaaaagactggcagccacctagtagttccattggtggaggactggagcgaaatgtgaccagaacgagacggctctacgagactgggttcttcaacaaccatgaatcccaagagccagcaccaggtgtcctcagccgtgtcgatacactgaacagacaacgtccatttgggacgagaacgccagagctgaggcagcattcgccatctcctactacatctagcatgtttggagatcgtttcggcaatgagcggaagattttgaccaaggctagtgcccccaatcttcgctcaacgagcccaccggccagtgcttcacccacaggcacgccagatctcggtatccgagttcccagcgcaggagaaagtagaacaactactggtggtatcccgccattgagtcctccgatcagcgaagcagatgagaatagcctgttgcaaatcaacccaaatgaccgaggcaaggccaccgcgcttggagtattccagaagcccgcacagccttacgatgagtcgcgctttgcccaaaggcagctggagttgcagcggggaagagataccccaacacagggcctgcgtcgtgaatctaatcaaacatcacaaagcagagactcgacgtccccaccagccgtggagatagcaactcttgattcaccaactgcccctgacttctctacgattcaactgccgaaggagccagagagaggagtcacctcattcctggcggatgctgatgatagtgatgctgaatcgactactgccagtcagccagcaccaacgcctcaggtacatcttagacgaccatcggacaggaaccaccctgccttgcgcgattctgcactgccaacgccgctctctctagctccgcagtccaccgatggtaacgacaagtcaaagggaggatctcctgctgactcgcctacccttggccctaccacagaaatgtccggtctgagtggcatggtgcgtcaacatttgagagctgatagtaatgcttcgtcgatctacagtagcgtacctccgacaactggtcttgagtcacgctttcctccggaatctgacaacctgctggactatggcgcaggctcaaatccttgggacgtgaaagaagacaacgaaagctcttacatgaatctggatgtcaatgaacctctcccacacagcgatgtactgccatcactatccgtccggcagacgcatgttaatccctcaactacaacaagacccgatgatacggatgactttgcccgagaattggcagatggagcacgccgcattcgtgagaaactgacatcctacgttgagactgaaagtcgctcgtcttctcctcaacgaggcgatgagctaagagaatcagtagacatgacatcacttccacgtccttctgtgttgggatctattctgcgcccaaagagcagccgcggctctctcgtagaacgtgggcgagatccttcatcgacaagggctctcaaaatgattggatttggcagtcaggctagctctagaaacgccagtcctggtgccgaatcactacagaaggccaccactatcgatcgcgaacaaagctcttcggaagataaatctgccgaagaacctgccccgggactacgagctttccgacaggcaagacgtgagcttcagcgactgaaggaaatggagtctcaaaaccggcatccagtagcacctgccgcaccccagggaccgccgcctgatatcccatcccctcagtctcgacgtgcagctcctgggtcaactccccctatccgcgaccgtcaaccccctcccgtctactaccaacaaagaatgcccagcgaggattcgtacaagagccattccccacctgagtcgcgttatcggagtgagtctgagtcgagcaatggcactcggtctggcagcaagcctgccggtagaagtagaggagaatcggcaacgcgggagaacatgcatctaggcgcacctggatcaatgcctcgtcctcctatgcggtctcctggacttccgggcaccaatattaagcaatcgccgttcatgccgccacaaggtcaacctcattctctgaggttaaatcaggccgcctttgctagtaatggtggtctgcaagtgcaacgtccgcgaggatatgaatctggacagccctcgccaatttctccaaatcctgcatccatagcaaatgcaaattcggcgccaccgactcctgtcaccatgacttcaccgccgcggccagccatcttaccaagtctaagctatgatccggcgatgtcatctggccctggccgcaacgacgctatgagagcacgaggtccgtcgcaagcagctgggatgggaccagctaatggccgggtcccaccacctctgcctcctatcaacccgagacgaagacaggacagtgggagagttcaaacgcccacagatccaaattacccgtcgcagcgcagaggcactatctccactagtgacgaagatgagcccagacccgacaggaggtggaaacctaagccaatgggtgagggtatgggtatgcccatcaacttcaaccgactgcctcaacaagcacctgtgaatctcgggccgcctgcgtcaagaactgttttgacgcaaaaccgtaaccgccaaggcaatggccaattgccaggcggcatgatctga

SEQ ID NO: 23849 - protein, 1152 aa, Muscodor strobelii
  misc_feature: SGI Peptide ID NO. 568121
  misc_feature (1)..(1123): NCBI GI: 261361099 Blast Desc: conserved [Verticillium albo-atrum VaMs.102]
  misc_feature (1)..(1024): NCBI GI: 171681684 Blast Desc: protein product [Podospora anserina] gi|170940801|emb|CAP66450.1| protein product [Podospora anserina]
  misc_feature (1)..(988): NCBI GI: 256733889 Blast Desc: NECHADRAFT_99514 [Nectria haematococca mpVI 77-13-4]
  misc_feature (1)..(1091): NCBI GI: 46127895 Blast Desc: FG08325.1 [Gibberella zeae PH-1]
  misc_feature (1)..(1056): NCBI GI: 116201763 Blast Desc: CHGG_08766 [Chaetomium globosum CBS 148.51] gi|88177284|gb|EAQ84752.1| CHGG_08766 [Chaetomium globosum CBS 148.51]
  misc_feature (1)..(1152): NCBI GI: 39941374 Blast Desc: MGG_05598 [Magnaporthe grisea 70-15] gi|145022276|gb|EDK06296.1| MGG_05598 [Magnaporthe grisea 70-15]
  misc_feature (1)..(952): NCBI GI: 85097930 Blast Desc: NCU05575 [Neurospora crassa OR74A] gi|28922030|gb|EAA31301.1| [Neurospora crassa OR74A]
  misc_feature (1)..(459): NCBI GI: 156036510 Blast Desc: SS1G_12944 [Sclerotinia sclerotiorum 1980] gi|154698349|gb|EDN98087.1| SS1G_12944 [Sclerotinia sclerotiorum 1980]
  misc_feature (1)..(459): NCBI GI: 154297824 Blast Desc: BC1G_11886 [Botryotinia fuckeliana B05.10] gi|150858327|gb|EDN33519.1| BC1G_11886 [Botryotinia fuckeliana B05.10]
  misc_feature (1)..(767): NCBI GI: 242787091 Blast Desc: conserved [Talaromyces stipitatus ATCC 10500] gi|218721081|gb|EED20500.1| conserved [Talaromyces stipitatus ATCC 10500]
  misc_feature: Useful for introducing or modulating the production of volatile compounds
MNRFRTKKKGKDEGSGVPRSSQEAESSGPFRGFRKGKKAPENEKAPVDLATVLPSNDDFRTSLLMTGLSARFSMLREQDDPNTKIGKASDDSVLFPKRQSRMDMGAFRGLGDIAEVESIKAPFARMDSYDSDDGGSLKAGSIMSRSKPTEGNNLFGGRQKIYNIPAGAPSSGKVDGGMGGRALYADDVAQSAFQKWRKAEKERDFLRDTETDYDTPGNRISADADVDQTRSTSPAPSSYNHRRETGSTFSSTPSMARNSSAATSVHSQAAPSLKDWQPPSSSIGGGLERNVTRTRRLYETGFFNNHESQEPAPGVLSRVDTLNRQRPFGTRTPELRQHSPSPTTSSMFGDRFGNERKILTKASAPNLRSTSPPASASPTGTPDLGIRVPSAGESRTTTGGIPPLSPPISEADENSLLQINPNDRGKATALGVFQKPAQPYDESRFAQRQLELQRGRDTPTQGLRRESNQTSQSRDSTSPPAVEIATLDSPTAPDFSTIQLPKEPERGVTSFLADADDSDAESTTASQPAPTPQVHLRRPSDRNHPALRDSALPTPLSLAPQSTDGNDKSKGGSPADSPTLGPTTEMSGLSGMVRQHLRADSNASSIYSSVPPTTGLESRFPPESDNLLDYGAGSNPWDVKEDNESSYMNLDVNEPLPHSDVLPSLSVRQTHVNPSTTTRPDDTDDFARELADGARRIREKLTSYVETESRSSSPQRGDELRESVDMTSLPRPSVLGSILRPKSSRGSLVERGRDPSSTRALKMIGFGSQASSRNASPGAESLQKATTIDREQSSSEDKSAEEPAPGLRAFRQARRELQRLKEMESQNRHPVAPAAPQGPPPDIPSPQSRRAAPGSTPPIRDRQPPPVYYQQRMPSEDSYKSHSPPESRYRSESESSNGTRSGSKPAGRSRGESATRENMHLGAPGSMPRPPMRSPGLPGTNIKQSPFMPPQGQPHSLRLNQAAFASNGGLQVQRPRGYESGQPSPISPNPASIANANSAPPTPVTMTSPPRPAILPSLSYDPAMSSGPGRNDAMRARGPSQAAGMGPANGRVPPPLPPINPRRRQDSGRVQTPTDPNYPSQRRGTISTSDEDEPRPDRRWKPKPMGEGMGMPINFNRLPQQAPVNLGPPASRTVLTQNRNRQGNGQLPGGMI

SEQ ID NO: 23850 - DNA, 4310 bp, Muscodor strobelii
  misc_feature: SGI EST ID NO. CUFF.56527.1
  misc_feature: Variant of the nucleotide sequence at SEQ ID NO 23848
gccagcgctaacgtagaaagcaaagtggtagtatcagacacttgatcaaacgattgtcttcaactcattcacgaatcaataaagacaaaacagttccaccaggctcagtgtctaatgctaaattgatggcgcactgacggcgatattatcaccagtacttacttttaatatcgcatcgtgaagtcagacaggtgactcgtcaacaccaggttgtcgtttcatcaacgaaatcaagatgaatagattcagaacaaagaagaaggggaaggacgagggaagtggtgtgccacgatcatcacaggaagcggaatcgtcgggaccctttcggggattccgcaagggaaaaaaggccccagagaatgaaaaggcacccgtcgacttggccaccgtgctgccctcaaacgatgatttccgaaccagtctgctgatgacaggtctgtcagcacggttctcaatgttgcgagaacaggatgatccgaacaccaagattggcaaagcgagtgacgatagtgtcttattccctaagcgccaatcaagaatggatatgggcgcattccgtggactcggagatatcgcagaggtcgagtcaatcaaagctccattcgctcgcatggactcatacgattctgacgatggaggctcgctaaaagcaggaagcatcatgagccgttctaaacccactgagggcaacaatctttttggtggtcgtcaaaaaatctacaacattccggctggtgctccatcctcgggcaaggttgatggtggtatgggaggccgcgcattatacgcggacgatgtagcacagtccgcatttcaaaaatggaggaaggccgaaaaggaacgagactttctgcgagacacagaaaccgactacgatactcctgggaacagaatttctgccgacgctgatgtcgaccagactcgctccacctctccagcaccaagtagctacaatcacagacgagagacgggatcgacattttcctccacgccctccatggcaagaaactcatccgctgccacctctgtccattctcaagccgcaccatctctaaaagactggcagccacctagtagttccattggtggaggactggagcgaaatgtgaccagaacgagacggctctacgagactgggttcttcaacaaccatgaatcccaagagccagcaccaggtgtcctcagccgtgtcgatacactgaacagacaacgtccatttgggacgagaacgccagagctgaggcagcattcgccatctcctactacatctagcatgtttggagatcgtttcggcaatgagcggaagattttgaccaaggctagtgcccccaatcttcgctcaacgagcccaccggccagtgcttcacccacaggcacgccagatctcggtatccgagttcccagcgcaggagaaagtagaacaactactggtggtatcccgccattgagtcctccgatcagcgaagcagatgagaatagcctgttgcaaatcaacccaaatgaccgaggcaaggccaccgcgcttggagtattccagaagcccgcacagccttacgatgagtcgcgctttgcccaaaggcagctggagttgcagcggggaagagataccccaacacagggcctgcgtcgtgaatctaatcaaacatcacaaagcagagactcgacgtccccaccagccgtggagatagcaactcttgattcaccaactgcccctgacttctctacgattcaactgccgaaggagccagagagaggagtcacctcattcctggcggatgctgatgatagtgatgctgaatcgactactgccagtcagccagcaccaacgcctcaggtacatcttagacgaccatcggacaggaaccaccctgccttgcgcgattctgcactgccaacgccgctctctctagctccgcagtccaccgatggtaacgacaagtcaaagggaggatctcctgctgactcgcctacccttggccctaccacagaaatgtccggtctgagtggcatggtgcgtcaacatttgagagctgatagtaatgcttcgtcgatctacagtagcgtacctccgacaactggtcttgagtcacgctttcctccggaatctgacaacctgctggactatggcgcaggctcaaatccttgggacgtgaaagaagacaacgaaagctcttacatgaatctggatgtcaatgaacctctcccacacagcgatgtactgccatcactatccgtccggcagacgcatgttaatccctcaactacaacaagacccgatgatacggatgactttgcccgagaattggcagatggagcacgccgcattcgtgagaaactgacatcctacgttgagactgaaagtcgctcgtcttctcctcaacgaggcgatgagctaagagaatcagtagacatgacatcacttccacgtccttctgtgttgggatctattctgcgcccaaagagcagccgcggctctctcgtagaacgtgggcgagatccttcatcgacaagggctctcaaaatgattggatttggcagtcaggctagctctagaaacgccagtcctggtgccgaatcactacagaaggccaccactatcgatcgcgaacaaagctcttcggaagataaatctgccgaagaacctgccccgggactacgagctttccgacaggcaagacgtgagcttcagcgactgaaggaaatggagtctcaaaaccggcatccagtagcacctgccgcaccccagggaccgccgcctgatatcccatcccctcagtctcgacgtgcagctcctgggtcaactccccctatccgcgaccgtcaaccccctcccgtctactaccaacaaagaatgcccagcgaggattcgtacaagagccattccccacctgagtcgcgttatcggagtgagtctgagtcgagcaatggcactcggtctggcagcaagcctgccggtagaagtagaggagaatcggcaacgcgggagaacatgcatctaggcgcacctggatcaatgcctcgtcctcctatgcggtctcctggacttccgggcaccaatattaagcaatcgccgttcatgccgccacaaggtcaacctcattctctgaggttaaatcaggccgcctttgctagtaatggtggtctgcaagtgcaacgtccgcgaggatatgaatctggacagccctcgccaatttctccaaatcctgcatccatagcaaatgcaaattcggcgccaccgactcctgtcaccatgacttcaccgccgcggccagccatcttaccaagtctaagctatgatccggcgatgtcatctggccctggccgcaacgacgctatgagagcacgaggtccgtcgcaagcagctgggatgggaccagctaatggccgggtcccaccacctctgcctcctatcaacccgagacgaagacaggacagtgggagagttcaaacgcccacagatccaaattacccgtcgcagcgcagaggcactatctccactagtgacgaagatgagcccagacccgacaggaggtggaaacctaagccaatgggtgagggtatgggtatgcccatcaacttcaaccgactgcctcaacaagcacctgtgaatctcgggccgcctgcgtcaagaactgttttgacgcaaaaccgtaaccgccaaggcaatggccaattgccaggcggcatgatctgagaaagggatctaatatgcggatcacttttctagatcatcttcaattcgccgcacagccagatcgccagtacgacgctgttgctgcgtactcctaccataacgacgttggtgttcgtcattgcaggttggacttgctctttgtatataccctgcacacacacgctccccacggagcttcatgaaatcttttctagtactctttaatctcatatcagtggcatctcgacctgtctcggagtcgggacagcaaatttcgcttccttcaggggatttggcaaatacggaatagcataggacaaaggtgttggctggtcttgccgaatttggtgctttcaatgtcactgtatggactagctctcaattttgtcccataagcctaatagtctccaagagcatctgccttgtagctagagcaataaagcaagcaaccaatgatgcaatatcgtaacccttcgtctcttgatatatgtgatgatgacgtgaacgttctgataggctatcgaccagttatcttgcttgagtggtgcacgggtcgaatgcctgtaatgatgatggctcatcgtggctatttgatgtcggtcgccaagtgtggtgttttcccctccaatttatcaac

SEQ ID NO: 23851 - DNA, 708 bp, Muscodor strobelii
  misc_feature: SGI cDNA ID NO. 568122
  misc_feature: Encodes the peptide sequence at SEQ ID NO 23852
atgcgtgcaagcagctctcttctagcactagccttcatagcaactagctccctagcatgcgatcccagcaagcttcctcgtagagaaagcaacagcaccagcgagtatcctaagaccacactaggccccgaagggtctgttccgggaacacttggatacactctcaaccacttcgccctcaacgtaaggaacgcgacgcgaagcatcgaattctatagccaagtcttcggcatgcgtctcatgttcacgatccaagcaagcgagcactactcaatctcctacatgggctacagccagggaggaaagaacggcacaggctatcagacgaccgaagagctcattcgcaaccagcataacacacagggcctgctggagttgcttgcctacgacgccccgggtgccgatgagggtatctggaataatacgatcgcgacgcgattcaatcacggtggtttcgtggttcccaatgtcaatgagacacaagctaggcttgagcactacggggtagagatctacaagggggtcggagagtcctttcctaagaccggacctcttgcggctgctttccgcgtgtctgagattggagatgaagagtaccagggcttgattccgattatcaatgccgtcactgccggtctcgtctttgctgctgaccctgatgggaatatcttggagattctgggccccgattcagtcattgcggagtaa

SEQ ID NO: 23852 - protein, 235 aa, Muscodor strobelii
  misc_feature: SGI Peptide ID NO. 568122
  misc_feature (54)..(226): Pfam Id: PF00903 Pfam Desc: Glyoxalase/Bleomycin resistance protein/Dioxygenase superfamily
  misc_feature (5)..(226): NCBI GI: 256729489 Blast Desc: NECHADRAFT_84117 [Nectria haematococca mpVI 77-13-4]
  misc_feature (1)..(226): NCBI GI: 256724483 Blast Desc: NECHADRAFT_88105 [Nectria haematococca mpVI 77-13-4]
  misc_feature (7)..(226): NCBI GI: 46127057 Blast Desc: FG07906.1 [Gibberella zeae PH-1]
  misc_feature (50)..(227): NCBI GI: 121716394 Blast Desc: lactoylglutathione lyase (Glo1), [Aspergillus clavatus NRRL 1] gi|119403952|gb|EAW14369.1| lactoylglutathione lyase (Glo1), [Aspergillus clavatus NRRL 1]
  misc_feature (48)..(232): NCBI GI: 255933095 Blast Desc: Pc12g12020 [Penicillium chrysogenum Wisconsin 54-1255] gi|211582637|emb|CAP80829.1| Pc12g12020 [Penicillium chrysogenum Wisconsin 54-1255]
  misc_feature (50)..(230): NCBI GI: 146322974 Blast Desc: lactoylglutathione lyase (Glo1) [Aspergillus fumigatus Af293] gi|129558553|gb|EAL93650.2| lactoylglutathione lyase (Glo1), [Aspergillus fumigatus Af293] gi|159129746|gb|EDP54860.1|
  misc_feature (50)..(230): NCBI GI: 119481575 Blast Desc: lactoylglutathione lyase (Glo1), [Neosartorya fischeri NRRL 181] gi|119408970|gb|EAW18919.1| lactoylglutathione lyase (Glo1), [Neosartorya fischeri NRRL 181]
  misc_feature (50)..(227): NCBI GI: 259479451 Blast Desc: TPA: lactoylglutathione lyase (Glo1), (AFU_orthologue; AFUA_2G13550) [Aspergillus nidulans FGSC A4]
  misc_feature (50)..(227): NCBI GI: 238496887 Blast Desc: lactoylglutathione lyase (Glo1), [Aspergillus flavus NRRL3357] gi|220694559|gb|EED50903.1| lactoylglutathione lyase (Glo1), [Aspergillus flavus NRRL3357]
  misc_feature (50)..(221): NCBI GI: 145232519 Blast Desc: An02g05670 [Aspergillus niger] gi|134056620|emb|CAK47695.1| protein product [Aspergillus niger]
MRASSSLLALAFIATSSLACDPSKLPRRESNSTSEYPKTTLGPEGSVPGTLGYTLNHFALNVRNATRSIEFYSQVFGMRLMFTIQASEHYSISYMGYSQGGKNGTGYQTTEELIRNQHNTQGLLELLAYDAPGADEGIWNNTIATRFNHGGFVVPNVNETQARLEHYGVEIYKGVGESFPKTGPLAAAFRVSEIGDEEYQGLIPIINAVTAGLVFAADPDGNILEILGPDSVIAE

SEQ ID NO: 23853 - DNA, 576 bp, Muscodor strobelii
  misc_feature: SGI EST ID NO. CUFF.56108.0
  misc_feature: Variant of the nucleotide sequence at SEQ ID NO 23851
ctctcttctagcactagccttcatagcaactagctccctagcatgcgatcccagcaagcttcctcgtagagaaagcaacagcaccagcgagtatcctaagaccacactaggccccgaagggtctgttccgggaacacttggatacactctcaaccacttcgccctcaacgtaaggaacgcgacgcgaagcatcgaattctatagccaagtcttcggcatgcgtctcatgttcacgatccaagcaagcgagcactactcaatctcctacatgggctacagccagggaggaaagaacggcacaggctatcagacgaccgaagagctcattcgcaaccagcataacacacagggcctgctggagttgcttgcctacgacgccccgggtgccgatgagggtatctggaataatacgatcgcgacgcgattcaatcacggtggtttcgtggttcccaatgtcaatgagacacaagctaggcttgagcactacggggtagagatctacaagggggtcggagagtcctttcctaagaccggacctcttgcggctgctttccgcgtgtctgagattggagatga

SEQ ID NO: 23854 - DNA, 1128 bp, Muscodor strobelii
  misc_feature: SGI cDNA ID NO. 568123
  misc_feature: Encodes the peptide sequence at SEQ ID NO 23855
atggcggatctgactctaaaggcagccgagcaggctctgcatgtctttcccatgacagcaagcttccacggcctaccgaatgaggtgcttgaccttgttgttgatgaacttgagaagtccggttcttacatggcgctagcggcgctgacttcagcatcgtcacggctccacactcagcgctggcgctccaaggctctctctcggctacagctttttggttcgcaatgccagctcatcagcgacatcagagccttgctcgcatatttcgaaagggatattggcaggatcgtacagatacgtagtagcgtgcaagccatctctattcgagccgatactgacataaacggtggtcgccatctttctaactgccgcgcgcttcttcatgacatcttcaagctttcgcgtgctttgcccaatcttgttagcatctcgctcgacatgaccagatttgccctcctggcggtcgcagactacggcagcctcggcggccccaagactattgccctacagtttcgtggacctgctgcatttagtcagcttccatcttccccgaacgtcactcatctatcgatctcagactattccagtctagcacgttccttattacccaaaggcatcaaatatcttgaccctgaatcattcatctcaaggctcgaacatgttcctggtctcgttgaactgcagttcatggtgacttgtgggattatagatggtgatggttactaccactatactgagtatcggagctggcacttcttgcatagtcttccccgcgaaatctcccaccgcctcaagtcgctgcggagactgatagtctgccaggagcatgtcctcctggatgggcatcaacggctgaagagcatctacgcagatttcaaactctatgcacagaaagtaacagaccgttattttgaagaagttgaaactctcgagaccatgtgtatgaaactgacgagtaaatcacatgagagcttgatctacgtccgcaatcgaaacaacgaggaggtacgagaattggagcttcagaatctacagagcgaaagattccctcgatcacgatttttcaaaggagacaattttgagcttctttcggaagtggctcttgacccctgtcaagcaaggaattaa

SEQ ID NO: 23855 - protein, 375 aa, Muscodor strobelii
  misc_feature: SGI Peptide ID NO. 568123
MADLTLKAAEQALHVFPMTASFHGLPNEVLDLVVDELEKSGSYMALAALTSASSRLHTQRWRSKALSRLQLFGSQCQLISDIRALLAYFERDIGRIVQIRSSVQAISIRADTDINGGRHLSNCRALLHDIFKLSRALPNLVSISLDMTRFALLAVADYGSLGGPKTIALQFRGPAAFSQLPSSPNVTHLSISDYSSLARSLLPKGIKYLDPESFISRLEHVPGLVELQFMVTCGIIDGDGYYHYTEYRSWHFLHSLPREISHRLKSLRRLIVCQEHVLLDGHQRLKSIYADFKLYAQKVTDRYFEEVETLETMCMKLTSKSHESLIYVRNRNNEEVRELELQNLQSERFPRSRFFKGDNFELLSEVALDPCQARN

SEQ ID NO: 23856 - DNA, 650 bp, Muscodor strobelii
  misc_feature: SGI EST ID NO. CUFF.56118.0
  misc_feature: Variant of the nucleotide sequence at SEQ ID NO 23854
ggcctaccgaatgaggtgcttgaccttgttgttgatgaacttgagaagtccggttcttacatggcgctagcggcgctgacttcagcatcgtcacggctccacactcagcgctggcgctccaaggctctctctcggctacagctttttggttcgcaatgccagctcatcagcgacatcagagccttgctcgcatatttcgaaagggatattggcaggatcgtacagatacgtagtagcgtgcaagccatctctattcgagccgatactgacataaacggtggtcgccatctttctaactgccgcgcgcttcttcatgacatcttcaagctttcgcgtgctttgcccaatcttgttagcatctcgctcgacatgaccagatttgccctcctggcggtcgcagactacggcagcctcggcggccccaagactattgccctacagtttcgtggacctgctgcatttagtcagcttccatcttccccgaacgtcactcatctatcgatctcagactattccagtctagcacgttccttattacccaaaggcatcaaatatcttgaccctgaatcattcatctcaaggctcgaacatgttcctggtctcgttgaactgcagttcatggtgacttgtgggattatagatggtgatgg

SEQ ID NO: 23857 - DNA, 804 bp, Muscodor strobelii
  misc_feature: SGI cDNA ID NO. 568124
  misc_feature: Elevated expression when VOC is produced
  misc_feature: Encodes the peptide sequence at SEQ ID NO 23858
atgaaggtttcgattctcgcttcggctctggcactcgctggcagcgcagttgcccttcctaagcagcgccgtactaagaatgaagatttgcccacgactgtggttgcgaacatcacggtggttgacacgcaattagtgcgtgacgtccgagctgaggttgagaagtttaaggagcttcagccatatttgtactaccacgtgatgcggacatggctgtttggtgctgcggcatttaactataatgagacactaaagtcccaagttgatctcgagctacatgctatcggcactctgatgcacgatttgggctgggacatgcgacctgactcgccttgggttacccaggagaatcgttttgaagttgatggtggccttggtgccatgagcttcatcaaatctcacgggtgcgtgagtgaatgggatgacgcacgtctagaaaagatctacgatggtatcgtgctgcaagctataccaggtgttgttgaacacaagaacatagattcgcaatggatcgtgatgagcgtgggctttgaattcccaggtcctcactcccctcttattcccgactacaactacgacaccattcttgccgagttccccaacgacaaactgtaccgaggaagcaatgcgacgtttacgtggatgacagcaacgaagcccgtagccacgtataacacgttccttgcgccctttggatataatttcgtgcccggatataatgagaccccaaacaggctctacgactacattcaatcgggtctcacaatggagttggccgcccatcccaacagcaccttcccttaa

SEQ ID NO: 23858 - protein, 267 aa, Muscodor strobelii
  misc_feature: SGI Peptide ID NO. 568124
  misc_feature (31)..(248): NCBI GI: 116200323 Blast Desc: CHGG_08317 [Chaetomium globosum CBS 148.51] gi|88179596|gb|EAQ87064.1| CHGG_08317 [Chaetomium globosum CBS 148.51]
  misc_feature (30)..(248): NCBI GI: 256721693 Blast Desc: NECHADRAFT_44823 [Nectria haematococca mpVI 77-13-4]
  misc_feature (17)..(250): NCBI GI: 116202473 Blast Desc: CHGG_09121 [Chaetomium globosum CBS 148.51] gi|88177639|gb|EAQ85107.1| CHGG_09121 [Chaetomium globosum CBS 148.51]
  misc_feature (25)..(254): NCBI GI: 171681192 Blast Desc: protein product [Podospora anserina] gi|170940554|emb|CAP65782.1| protein product [Podospora anserina]
  misc_feature (31)..(248): NCBI GI: 171693093 Blast Desc: protein product [Podospora anserina] gi|170946495|emb|CAP73296.1| protein product [Podospora anserina]
  misc_feature (34)..(227): NCBI GI: 116204295 Blast Desc: CHGG_10031 [Chaetomium globosum CBS 148.51] gi|88176159|gb|EAQ83627.1| CHGG_10031 [Chaetomium globosum CBS 148.51]
  misc_feature (28)..(225): NCBI GI: 242795716 Blast Desc: conserved [Talaromyces stipitatus ATCC 10500] gi|218719237|gb|EED18657.1| conserved [Talaromyces stipitatus ATCC 10500]
  misc_feature (32)..(240): NCBI GI: 13471098 Blast Desc: mlr0982 [Mesorhizobium loti MAFF303099] gi|14021842|dbj|BAB48453.1| mlr0982 [Mesorhizobium loti MAFF303099]
  misc_feature (35)..(240): NCBI GI: 260460254 Blast Desc: conserved [Mesorhizobium opportunistum WSM2075] gi|259033899|gb|EEW35158.1| conserved [Mesorhizobium opportunistum WSM2075]
  misc_feature (74)..(232): NCBI GI: 116178824 Blast Desc: CHGG_00040 [Chaetomium globosum CBS 148.51] gi|88184337|gb|EAQ91805.1| CHGG_00040 [Chaetomium globosum CBS 148.51]
  misc_feature: Useful for introducing or modulating the production of volatile compounds
MKVSILASALALAGSAVALPKQRRTKNEDLPTTVVANITVVDTQLVRDVRAEVEKFKELQPYLYYHVMRTWLFGAAAFNYNETLKSQVDLELHAIGTLMHDLGWDMRPDSPWVTQENRFEVDGGLGAMSFIKSHGCVSEWDDARLEKIYDGIVLQAIPGVVEHKNIDSQWIVMSVGFEFPGPHSPLIPDYNYDTILAEFPNDKLYRGSNATFTWMTATKPVATYNTFLAPFGYNFVPGYNETPNRLYDYIQSGLTMELAAHPNSTFP

SEQ ID NO: 23859 - DNA, 633 bp, Muscodor strobelii
  misc_feature: SGI EST ID NO. CUFF.56129.0
  misc_feature: Variant of the nucleotide sequence at SEQ ID NO 23857
cggcactctgatgcacgatttgggctgggacatgcgacctgactcgccttgggttacccaggagaatcgttttgaagttgatggtggccttggtgccatgagcttcatcaaatctcacgggtgcgtgagtgaatgggatgacgcacgtctagaaaagatctacgatggtatcgtgctgcaagctataccaggtgttgttgaacacaagaacatagattcgcaatggatcgtgatgagcgtgggctttgaattcccaggtcctcactcccctcttattcccgactacaactacgacaccattcttgccgagttccccaacgacaaactgtaccgaggaagcaatgcgacgtttacgtggatgacagcaacgaagcccgtagccacgtataacacgttccttgcgccctttggatataatttcgtgcccggatataatgagaccccaaacaggctctacgactacattcaatcgggtctcacaatggagttggccgcccatcccaacagcaccttcccttaagttgaaaagtattaggatcggaagtgtatatacatagatggaaatacataaacgaaatatcaagattgaagttggttaaaatgataattacatgtagactatcaatacctcct

SEQ ID NO: 23860 - DNA, 2337 bp, Muscodor strobelii
  misc_feature: SGI cDNA ID NO. 568125
  misc_feature: Reduced expression when VOC is produced
  misc_feature: Encodes the peptide sequence at SEQ ID NO 23861
atgcctatcgcagaaaaagctccgcaaaccttatatgataaggtgatcgctgctcacatcgtcgacgagaaacttgacggcacaatcctgctttatattgatcgtcacctcgtacacgaagttacttcaccgcaagcttttgagggtcttgagaatgcaggacgtactgtaagaagaacagactgcactcttgccactacggatcataatgtccccacaaaatcccgaaagggcattaaggacatcgccacattcgttgaggaggaagactcgagattacaatgcatgacccttgaggagaatgtcaaaaaattcggcgtcacttattttggacttggcgataggcgtcagggtatcgtccatgttatcggtcctgagcagggcttcacccttccgggtacgaccctggtatgcggcgacagtcacacgtctactcacggcgccttcggtgcctttgctaccggcatcggtacaagtgaggtcgagcacgtccttgctactcagtgcctcattaccaagaggaataagaatatgagaattcaggttgacggtgagcttgcacctggtgtgagttccaaggacgttgttctccacgccattggcttgatcggtaccgccggcggtactggctgcgtaatcgaattttgtggatctgtcattcgtagcctgagcatggaggcccgtatgtcgatctgcaacatgtccatcgaggctggtgctagagcgggtatggttgcgccagatgagattacattcgagtacctcaaaggtagacctttagcgcccgcggtagactcgccggagtgggagcgtgctgttgcgtattggaagagtctccagtcggatcctggtgccaagtacgacaaagacgttcaaattgatgccaaggacatcatcccaacagtaacgtggggcacaagccccgaagacgttgtacccattacaggttgcgtaccagacccagaaacattttcgaccgaaaataagaagctagcgggccggagaatgcttgaatacatgggcctgactcccggcactcgcatgcaggatattcctatcgacaaagtgttcatcggttcttgcactaattcacgacttgaggatctccgtgctgctgcccgggttgtgaagggcaagaaggtcgcggctaatgtgaaacatgctatgatcgttccaggatctggtatcatcaaagaggaagctgaggctgagggtctcgatcaagtcttcattgatgcaggctttgactggagagaagcaggatgtagtatgtgcctaggtatgaacccggacatcctatcgcccagagaacgatgtgccagcacaagcaatcgaaacttcgagggacgtcaaggagcactgggacgaacgcatttgatgtcgcctgtgatggcggctgcagccgccatcatgggtaaactagccgacgtccgcactttgacagattacaagggcagcccgcatgtcgaagcgttcaggtcttctacgcccgctagtgcaccgcatgtcgacgaaagcgttgacgacggtgatgctgcggccaaggataggataggagatcaaccagaggatagctctcccagtgcggagagtttggttcaggatgtagctggttcaggtggtcttcctaaattcctcatccacagaggaattgctgcccccatggatcgcaacaatatcgacaccgatgcgttgattcctaaacaattcctcaagacaatcaagcgaacagggcttggcaaggcgctcttcgacccttggcgatataatgaagatggatcgcccaaccctgattttgtcctcaatcaggagccatacacaaaatcgaagaccattgtatgcactggcgaaaacttcggttgcggaagctcccgagagcacgcaccttgggctctgaacgattttggcattagatgtatcatcgctccgtcatttgctgatatcttcttcaacaacacgttcaagaacggcatgttacccattgccatcactaacgcagtcgaccttgagaaagttgcagcggaagctcgtgctgggaaagagatcgaagttgatcttcctgaccaagaaattcgagatgccagcggcaatcttctctgcaaatttgaggtggaggagtttcgcaaacactgtctggttaacggtctcgacgatattggactcactctccaattagaggacaaaattgcagaatatgagaggaaagtttctgagatgacaccctggattgacggaaaatcctatcttaagaggaaaggtggcaagctagctgtcaaggctgccaaggtgccaatgacgaatcgcgggcaggagatcaaggatcctattgactggtaa

SEQ ID NO: 23861 - protein, 778 aa, Muscodor strobelii
  misc_feature: SGI Peptide ID NO. 568125
  misc_feature (10)..(472): Pfam Id: PF00330 Pfam Desc: Aconitase family (aconitate hydratase)
  misc_feature (542)..(666): Pfam Id: PF00694 Pfam Desc: Aconitase C-terminal domain
  misc_feature (1)..(778): NCBI GI: 159129528 Blast Desc: 3-isopropylmalate dehydratase, [Aspergillus fumigatus A1163]
  misc_feature (1)..(778): NCBI GI: 71001556 Blast Desc: 3-isopropylmalate dehydratase [Aspergillus fumigatus Af293] gi|66853097|gb|EAL93421.1| 3-isopropylmalate dehydratase, [Aspergillus fumigatus Af293]
  misc_feature (1)..(778): NCBI GI: 238839739 Blast Desc: 3-isopropylmalate dehydratase [Microsporum canis CBS 113480]
  misc_feature (1)..(778): NCBI GI: 169774989 Blast Desc: [Aspergillus oryzae RIB40] gi|238496375|ref|XP_002379423.1| 3-isopropylmalate dehydratase, [Aspergillus flavus NRRL3357] gi|83769825|dbj|BAE59960.1| protein
  misc_feature (19)..(777): NCBI GI: 258577517 Blast Desc: 3-isopropylmalate dehydratase [Uncinocarpus reesii 1704] gi|237903206|gb|EEP77607.1| 3-isopropylmalate dehydratase [Uncinocarpus reesii 1704]
  misc_feature (1)..(778): NCBI GI: 255939017 Blast Desc: Pc15g00510 [Penicillium chrysogenum Wisconsin 54-1255] gi|211584900|emb|CAP82937.1| Pc15g00510 [Penicillium chrysogenum Wisconsin 54-1255]
  misc_feature (1)..(778): NCBI GI: 67539432 Blast Desc: AN5886.2 [Aspergillus nidulans FGSC A4] gi|40739205|gb|EAA58395.1| AN5886.2 [Aspergillus nidulans FGSC A4] gi|259479947|tpe|CBF70635.1| TPA: alpha isopropylmalate FGSC
  misc_feature (1)..(778): NCBI GI: 119481135 Blast Desc: 3-isopropylmalate dehydratase, [Neosartorya fischeri NRRL 181] gi|119408750|gb|EAW18699.1| 3-isopropylmalate dehydratase, [Neosartorya fischeri NRRL 181]
  misc_feature (1)..(778): NCBI GI: 189210325 Blast Desc: 3-isopropylmalate dehydratase [Pyrenophora tritici-repentis Pt-1C-BFP] gi|187977587|gb|EDU44213.1| 3-isopropylmalate dehydratase [Pyrenophora tritici-repentis
  misc_feature (1)..(778): NCBI GI: 121715616 Blast Desc: 3-isopropylmalate dehydratase, [Aspergillus clavatus NRRL 1] gi|119403574|gb|EAW13991.1| 3-isopropylmalate dehydratase, [Aspergillus clavatus NRRL 1]
  misc_feature (9)..(748): SWISSPROT Homolog: EC 4.2.1.33 3-isopropylmalate dehydratase
  misc_feature: Useful for introducing or modulating the production of volatile compounds
MPIAEKAPQTLYDKVIAAHIVDEKLDGTILLYIDRHLVHEVTSPQAFEGLENAGRTVRRTDCTLATTDHNVPTKSRKGIKDIATFVEEEDSRLQCMTLEENVKKFGVTYFGLGDRRQGIVHVIGPEQGFTLPGTTLVCGDSHTSTHGAFGAFATGIGTSEVEHVLATQCLITKRNKNMRIQVDGELAPGVSSKDVVLHAIGLIGTAGGTGCVIEFCGSVIRSLSMEARMSICNMSIEAGARAGMVAPDEITFEYLKGRPLAPAVDSPEWERAVAYWKSLQSDPGAKYDKDVQIDAKDIIPTVTWGTSPEDVVPITGCVPDPETFSTENKKLAGRRMLEYMGLTPGTRMQDIPIDKVFIGSCTNSRLEDLRAAARVVKGKKVAANVKHAMIVPGSGIIKEEAEAEGLDQVFIDAGFDWREAGCSMCLGMNPDILSPRERCASTSNRNFEGRQGALGRTHLMSPVMAAAAAIMGKLADVRTLTDYKGSPHVEAFRSSTPASAPHVDESVDDGDAAAKDRIGDQPEDSSPSAESLVQDVAGSGGLPKFLIHRGIAAPMDRNNIDTDALIPKQFLKTIKRTGLGKALFDPWRYNEDGSPNPDFVLNQEPYTKSKTIVCTGENFGCGSSREHAPWALNDFGIRCIIAPSFADIFFNNTFKNGMLPIAITNAVDLEKVAAEARAGKEIEVDLPDQEIRDASGNLLCKFEVEEFRKHCLVNGLDDIGLTLQLEDKIAEYERKVSEMTPWIDGKSYLKRKGGKLAVKAAKVPMTNRGQEIKDPIDW

SEQ ID NO: 23862 - DNA, 2900 bp, Muscodor strobelii
  misc_feature: SGI EST ID NO. CUFF.56133.0
  misc_feature: Variant of the nucleotide sequence at SEQ ID NO 23860
gtaaaataaagggtctattctaccgcttgtcgtatcacatccagcttttcaacatatctcagtgtttcaacagctcactggcgcctcatcgcggcccgtacaaaaagcttagtcccctgcgtctctatccacactctcatttcttctatctttctctgttcatcttcaactcattgaatcccgtttgcaccgaagagttcccaaaatctggacttgattttgcttaattgaaacaatcaacattccagagggcgactgattcaacaccacagtcgagatgcctatcgcagaaaaagctccgcaaaccttatatgataaggtgatcgctgctcacatcgtcgacgagaaacttgacggcacaatcctgctttatattgatcgtcacctcgtacacgaagttacttcaccgcaagcttttgagggtcttgagaatgcaggacgtactgtaagaagaacagactgcactcttgccactacggatcataatgtccccacaaaatcccgaaagggcattaaggacatcgccacattcgttgaggaggaagactcgagattacaatgcatgacccttgaggagaatgtcaaaaaattcggcgtcacttattttggacttggcgataggcgtcagggtatcgtccatgttatcggtcctgagcagggcttcacccttccgggtacgaccctggtatgcggcgacagtcacacgtctactcacggcgccttcggtgcctttgctaccggcatcggtacaagtgaggtcgagcacgtccttgctactcagtgcctcattaccaagaggaataagaatatgagaattcaggttgacggtgagcttgcacctggtgtgagttccaaggacgttgttctccacgccattggcttgatcggtaccgccggcggtactggctgcgtaatcgaattttgtggatctgtcattcgtagcctgagcatggaggcccgtatgtcgatctgcaacatgtccatcgaggctggtgctagagcgggtatggttgcgccagatgagattacattcgagtacctcaaaggtagacctttagcgcccgcggtagactcgccggagtgggagcgtgctgttgcgtattggaagagtctccagtcggatcctggtgccaagtacgacaaagacgttcaaattgatgccaaggacatcatcccaacagtaacgtggggcacaagccccgaagacgttgtacccattacaggttgcgtaccagacccagaaacattttcgaccgaaaataagaagctagcgggccggagaatgcttgaatacatgggcctgactcccggcactcgcatgcaggatattcctatcgacaaagtgttcatcggttcttgcactaattcacgacttgaggatctccgtgctgctgcccgggttgtgaagggcaagaaggtcgcggctaatgtgaaacatgctatgatcgttccaggatctggtatcatcaaagaggaagctgaggctgagggtctcgatcaagtcttcattgatgcaggctttgactggagagaagcaggatgtagtatgtgcctaggtatgaacccggacatcctatcgcccagagaacgatgtgccagcacaagcaatcgaaacttcgagggacgtcaaggagcactgggacgaacgcatttgatgtcgcctgtgatggcggctgcagccgccatcatgggtaaactagccgacgtccgcactttgacagattacaagggcagcccgcatgtcgaagcgttcaggtcttctacgcccgctagtgcaccgcatgtcgacgaaagcgttgacgacggtgatgctgcggccaaggataggataggagatcaaccagaggatagctctcccagtgcggagagtttggttcaggatgtagctggttcaggtggtcttcctaaattcctcatccacagaggaattgctgcccccatggatcgcaacaatatcgacaccgatgcgttgattcctaaacaattcctcaagacaatcaagcgaacagggcttggcaaggcgctcttcgacccttggcgatataatgaagatggatcgcccaaccctgattttgtcctcaatcaggagccatacacaaaatcgaagaccattgtatgcactggcgaaaacttcggttgcggaagctcccgagagcacgcaccttgggctctgaacgattttggcattagatgtatcatcgctccgtcatttgctgatatcttcttcaacaacacgttcaagaacggcatgttacccattgccatcactaacgcagtcgaccttgagaaagttgcagcggaagctcgtgctgggaaagagatcgaagttgatcttcctgaccaagaaattcgagatgccagcggcaatcttctctgcaaatttgaggtggaggagtttcgcaaacactgtctggttaacggtctcgacgatattggactcactctccaattagaggacaaaattgcagaatatgagaggaaagtttctgagatgacaccctggattgacggaaaatcctatcttaagaggaaaggtggcaagctagctgtcaaggctgccaaggtgccaatgacgaatcgcgggcaggagatcaaggatcctattgactggtaaacatgggatatggggaacggagttctaaggctaaggtgttcacttggaaaagtcatgtcacatgaatcagtattataatgtctgctgttgccttaatgtggcacaacaaatgataatgcattgcatttggggcgcttgacttcacaacgctaccaacccttttcaacatgtcactgtctctcctccacaacctgacgtaatgtaacactggataattggttgactcctggagttgcaattgtttttgattaaactcaccggcgaagatgaacgataccaatgtcaa

SEQ ID NO: 23863 - DNA, 1146 bp, Muscodor strobelii
  misc_feature: SGI cDNA ID NO. 568126
  misc_feature: Encodes the peptide sequence at SEQ ID NO 23864
atggcgatggaactttccgatgcaatggtcattgacccacggggtgacctttatctcgtcgtctatggtcctgagtctgaagttgatgcagaacgcgaagatagccgtgacagaactatgcaccaggctgaagacagtgccgatcctgataagcgcgtctttctcgtgtgctcacgcacacttgcgcgagcttcgccggtctttgagcgtatgctctacggccatttcgctgaagcacaaaaaggcaacccttggatcgtcaagttggaagacgacgaactccggcctatgacgattctccttcaacttactcatggcgatccgcggccggttcacgagcttttcaatcgcagagccgttccggtttaccatcttgaccacttttggatcaaagatatatacgaccttgcagttttgacagacaaatatcaaatgacaaagttctaccacgggtgggcgagtctattggtcaccagaatcggaaaatgtattgatacgtgcacgacaatttcggaactaagtcccaacgacagcttaccgatgatgctatggatttgttgggagctcggagcaaatgatatgttccggacagtactcaagcacatggtaggatggaccatagacgacaattccggtgagctcttatatcgaaacacagattcctggaagctccaatcgtggtttgcgaatgttttcgaaccaggaaatctgttcggtgggttttcagaccattccttagctgcaggcacgaagtacattgtttctaattcagaacatccagatttcatccgagatgagcggatccgggcactccgaatgattcccgacgaaattggggcttatttctgtgccctgtgctggaaaaaaagctgtgaagaactccaagaagcgggcctgtggccgattgattcgaccaagtttagagacgatccgtatgcaatagtccgacgctttctgtcgagccgagaccctgttggatgggcaagatggatcaaggatggagaagagtggtctacttgtatctgcgtccacatcaccgcacttactataccagatttgagcgcactgccacagcctatatcagatcatctaaattctcaggcaataaaatcagggctcgttttgggctcacaggacgggggataa

SEQ ID NO: 23864 - protein, 381 aa, Muscodor strobelii
  misc_feature: SGI Peptide ID NO. 568126
  misc_feature (37)..(203): NCBI GI: 154296228 Blast Desc: BC1G_12941 [Botryotinia fuckeliana B05.10] gi|150843505|gb|EDN18698.1| BC1G_12941 [Botryotinia fuckeliana B05.10]
  misc_feature (50)..(214): NCBI GI: 256724501 Blast Desc: NECHADRAFT_88143 [Nectria haematococca mpVI 77-13-4]
  misc_feature (12)..(302): NCBI GI: 261353831 Blast Desc: conserved [Verticillium albo-atrum VaMs.102]
  misc_feature (53)..(204): NCBI GI: 116182756 Blast Desc: CHGG_02006 [Chaetomium globosum CBS 148.51] gi|88186303|gb|EAQ93771.1| CHGG_02006 [Chaetomium globosum CBS 148.51]
  misc_feature (11)..(195): NCBI GI: 85085459 Blast Desc: NCU04437 [Neurospora crassa OR74A] gi|28918606|gb|EAA28278.1| [Neurospora crassa OR74A] gi|40882183|emb|CAF06009.1| related to nuclear pore protein
  misc_feature (48)..(216): NCBI GI: 85085455 Blast Desc: NCU04436 [Neurospora crassa OR74A] gi|28918605|gb|EAA28277.1| [Neurospora crassa OR74A] gi|40882185|emb|CAF06011.1| [Neurospora crassa]
  misc_feature (37)..(218): NCBI GI: 170940282 Blast Desc: protein product [Podospora anserina]
  misc_feature (6)..(214): NCBI GI: 116201353 Blast Desc: CHGG_08561 [Chaetomium globosum CBS 148.51] gi|88177079|gb|EAQ84547.1| CHGG_08561 [Chaetomium globosum CBS 148.51]
  misc_feature (11)..(220): NCBI GI: 39942070 Blast Desc: MGG_03115 [Magnaporthe grisea 70-15] gi|145015914|gb|EDK00404.1| MGG_03115 [Magnaporthe grisea 70-15]
  misc_feature (50)..(141): NCBI GI: 145612037 Blast Desc: MGG_08044 [Magnaporthe grisea 70-15] gi|145019280|gb|EDK03508.1| MGG_08044 [Magnaporthe grisea 70-15]
MAMELSDAMVIDPRGDLYLVVYGPESEVDAEREDSRDRTMHQAEDSADPDKRVFLVCSRTLARASPVFERMLYGHFAEAQKGNPWIVKLEDDELRPMTILLQLTHGDPRPVHELFNRRAVPVYHLDHFWIKDIYDLAVLTDKYQMTKFYHGWASLLVTRIGKCIDTCTTISELSPNDSLPMMLWICWELGANDMFRTVLKHMVGWTIDDNSGELLYRNTDSWKLQSWFANVFEPGNLFGGFSDHSLAAGTKYIVSNSEHPDFIRDERIRALRMIPDEIGAYFCALCWKKSCEELQEAGLWPIDSTKFRDDPYAIVRRFLSSRDPVGWARWIKDGEEWSTCICVHITALTIPDLSALPQPISDHLNSQAIKSGLVLGSQDGG

SEQ ID NO: 23865 - DNA, 1758 bp, Muscodor strobelii
  misc_feature: SGI cDNA ID NO. 568127
  misc_feature: Elevated expression when VOC is produced
  misc_feature: Encodes the peptide sequence at SEQ ID NO 23866
atggcgtttctatcttgggaagaaaaagccgccgcgaagcgggcggatacgctgaataagatcccaacagagtggagacttagtgcaaccaaccttgccaaagcggagtctctaagagatattactggcttcatccaacagttcttagatgctgatgatatagcaatcgttacgaaggacagcgttgagatcgtggacaatatcaagaaggggatttggacatctgtcaaagtcacgactgcattctgcaagacggctgcctatgcacatcagattggcaattgtctccatgagatcttcttcgatcgggccctcgaacgtgcagcatggctcgactctcaattcgcaaaagacccctcgagtgttggcccgctgcatggtcttccaatcagtctgaaagatcaatttcatgtcaaaggcgttgatacaacaatgggctatgtcggatggattggaagtaatatgggcattaaagaccccagtcaagcccacaaagtcgaaagtcagatcacgactgaacttctgtctctcggagcagttctatactgcaaaaccagcttaccccaaacactactaattgccgacaccatgaataatattttcggccgagcccggaacccatataacaagaacttatcatgtggcggttcatccggcggtgaaggtatcttacagtcgcttcgcggtagcacgctcggcgttggttcggatattgggggatctgttcgcattcccgcaggcttctgcggcatattctgtttgaaacctacgccagaaagactctcgtaccgtgatgccgcaaacaccaatcctggtcagaatacgtatcgctgtacctttggcttcatgagtacctcgttaggtggactcaacttactgctgcgatcaaatttgtctaccaagccttggcttagagatccagctgtcgttccaatccctttccgagatgacatagtcgaagagtacgagtcaagagcaaagcctgatggaaccgcgaccacttcgaaaagaccattaaaactcggtgtattgtggacagatgattatgtccaacctcatcctcctatcacccgtggcctacatgccgttgttgacgccatgacaagtgccgggcataaggttgtcgactggaaaccaccaagtcaccaacgtggggacaacattcactatcaattcttaatcgcagatggggcacgcgacattcatgatcacctccagctctccggagaaccccttatcgaagaattgaaagatgagtttgcgctcagggagccaatgagcttactcaaatatcaagactatacactgcagggtcttgactacgaatgcggttactcggactactggaactcgaccgccggccaggatgatggacaaatcgtagatgcggtcatcatgcctgtggcgccgcacgcagccgccatacatgggaagtactactatagagcgtacaccgagacgatcaaccttctgaactatagcgtggcggtcatcccagtcactaaagctgacaaagacatcgatgtcgttgataattcgtatcagccaacaaatgatctagacaagaagaactgggaagcatacgatcctgagatttacgatggcgcacctgttggtattcagcttgtggctaggaagttcgaagatgagaagatacttgctattgcaaagatcgttgttgctgctatggaaactatgaagaagaagaagaccgcttcatcaaagaaagcagcaggtcctgtaatgagccgattgtaa

SEQ ID NO: 23866 - protein, 585 aa, Muscodor strobelii
  misc_feature: SGI Peptide ID NO. 568127
  misc_feature (77)..(553): Pfam Id: PF01425 Pfam Desc: Amidase
  misc_feature (77)..(398): Pfam Id: PF01425 Pfam Desc: Amidase
  misc_feature (461)..(553): Pfam Id: PF01425 Pfam Desc: Amidase
  misc_feature (4)..(563): NCBI GI: 85105556 Blast Desc: NCU10409 [Neurospora crassa OR74A] gi|28923580|gb|EAA32754.1| conserved [Neurospora crassa OR74A]
  misc_feature (1)..(564): NCBI GI: 256726647 Blast Desc: NECHADRAFT_75861 [Nectria haematococca mpVI 77-13-4]
  misc_feature (5)..(559): NCBI GI: 46116242 Blast Desc: FG03963.1 [Gibberella zeae PH-1]
  misc_feature (5)..(568): NCBI GI: 238845319 Blast Desc: general amidase [Microsporum canis CBS 113480]
  misc_feature (5)..(559): NCBI GI: 67902632 Blast Desc: AN8303.2 [Aspergillus nidulans FGSC A4] gi|40747712|gb|EAA66868.1| AN8303.2 [Aspergillus nidulans FGSC A4] gi|259484227|tpe|CBF80268.1| TPA: conserved [Aspergillus FGSC
  misc_feature (6)..(564): NCBI GI: 154292614 Blast Desc: BC1G_14633 [Botryotinia fuckeliana B05.10] gi|150845847|gb|EDN21040.1| BC1G_14633 [Botryotinia fuckeliana B05.10]
  misc_feature (6)..(566): NCBI GI: 225557486 Blast Desc: amidase [Ajellomyces capsulatus G186AR]
  misc_feature (1)..(559): NCBI GI: 238487898 Blast Desc: general amidase GmdA, [Aspergillus flavus NRRL3357] gi|220700066|gb|EED56405.1| general amidase GmdA, [Aspergillus flavus NRRL3357]
  misc_feature (6)..(569): NCBI GI: 156060317 Blast Desc: SS1G_02297 [Sclerotinia sclerotiorum 1980] gi|154699705|gb|EDN99443.1| SS1G_02297 [Sclerotinia sclerotiorum 1980]
  misc_feature (1)..(557): NCBI GI: 145243556 Blast Desc: An11g02980 [Aspergillus niger] gi|134078977|emb|CAK40630.1| protein product [Aspergillus niger]
  misc_feature (1)..(550): SWISSPROT Homolog: EC 3.5.1.4 Amidase
  misc_feature: Useful for introducing or modulating the production of volatile compounds
MAFLSWEEKAAAKRADTLNKIPTEWRLSATNLAKAESLRDITGFIQQFLDADDIAIVTKDSVEIVDNIKKGIWTSVKVTTAFCKTAAYAHQIGNCLHEIFFDRALERAAWLDSQFAKDPSSVGPLHGLPISLKDQFHVKGVDTTMGYVGWIGSNMGIKDPSQAHKVESQITTELLSLGAVLYCKTSLPQTLLIADTMNNIFGRARNPYNKNLSCGGSSGGEGILQSLRGSTLGVGSDIGGSVRIPAGFCGIFCLKPTPERLSYRDAANTNPGQNTYRCTFGFMSTSLGGLNLLLRSNLSTKPWLRDPAVVPIPFRDDIVEEYESRAKPDGTATTSKRPLKLGVLWTDDYVQPHPPITRGLHAVVDAMTSAGHKVVDWKPPSHQRGDNIHYQFLIADGARDIHDHLQLSGEPLIEELKDEFALREPMSLLKYQDYTLQGLDYECGYSDYWNSTAGQDDGQIVDAVIMPVAPHAAAIHGKYYYRAYTETINLLNYSVAVIPVTKADKDIDVVDNSYQPTNDLDKKNWEAYDPEIYDGAPVGIQLVARKFEDEKILAIAKIVVAAMETMKKKKTASSKKAAGPVMSRL

SEQ ID NO: 23867 - DNA, 1866 bp, Muscodor strobelii
  misc_feature: SGI EST ID NO. CUFF.56158.0
  misc_feature: Variant of the nucleotide sequence at SEQ ID NO 23865
gaaaaagccgccgcgaagcgggcggatacgctgaataagatcccaacagagtggagacttagtgcaaccaaccttgccaaagcggagtctctaagagatattactggcttcatccaacagttcttagatgctgatgatatagcaatcgttacgaaggacagcgttgagatcgtggacaatatcaagaaggggatttggacatctgtcaaagtcacgactgcattctgcaagacggctgcctatgcacatcagattggcaattgtctccatgagatcttcttcgatcgggccctcgaacgtgcagcatggctcgactctcaattcgcaaaagacccctcgagtgttggcccgctgcatggtcttccaatcagtctgaaagatcaatttcatgtcaaaggcgttgatacaacaatgggctatgtcggatggattggaagtaatatgggcattaaagaccccagtcaagcccacaaagtcgaaagtcagatcacgactgaacttctgtctctcggagcagttctatactgcaaaaccagcttaccccaaacactactaattgccgacaccatgaataatattttcggccgagcccggaacccatataacaagaacttatcatgtggcggttcatccggcggtgaaggtatcttacagtcgcttcgcggtagcacgctcggcgttggttcggatattgggggatctgttcgcattcccgcaggcttctgcggcatattctgtttgaaacctacgccagaaagactctcgtaccgtgatgccgcaaacaccaatcctggtcagaatacgtatcgctgtacctttggcttcatgagtacctcgttaggtggactcaacttactgctgcgatcaaatttgtctaccaagccttggcttagagatccagctgtcgttccaatccctttccgagatgacatagtcgaagagtacgagtcaagagcaaagcctgatggaaccgcgaccacttcgaaaagaccattaaaactcggtgtattgtggacagatgattatgtccaacctcatcctcctatcacccgtggcctacatgccgttgttgacgccatgacaagtgccgggcataaggttgtcgactggaaaccaccaagtcaccaacgtggggacaacattcactatcaattcttaatcgcagatggggcacgcgacattcatgatcacctccagctctccggagaaccccttatcgaagaattgaaagatgagtttgcgctcagggagccaatgagcttactcaaatatcaagactatacactgcagggtcttgactacgaatgcggttactcggactactggaactcgaccgccggccaggatgatggacaaatcgtagatgcggtcatcatgcctgtggcgccgcacgcagccgccatacatgggaagtactactatagagcgtacaccgagacgatcaaccttctgaactatagcgtggcggtcatcccagtcactaaagctgacaaagacatcgatgtcgttgataattcgtatcagccaacaaatgatctagacaagaagaactgggaagcatacgatcctgagatttacgatggcgcacctgttggtattcagcttgtggctaggaagttcgaagatgagaagatacttgctattgcaaagatcgttgttgctgctatggaaactatgaagaagaagaagaccgcttcatcaaagaaagcagcaggtcctgtaatgagccgattgtaataggcaacgttgtgcgggtcgcaaacagtgagctttgatcggtgcgggttgagagacccaaagctactaaatcgtatatacctcttagtaatgatatgcccagtcatgatgaagcgtgggtacttttca

SEQ ID NO: 23868 - DNA, 1737 bp, Muscodor strobelii
  misc_feature: SGI cDNA ID NO. 568128
  misc_feature: Encodes the peptide sequence at SEQ ID NO 23869
atggcgtttctatcttgggaagaaaaagccgccgcgaagcgggcggatacgctgaataagatcccaacagagtggagacttagtgcaaccaaccttgccaaagcggagtctctaagagatattactggcttcatccaacagttcttagatgctgatgatatagcaatcgttacgaaggacagcgttgagatcgtggacaatatcaagaaggggatttggacatctgtcaaagtcacgactgcattctgcaagacggctgcctatgcacatcagattggcaattgtctccatgagatcttcttcgatcgggccctcgaacgtgcagcatggctcgactctcaattcgcaaaagacccctcgagtgttggcccgctgcatggtcttccaatcagtctgaaagatcaatttcatgtcaaaggcgttgatacaacaatgggctatgtcggatggattggaagtaatatgggcattaaagaccccagtcaagcccacaaagtcgaaagtcagatcacgactgaacttctgtctctcggagcagttctatactgcaaaaccagcttaccccaaacactactaattgccgacaccatgaataatattttcggccgagcccggaacccatataacaagaacttatcatgtggcggttcatccggcggtgaaggtatcttacagtcgcttcgcggtagcacgctcggcgttggttcggatattgggggatctgttcgcattcccgcaggcttctgcggcatattctgtttgaaacctacgccagaaagactctcgtaccgtgatgccgcaaacaccaatcctggtcagaatacgtatcgctgtacctttggcttcatgagtacctcgttaggtggactcaacttactgctgcgatcaaatttgtctaccaagccttggcttagagatccagctgtcgttccaatccctttccgagatgacatagtcgaagagtacgagtcaagagcaaagcctgatggaaccgcgaccacttcgaaaagaccattaaaactcggtgtattgtggacagatgattatgtccaacctcatcctcctatcacccgtggcctacatgccgttgttgacgccatgacaagtgccgggcataaggttgtcgactggaaaccaccaagtcaccaacgtggggacaacattcactatcaattcttaatcgcagatggggcacgcgacattcatgatcacctccagctctccggagaaccccttatcgaagaattgaaagatgagtttgcgctcagggagccaatgagcttactcaaatatcaagactatacactgcagggtcttgactacgaatgcggttactcggactactggaactcgaccgccggccaggatgatgaggcaagagagcacccatcactctcgatgcttaacaagctgacatatttgaaagcgtacaccgagacgatcaaccttctgaactatagcgtggcggtcatcccagtcactaaagctgacaaagacatcgatgtcgttgataattcgtatcagccaacaaatgatctagacaagaagaactgggaagcatacgatcctgagatttacgatggcgcacctgttggtattcagcttgtggctaggaagttcgaagatgagaagatacttgctattgcaaagatcgttgttgctgctatggaaactatgaagaagaagaagaccgcttcatcaaagaaagcagcaggtcctgtaatgagccgattgtaa

SEQ ID NO: 23869 - protein, 578 aa, Muscodor strobelii
  misc_feature: SGI Peptide ID NO. 568128
  misc_feature (77)..(546): Pfam Id: PF01425 Pfam Desc: Amidase
  misc_feature (77)..(398): Pfam Id: PF01425 Pfam Desc: Amidase
  misc_feature (477)..(546): Pfam Id: PF01425 Pfam Desc: Amidase
  misc_feature (4)..(556): NCBI GI: 85105556 Blast Desc: NCU10409 [Neurospora crassa OR74A] gi|28923580|gb|EAA32754.1| conserved [Neurospora crassa OR74A]
  misc_feature (1)..(557): NCBI GI: 256726647 Blast Desc: NECHADRAFT_75861 [Nectria haematococca mpVI 77-13-4]
  misc_feature (5)..(552): NCBI GI: 46116242 Blast Desc: FG03963.1 [Gibberella zeae PH-1]
  misc_feature (5)..(561): NCBI GI: 238845319 Blast Desc: general amidase [Microsporum canis CBS 113480]
  misc_feature (5)..(552): NCBI GI: 67902632 Blast Desc: AN8303.2 [Aspergillus nidulans FGSC A4] gi|40747712|gb|EAA66868.1| AN8303.2 [Aspergillus nidulans FGSC A4] gi|259484227|tpe|CBF80268.1| TPA: conserved [Aspergillus FGSC
  misc_feature (6)..(557): NCBI GI: 154292614 Blast Desc: BC1G_14633 [Botryotinia fuckeliana B05.10] gi|150845847|gb|EDN21040.1| BC1G_14633 [Botryotinia fuckeliana B05.10]
  misc_feature (6)..(559): NCBI GI: 225557486 Blast Desc: amidase [Ajellomyces capsulatus G186AR]
  misc_feature (6)..(562): NCBI GI: 156060317 Blast Desc: SS1G_02297 [Sclerotinia sclerotiorum 1980] gi|154699705|gb|EDN99443.1| SS1G_02297 [Sclerotinia sclerotiorum 1980]
  misc_feature (1)..(552): NCBI GI: 238487898 Blast Desc: general amidase GmdA, [Aspergillus flavus NRRL3357] gi|220700066|gb|EED56405.1| general amidase GmdA, [Aspergillus flavus NRRL3357]
  misc_feature (1)..(552): NCBI GI: 169769777 Blast Desc: [Aspergillus oryzae RIB40] gi|83767217|dbj|BAE57356.1| protein product [Aspergillus oryzae]
  misc_feature (1)..(543): SWISSPROT Homolog: EC 3.5.1.4 Amidase
MAFLSWEEKAAAKRADTLNKIPTEWRLSATNLAKAESLRDITGFIQQFLDADDIAIVTKDSVEIVDNIKKGIWTSVKVTTAFCKTAAYAHQIGNCLHEIFFDRALERAAWLDSQFAKDPSSVGPLHGLPISLKDQFHVKGVDTTMGYVGWIGSNMGIKDPSQAHKVESQITTELLSLGAVLYCKTSLPQTLLIADTMNNIFGRARNPYNKNLSCGGSSGGEGILQSLRGSTLGVGSDIGGSVRIPAGFCGIFCLKPTPERLSYRDAANTNPGQNTYRCTFGFMSTSLGGLNLLLRSNLSTKPWLRDPAVVPIPFRDDIVEEYESRAKPDGTATTSKRPLKLGVLWTDDYVQPHPPITRGLHAVVDAMTSAGHKVVDWKPPSHQRGDNIHYQFLIADGARDIHDHLQLSGEPLIEELKDEFALREPMSLLKYQDYTLQGLDYECGYSDYWNSTAGQDDEAREHPSLSMLNKLTYLKAYTETINLLNYSVAVIPVTKADKDIDVVDNSYQPTNDLDKKNWEAYDPEIYDGAPVGIQLVARKFEDEKILAIAKIVVAAMETMKKKKTASSKKAAGPVMSRL

SEQ ID NO: 23870 - DNA, 1866 bp, Muscodor strobelii; identical to SEQ ID NO: 23867
  misc_feature: SGI EST ID NO. CUFF.56158.0
  misc_feature: Variant of the nucleotide sequence at SEQ ID NO 23868

SEQ ID NO: 23871 - DNA, 1170 bp, Muscodor strobelii
  misc_feature: SGI cDNA ID NO. 568129
  misc_feature: Encodes the peptide sequence at SEQ ID NO 23872
atggccacgttttccatgccaaacgccgatcagtatctaacaaaccaatggctcgttcctagcgagacatggaataactctcgaccctctcttgacacacatgttaagtggcttgacacctctgaggtgaaaagcaccgatggtaaaactctaaattcatcgttggcggctgttataacgacgccacactggtggtggacgacgatgagcgacgggtctgaagaagaagtagcgggcttggccgtgtcatcgtgtattatcgacgcacgctgggtgactgttgcgagcgtcatttttgatgcaaaagttgacacgatagccagagatactatcacggagtggctccggagcaccaatcttaacaggacctcgaaatctgcgttgccgtcatggcaggttacatcatctattcatattgggctcgactgggttgaggaggtggacacgttggcttataaggataagaatgacacaatcagtgtcatagaaagctcgctccagcaggccatcagccatcacaccagcgacaacggcactgtgtttggagagtttataccctccaatggaagatatggtcccgacggcgtggccgaggatatcgcggttattctcagtgtcagaatcgccgattggctctcgcggtccacgacgagggacacgaacttcacagctctctcaatttcccaagacagcattttctcaacaatagacttgatatcgcagagacatcccaaaccggttatcattaattcgaccgaatcgttttcgaacgatcaaacagaagtcgttttcgaggttcagcgctacggatatggatatgggctgaataccagcactatctggttctctgtgataatattgctcttgcataccgtattggtcgtcatatatttcggatactcgtttaagttctggtatttgagaggcgggtggactagtgcggcgtggggcggcattggggagctggttgcattggccatttcttcgccgccggcagacgagatgcgcaactcaggcgcaggtattgaacggtcaagaacatggatgacgaaactaagaatccgagagaaagatcttgacccagatcgaattgagttggttgttggaaatcgaggcggtcagctcgtcaaatcggatcatttgttgcgacccgacaagaagtatgcctga

SEQ ID NO: 23872 - protein, 389 aa, Muscodor strobelii
  misc_feature: SGI Peptide ID NO. 568129
  misc_feature (137)..(370): NCBI GI: 46113732 Blast Desc: FG02940.1 [Gibberella zeae PH-1]
  misc_feature (256)..(373): NCBI GI: 46134193 Blast Desc: FG09236.1 [Gibberella zeae PH-1]
  misc_feature (254)..(388): NCBI GI: 169624463 Blast Desc: SNOG_15491 [Phaeosphaeria nodorum SN15] gi|111056036|gb|EAT77156.1| SNOG_15491 [Phaeosphaeria nodorum SN15]
  misc_feature (253)..(358): NCBI GI: 189201687 Blast Desc: conserved [Pyrenophora tritici-repentis Pt-1C-BFP] gi|187984279|gb|EDU49767.1| conserved [Pyrenophora tritici-repentis Pt-1C-BFP]
  misc_feature (22)..(367): NCBI GI: 240106489 Blast Desc: CPC735_060520 [Coccidioides posadasii C735 delta SOWgp]
  misc_feature (262)..(389): NCBI GI: 212533423 Blast Desc: PMAA_073960 [Penicillium marneffei ATCC 18224] gi|210072232|gb|EEA26321.1| PMAA_073960 [Penicillium marneffei ATCC 18224]
  misc_feature (22)..(367): NCBI GI: 119191402 Blast Desc: CIMG_00078 [Coccidioides immitis RS]
MATFSMPNADQYLTNQWLVPSETWNNSRPSLDTHVKWLDTSEVKSTDGKTLNSSLAAVITTPHWWWTTMSDGSEEEVAGLAVSSCIIDARWVTVASVIFDAKVDTIARDTITEWLRSTNLNRTSKSALPSWQVTSSIHIGLDWVEEVDTLAYKDKNDTISVIESSLQQAISHHTSDNGTVFGEFIPSNGRYGPDGVAEDIAVILSVRIADWLSRSTTRDTNFTALSISQDSIFSTIDLISQRHPKPVIINSTESFSNDQTEVVFEVQRYGYGYGLNTSTIWFSVIILLLHTVLVVIYFGYSFKFWYLRGGWTSAAWGGIGELVALAISSPPADEMRNSGAGIERSRTWMTKLRIREKDLDPDRIELVVGNRGGQLVKSDHLLRPDKKYA

SEQ ID NO: 23873 - DNA, 492 bp, Muscodor strobelii
  misc_feature: SGI EST ID NO. CUFF.56160.0
  misc_feature: Variant of the nucleotide sequence at SEQ ID NO 23871
cttgacacacatgttaagtggcttgacacctctgaggtgaaaagcaccgatggtaaaactctaaattcatcgttggcggctgttataacgacgccacactggtggtggacgacgatgagcgacgggtctgaagaagaagtagcgggcttggccgtgtcatcgtgtattatcgacgcacgctgggtgactgttgcgagcgtcatttttgatgcaaaagttgacacgatagccagagatactatcacggagtggctccggagcaccaatcttaacaggacctcgaaatctgcgttgccgtcatggcaggttacatcatctattcatattgggctcgactgggttgaggaggtggacacgttggcttataaggataagaatgacacaatcagtgtcatagaaagctcgctccagcaggccatcagccatcacaccagcgacaacggcactgtgtttggagagtttataccctccaatggaagatatggtcccgac

SEQ ID NO: 23874 - DNA, 552 bp, Muscodor strobelii
  misc_feature: SGI cDNA ID NO. 568130
  misc_feature: Encodes the peptide sequence at SEQ ID NO 23875
atgtcgctcaccacacaagatcatttcgaaatagctagaatcctgtacaacataggcctatcacaagacatcttagactggaaactcttcaaatcctgctgggcaacgtctcaaccacttcacatcgacttatcgtctcatctgtcgcaatttacaccgagccagaccttcacgcccgaagaactcgcggagacaagccacaactatctcgcagggtttgatgggacgcagcatgttattacgaatgtcattatcgatcccgttgataccaacacgaacagcaatggtgataaggtcacgacacaagtcagcgctaaagcgatgattaccgcttatcacgagtacaagcgaccggtggaggaggggccgagcatggctattgtgagaggaacgtgggatgttacagttgtgagggaagatagggactggaaggcaagtggtattaaagttgtgagactcgtcggtgtggagggcgatgagaagctttatggacttgctaaggagaggcaggagagaggggagggtagagcttgggttaggggttggaaatag

SEQ ID NO: 23875 - protein, 183 aa, Muscodor strobelii
  misc_feature: SGI Peptide ID NO. 568130
MSLTTQDHFEIARILYNIGLSQDILDWKLFKSCWATSQPLHIDLSSHLSQFTPSQTFTPEELAETSHNYLAGFDGTQHVITNVIIDPVDTNTNSNGDKVTTQVSAKAMITAYHEYKRPVEEGPSMAIVRGTWDVTVVREDRDWKASGIKVVRLVGVEGDEKLYGLAKERQERGEGRAWVRGWK

SEQ ID NO: 23876 - DNA, 492 bp, Muscodor strobelii
  misc_feature: SGI cDNA ID NO. 568131
  misc_feature: Encodes the peptide sequence at SEQ ID NO 23877
atgattggagacctggatcctcttcctgaacatggtctcttaccagtagttaaattgatcgatttcggaaacgcacaagagctacagcctccggaagacgccgcgtctatgaaccttgctgcggcatcaaatttaatattagccattataactcgtcaacctggcctcacgatcaccttggggtttggagaatggcaaggcattcgtactactgctcgccaactcattcccaacgttaccatagatctagaaaacaataatgataacaacgtcgagaatgatccatactggcacgtggatatggagatacgggatatgatttgtcggaccactgcgacagattgggatgaacgaatgacgcttactcaagcgtacaacatcgcgaggagaggtgttagaaagccagaggccgcgtttactttgaatgggacagcggagtcggataatgatatcaggcaatttgttcagcagtttattctcaaccctgcttag

SEQ ID NO: 23877 - protein, 163 aa, Muscodor strobelii
  misc_feature: SGI Peptide ID NO. 568131
MIGDLDPLPEHGLLPVVKLIDFGNAQELQPPEDAASMNLAAASNLILAIITRQPGLTITLGFGEWQGIRTTARQLIPNVTIDLENNNDNNVENDPYWHVDMEIRDMICRTTATDWDERMTLTQAYNIARRGVRKPEAAFTLNGTAESDNDIRQFVQQFILNPA

SEQ ID NO: 23878 - DNA, 693 bp, Muscodor strobelii
  misc_feature: SGI cDNA ID NO. 568132
  misc_feature: Encodes the peptide sequence at SEQ ID NO 23879
atgtctgaacatagagacgactcttcaggcggctcttcaggctcggcgggctcgggctcaggcacgggctcagggtctggtggctcgggctatttccagcaagaagcagaagcaaagcgggcggatctagtggcccatttcgctcctcaacatgagcgctatcgcgtcgacggtatcatagggtacggcgcgaatggcgtgacgcttcgtgtactcgaattgggtgctatcatgcctgttgtcgcgcctatgaatcagcctaaggggcttaaacgaaaagtgcgagatttctcgtctcgatcgtggaatactctcacaaaaccgttcaagaagatgggtatatctaatactcgagaaaatgatgagggggaaggagaagaggaaggaatagctatgtttgaagggtcccctgaacccatggaacgaggggtgctgaggagaatgtgtctcaagctgcccttgggcaataacgtgatcggtgacacaattgactcgctgaggaccgaaattaggaccatgaggtcggttaatggcgggaagcacctcgctggacttattgcttatcaggatgatccgcgatacgtcgccaaccgacttcgaaaccttccacccagacagggcgatttcttggcaggatggagcggtccggtggtcgcgatggaatgtgagctgccctttaactcgagcgaatga

SEQ ID NO: 23879 - protein, 230 aa, Muscodor strobelii
  misc_feature: SGI Peptide ID NO. 568132
MSEHRDDSSGGSSGSAGSGSGTGSGSGGSGYFQQEAEAKRADLVAHFAPQHERYRVDGIIGYGANGVTLRVLELGAIMPVVAPMNQPKGLKRKVRDFSSRSWNTLTKPFKKMGISNTRENDEGEGEEEGIAMFEGSPEPMERGVLRRMCLKLPLGNNVIGDTIDSLRTEIRTMRSVNGGKHLAGLIAYQDDPRYVANRLRNLPPRQGDFLAGWSGPVVAMECELPFNSSE

SEQ ID NO: 23880 - DNA, 1677 bp, Muscodor strobelii
  misc_feature: SGI cDNA ID NO. 568133
  misc_feature: Reduced expression when VOC is produced
  misc_feature: Encodes the peptide sequence at SEQ ID NO 23881
atgcttagaagcccaccttcagccgtcgtccagtcgagaaagcttgtctccaccgtcacccgaatccaccagctcgacacccctaccgtctcttgctccacgcccacctactctacctctactcgatcccatatcatgtcggccgaggaagctattcattctccttctcctgactacacggaatcctcagagccccctcgccgcgcgtcgcaaaagcccaccgccccttcaggcagaccacctcccagagcgcccggcatgaacttcttccctttaggctacaaagaagcggtgcaccaatggtggactagcgttacccccacaatcgcagaacgcaatgtcatttcctgtataccgcatctgcgcgaagccgttgccgccgagggccatgctctcacccaagtaccgtctgcagagcatcccggccagacacggacctctgctaaaatcgatccctatggacccagggtatggaagtcgaccatggtggagttatctggcaagaatcgtggcttaaacgagttctcggtcgagcgcgtcggtgagcctgttgatgatgcgcttgtcatgctccacggttatggagctgggttgggattctactataagaacttcgagccccttagtcggctgactggctggaaactctatgcgcttgattggctaggaatgggcaactcaaaacgacctcctttcaaagtcaatgccaaagaccccaaggagaagacaaaagaggcagagaactggtttgtcgactcactggaagaatggaggaagatccgaaagcttgacaagatgaccatcatcggccactctcttggcggatatcttgccgtatcatacgcgttgaaatatccaggccatattaagaagcttatcctcgcctctcctgtcggtgttccagaagacccctatgctatgaacgcagagatgccggagccgtctgaatcgaccttccaggaggagataaccatggatcagcaagagacaactacacatcacaccaacaacgacctacagagtacgaaaaacagaactgccggcacaaccaacgccaatgccccgaaaaagagaccgtatccgagctggctcgtctggctgtgggatgccaatatctcacctttcagcattgtccgcgctgctggaccactgggaccccgcttcgtatcaggatggacttctcgccgcttcaaccatctaccagaggaggagagacaaactttacatgattatgcctactcattattcagacagaagggcagtggagaatacattctcgcatacgtccttgccccgggagctcacgcccgtgaccccgtgatcaaccgcatccaaggtgtagggaggcaagtcatcacgcccgcgaccgaaaccgagccggccgtcaaggagcacggttttcccattgtcttcatgtacggcgaaaacgactggatggacgttgcaggcggtcttgcatgcgaagagaagctcaagaaggtgaatgaaaaggctctgcttcaagcgaacgaggaagatcgcaagaaggaaaatgggtcatgcaaggttgtcgtcacatccaaggctggtcatcatctttatcttgataatccggacgagttcaacagctttattatcaaggagctggaggatactaggagacagacgcttaaggagaaggctcagtcgcagctatga

SEQ ID NO: 23881 - protein, 558 aa, Muscodor strobelii
  misc_feature: SGI Peptide ID NO. 568133
  misc_feature (214)..(540): Pfam Id: PF00561 Pfam Desc: alpha/beta hydrolase fold
  misc_feature (214)..(311): Pfam Id: PF00561 Pfam Desc: alpha/beta hydrolase fold
  misc_feature (1)..(550): NCBI GI: 116194730 Blast Desc: CHGG_03963 [Chaetomium globosum CBS 148.51] gi|88179876|gb|EAQ87344.1| CHGG_03963 [Chaetomium globosum CBS 148.51]
  misc_feature (78)..(545): NCBI GI: 171683407 Blast Desc: protein product [Podospora anserina] gi|170941663|emb|CAP67317.1| protein product [Podospora anserina]
  misc_feature (70)..(551): NCBI GI: 261352488 Blast Desc: abhydrolase domain-containing protein [Verticillium albo-atrum VaMs.102]
  misc_feature (60)..(558): NCBI GI: 85108525 Blast Desc: NCU06332 [Neurospora crassa OR74A] gi|28924203|gb|EAA33358.1| NCU06332 [Neurospora crassa OR74A]
  misc_feature (38)..(554): NCBI GI: 39975833 Blast Desc: MGG_06157 [Magnaporthe grisea 70-15] gi|145011534|gb|EDJ96190.1| MGG_06157 [Magnaporthe grisea 70-15]
  misc_feature (66)..(546): NCBI GI: 256726921 Blast Desc: [Nectria haematococca mpVI 77-13-4]
  misc_feature (89)..(547): NCBI GI: 46121259 Blast Desc: FG05008.1 [Gibberella zeae PH-1]
  misc_feature (68)..(554): NCBI GI: 156045059 Blast Desc: SS1G_09718 [Sclerotinia sclerotiorum 1980] gi|154694113|gb|EDN93851.1| SS1G_09718 [Sclerotinia sclerotiorum 1980]
  misc_feature (68)..(554): NCBI GI: 154298382 Blast Desc: BC1G_11646 [Botryotinia fuckeliana B05.10] gi|150858099|gb|EDN33291.1| BC1G_11646 [Botryotinia fuckeliana B05.10]
  misc_feature (55)..(544): NCBI GI: 119189939 Blast Desc: CIMG_05017 [Coccidioides immitis RS]
  misc_feature (189)..(542): SWISSPROT Homolog: EC 2.3.1.51 1-acylglycerol-3-phosphate O-acyltransferase
  misc_feature: Useful for introducing or modulating the production of volatile compounds
MLRSPPSAVVQSRKLVSTVTRIHQLDTPTVSCSTPTYSTSTRSHIMSAEEAIHSPSPDYTESSEPPRRASQKPTAPSGRPPPRAPGMNFFPLGYKEAVHQWWTSVTPTIAERNVISCIPHLREAVAAEGHALTQVPSAEHPGQTRTSAKIDPYGPRVWKSTMVELSGKNRGLNEFSVERVGEPVDDALVMLHGYGAGLGFYYKNFEPLSRLTGWKLYALDWLGMGNSKRPPFKVNAKDPKEKTKEAENWFVDSLEEWRKIRKLDKMTIIGHSLGGYLAVSYALKYPGHIKKLILASPVGVPEDPYAMNAEMPEPSESTFQEEITMDQQETTTHHTNNDLQSTKNRTAGTTNANAPKKRPYPSWLVWLWDANISPFSIVRAAGPLGPRFVSGWTSRRFNHLPEEERQTLHDYAYSLFRQKGSGEYILAYVLAPGAHARDPVINRIQGVGRQVITPATETEPAVKEHGFPIVFMYGENDWMDVAGGLACEEKLKKVNEKALLQANEEDRKKENGSCKVVVTSKAGHHLYLDNPDEFNSFIIKELEDTRRQTLKEKAQSQL

SEQ ID NO: 23882 - DNA, 2266 bp, Muscodor strobelii
  misc_feature: SGI EST ID NO. CUFF.56371.1
  misc_feature: Variant of the nucleotide sequence at SEQ ID NO 23880
agcggttccactacgtcaactccgtatcgctaatgttgttcgagactgaaatcctaattgggttggattgagcgcggcaattaccagattgcaagctacggatgcgtgaaatgcacgatatcatcgaccaagatagcagcgcaacgcctgtccagacccccctaacaactcggcggccttaggcaaccccgtatcgcacccgtagctgatactcgtcgtcatcactccgctggctccccctgtccgtgtcttggagcggactatcgcgttctttatgtctccgtagccgtagagatataaggcggcgtggtgtcagccacctcgccaccctctttggcccggaatgcttagaagcccaccttcagccgtcgtccagtcgagaaagcttgtctccaccgtcacccgaatccaccagctcgacacccctaccgtctcttgctccacgcccacctactctacctctactcgatcccatatcatgtcggccgaggaagctattcattctccttctcctgactacacggaatcctcagagccccctcgccgcgcgtcgcaaaagcccaccgccccttcaggcagaccacctcccagagcgcccggcatgaacttcttccctttaggctacaaagaagcggtgcaccaatggtggactagcgttacccccacaatcgcagaacgcaatgtcatttcctgtataccgcatctgcgcgaagccgttgccgccgagggccatgctctcacccaagtaccgtctgcagagcatcccggccagacacggacctctgctaaaatcgatccctatggacccagggtatggaagtcgaccatggtggagttatctggcaagaatcgtggcttaaacgagttctcggtcgagcgcgtcggtgagcctgttgatgatgcgcttgtcatgctccacggttatggagctgggttgggattctactataagaacttcgagccccttagtcggctgactggctggaaactctatgcgcttgattggctaggaatgggcaactcaaaacgacctcctttcaaagtcaatgccaaagaccccaaggagaagacaaaagaggcagagaactggtttgtcgactcactggaagaatggaggaagatccgaaagcttgacaagatgaccatcatcggccactctcttggcggatatcttgccgtatcatacgcgttgaaatatccaggccatattaagaagcttatcctcgcctctcctgtcggtgttccagaagacccctatgctatgaacgcagagatgccggagccgtctgaatcgaccttccaggaggagataaccatggatcagcaagagacaactacacatcacaccaacaacgacctacagagtacgaaaaacagaactgccggcacaaccaacgccaatgccccgaaaaagagaccgtatccgagctggctcgtctggctgtgggatgccaatatctcacctttcagcattgtccgcgctgctggaccactgggaccccgcttcgtatcaggatggacttctcgccgcttcaaccatctaccagaggaggagagacaaactttacatgattatgcctactcattattcagacagaagggcagtggagaatacattctcgcatacgtccttgccccgggagctcacgcccgtgaccccgtgatcaaccgcatccaaggtgtagggaggcaagtcatcacgcccgcgaccgaaaccgagccggccgtcaaggagcacggttttcccattgtcttcatgtacggcgaaaacgactggatggacgttgcaggcggtcttgcatgcgaagagaagctcaagaaggtgaatgaaaaggctctgcttcaagcgaacgaggaagatcgcaagaaggaaaatgggtcatgcaaggttgtcgtcacatccaaggctggtcatcatctttatcttgataatccggacgagttcaacagctttattatcaaggagctggaggatactaggagacagacgcttaaggagaaggctcagtcgcagctatgaactcttcatcttatgggtccgatttgatttgaaagcattgcatggcgtttgggcttgatacagggtagatcagaggtgctccatgagtggcctcacctcgttttttggaaaagataatcaatatactatataattagacctgtgactcggagatgatgagaagttaatgtttttctgtgtctatctagagaactgtggtagtggcagaggtacatattgggagaactccgtacttagtgcgcgcgc

SEQ ID NO: 23883 - DNA, 1251 bp, Muscodor strobelii
  misc_feature: SGI cDNA ID NO. 568134
  misc_feature: Encodes the peptide sequence at SEQ ID NO 23884
atggcggaccccctcgactctatcgtcaagggcgcaccgcagcctggccacgacgtctccgatcagcagcttggcaccagcggtgtcgacgactccaagcctggcgaccctctgaacagcgcgcccagttctccctccatgatctacctcaacatgctcatccttgaagcttccctgcgcgcccagtacctcgatctccgcgcccgtcgccggaaacacactttcttcctgacactactcgccgtgtggttggtcgggtttggctatgcacttttctttgcgccccgcgaagatggcagcggtgtcgggggctctgtctactgggtggtcgaagcaggctacaaggtgtgcttcattggtggagtcatgacagtaattctggtttgggcgacaggaatatgggatcgaggcatcagatggcctcgcaggtggtttgccatcgccaacaggggcttgcgcggcttcaatgccaagctggtcataatgcgaaggacctggcctatcgagctgatgtcgaccatcgtcttcttctttacctacggcattctgtctaagtcgaccagacagtaccgatacatagatccggaaatctcgcgcgaggtcgacaaagatcttaatctcagtggccctgatcacccacacatgccatttatcaatatcaataccgaagacgatcaacgtggtcacgaagaagacttggcaccgggtggcgattatgtcaaattacttctatatcccaagcccttctcacctaattttagagagaattgggagatctacaggaatgcgtattgggaacgagaaaacgaacgacgcgccctgctgcggcacaaactacagattcgcgataaagagatggccaaacgacgaagtccgtggttttggtggctacctttccagaagagggtcgaagagaagataccacgtatcgtaacatcggagccggagaagggccaccgtcgccgggcttctactgttgtgaaggagggcaagcgcaccagaagtggcagcgttcggcgaggtagtatctctgccggatcatcgcgcacttccactccgcccatggattcagacggtggcgtcagtcgcaaggcaagtacgggttctaatgcatcggagaagaaacgaaaaaagcatctatctacgaactcaaaatcaagacgatcaggaattgatagcagatcagcatcaccagaagtaccgtcgcctcttgcaagagaaagtagttttgacagcgattttgtctcatga

SEQ ID NO: 23884 - protein, 416 aa, Muscodor strobelii
  misc_feature: SGI Peptide ID NO. 568134
  misc_feature (40)..(284): Pfam Id: PF03907 Pfam Desc: Spo7-like protein
  misc_feature (40)..(166): Pfam Id: PF03907 Pfam Desc: Spo7-like protein
  misc_feature (1)..(409): NCBI GI: 171683409 Blast Desc: protein product [Podospora anserina] gi|170941664|emb|CAP67318.1| protein product [Podospora anserina]
  misc_feature (1)..(413): NCBI GI: 145603268 Blast Desc: MGG_06158 [Magnaporthe grisea 70-15] gi|145011533|gb|EDJ96189.1| MGG_06158 [Magnaporthe grisea 70-15]
  misc_feature (1)..(409): NCBI GI: 223974849 Blast Desc: [Zea mays]
  misc_feature (1)..(413): NCBI GI: 85108521 Blast Desc: NCU06331 [Neurospora crassa OR74A] gi|28924202|gb|EAA33357.1| conserved [Neurospora crassa OR74A]
  misc_feature (1)..(409): NCBI GI: 46121261 Blast Desc: FG05009.1 [Gibberella zeae PH-1]
  misc_feature (1)..(409): NCBI GI: 256727490 Blast Desc: NECHADRAFT_4710 [Nectria haematococca mpVI 77-13-4]
  misc_feature (1)..(358): NCBI GI: 116194732 Blast Desc: CHGG_03964 [Chaetomium globosum CBS 148.51] gi|88179877|gb|EAQ87345.1| CHGG_03964 [Chaetomium globosum CBS 148.51]
  misc_feature (5)..(412): NCBI GI: 154298380 Blast Desc: BC1G_11645 [Botryotinia fuckeliana B05.10] gi|150858098|gb|EDN33290.1| BC1G_11645 [Botryotinia fuckeliana B05.10]
  misc_feature (5)..(412): NCBI GI: 156045057 Blast Desc: SS1G_09717 [Sclerotinia sclerotiorum 1980] gi|154694112|gb|EDN93850.1| SS1G_09717 [Sclerotinia sclerotiorum 1980]
  misc_feature (5)..(300): NCBI GI: 240111042 Blast Desc: CPC735_068770 [Coccidioides posadasii C735 delta SOWgp]
MADPLDSIVKGAPQPGHDVSDQQLGTSGVDDSKPGDPLNSAPSSPSMIYLNMLILEASLRAQYLDLRARRRKHTFFLTLLAVWLVGFGYALFFAPREDGSGVGGSVYWVVEAGYKVCFIGGVMTVILVWATGIWDRGIRWPRRWFAIANRGLRGFNAKLVIMRRTWPIELMSTIVFFFTYGILSKSTRQYRYIDPEISREVDKDLNLSGPDHPHMPFININTEDDQRGHEEDLAPGGDYVKLLLYPKPFSPNFRENWEIYRNAYWERENERRALLRHKLQIRDKEMAKRRSPWFWWLPFQKRVEEKIPRIVTSEPEKGHRRRASTVVKEGKRTRSGSVRRGSISAGSSRTSTPPMDSDGGVSRKASTGSNASEKKRKKHLSTNSKSRRSGIDSRSASPEVPSPLARESSFDSDFVS

SEQ ID NO: 23885 - DNA, 1857 bp, Muscodor strobelii
  misc_feature: SGI EST ID NO. CUFF.56199.0
  misc_feature: Variant of the nucleotide sequence at SEQ ID NO 23883
caggaccagcggcatccagccttgtcggacaaatatgacgtgcgctatcgcactttgattctcggttcacccatgcatcgtcgaacacacccacgcttaacagtccaatgattgtcccgcgcacttgacatcgccttccctactcaccgccagtctcgtaaaacacgtacaacacccacccggaatagagaacgaatgcgcccgtcaattcggtgactcacgtaaacgtgggcttacgaccctctccaccgggccgctgctgtcggctctctagaggatctccagggactcgctagggctctgcctgcctctccctctaccgtctgtcctttgcctcgcggcaccacacgcgaggcaccacacgcgggccgaaatggcggaccccctcgactctatcgtcaagggcgcaccgcagcctggccacgacgtctccgatcagcagcttggcaccagcggtgtcgacgactccaagcctggcgaccctctgaacagcgcgcccagttctccctccatgatctacctcaacatgctcatccttgaagcttccctgcgcgcccagtacctcgatctccgcgcccgtcgccggaaacacactttcttcctgacactactcgccgtgtggttggtcgggtttggctatgcacttttctttgcgccccgcgaagatggcagcggtgtcgggggctctgtctactgggtggtcgaagcaggctacaaggtgtgcttcattggtggagtcatgacagtaattctggtttgggcgacaggaatatgggatcgaggcatcagatggcctcgcaggtggtttgccatcgccaacaggggcttgcgcggcttcaatgccaagctggtcataatgcgaaggacctggcctatcgagctgatgtcgaccatcgtcttcttctttacctacggcattctgtctaagtcgaccagacagtaccgatacatagatccggaaatctcgcgcgaggtcgacaaagatcttaatctcagtggccctgatcacccacacatgccatttatcaatatcaataccgaagacgatcaacgtggtcacgaagaagacttggcaccgggtggcgattatgtcaaattacttctatatcccaagcccttctcacctaattttagagagaattgggagatctacaggaatgcgtattgggaacgagaaaacgaacgacgcgccctgctgcggcacaaactacagattcgcgataaagagatggccaaacgacgaagtccgtggttttggtggctacctttccagaagagggtcgaagagaagataccacgtatcgtaacatcggagccggagaagggccaccgtcgccgggcttctactgttgtgaaggagggcaagcgcaccagaagtggcagcgttcggcgaggtagtatctctgccggatcatcgcgcacttccactccgcccatggattcagacggtggcgtcagtcgcaaggcaagtacgggttctaatgcatcggagaagaaacgaaaaaagcatctatctacgaactcaaaatcaagacgatcaggaattgatagcagatcagcatcaccagaagtaccgtcgcctcttgcaagagaaagtagttttgacagcgattttgtctcatgatgaggagcacatgaacgacgcattctctgacacgtagctacataggcaaggcagctagaagttaaaaagaaacgcaatcatcaagtgaaccggcatttttgctctattgctcatggcaagaactatataatcatctcataagagtctcccggaacctaaatcataccgagtacggattgtctgtttcacaatgtggcagccaggcaggacacaaaatagatgaaattaccgaa

SEQ ID NO: 23886 - DNA, 1023 bp, Muscodor strobelii
  misc_feature: SGI cDNA ID NO. 568135
  misc_feature: Encodes the peptide sequence at SEQ ID NO 23887
atggaatcgactggctcagtgcccgcccacgctgatgggttcaacgctcttgtaggaacaagaatggcaatccccaacacatcctacgtaaaaagacctccgagtccgcccgctgttgagcttttgtcgccattcagcaaattctcggcaatcaagcatacgccaacctatgataatgtagaccccaaactcctcagtcgggaggattgggccttcatttcccgaagcggcgtggagatgaaagttattgataatgtcgctaactggacctaccaagaccgcaataatgctcaagagatcgtcgacggcctgtatttgggaccctccagaaaagcgcgtgatcgccaatggcttcaagagactggcatcacgatgcttgtcgctgcacgagactcccagcaagctagcgcaaacatcatggacgttagcaaagtcgctcaagagctgggtatcgaagctgcatatgtcgatgtttccggctactcagagttgatcgcttcgttccctgccacgatgagaaagatcaacactcacaaacttcgctatcgtcatatcaatgttgcgaatgcccagtggcacaatcagatggagactgattccgccgacctcccacgcgccaaggtcttgattttctgcgagacaggtaatgagagatccgccatagttgttgtcgcttatctcatggcggtgtacggcatgaccaccccattggcctgcagctttgtcattcagaaacgcttctgtgccagcatgcccgatgactcgaagcaaatgctcctagcgtacgaagaattattgagggcacagcgcaacgtgaaccactatgagcttgctgctgcccaacatggcacagacaccaacaactccctcattgccaagaagtcaaagagaggaatcgacgagactgtcggcgatgagcaggataccgatatggacggtgatggcggtatgactagcgctgaaagattagaccgagatcgctttcttaatcgaccggctttcgccccgtttcgcgacgattga

SEQ ID NO: 23887 - protein, 340 aa, Muscodor strobelii
  misc_feature: SGI Peptide ID NO. 568135
  misc_feature (96)..(265): Pfam Id: PF00782 Pfam Desc: Dual specificity phosphatase, catalytic domain
  misc_feature (207)..(265): Pfam Id: PF00782 Pfam Desc: Dual specificity phosphatase, catalytic domain
  misc_feature (22)..(339): NCBI GI: 256727886 Blast Desc: NECHADRAFT_83456 [Nectria haematococca mpVI 77-13-4]
  misc_feature (29)..(339): NCBI GI: 84871656 Blast Desc: FMI2 protein [Magnaporthe grisea]
  misc_feature (29)..(339): NCBI GI: 39975829 Blast Desc: MGG_06159 [Magnaporthe grisea 70-15] gi|145011532|gb|EDJ96188.1| MGG_06159 [Magnaporthe grisea 70-15]
  misc_feature (16)..(339): NCBI GI: 46132988 Blast Desc: FG09023.1 [Gibberella zeae PH-1]
  misc_feature (57)..(269): NCBI GI: 154296977 Blast Desc: BC1G_12577 [Botryotinia fuckeliana B05.10] gi|150843104|gb|EDN18297.1| BC1G_12577 [Botryotinia fuckeliana B05.10]
  misc_feature (29)..(339): NCBI GI: 261352346 Blast Desc: FMI2 protein [Verticillium albo-atrum VaMs.102]
  misc_feature (23)..(316): NCBI GI: 115491915 Blast Desc: [Aspergillus terreus NIH2624] gi|114197445|gb|EAU39145.1| [Aspergillus terreus NIH2624]
  misc_feature (57)..(339): NCBI GI: 259488713 Blast Desc: TPA: dual specificity protein phosphatase 3 (AFU_orthologue; AFUA_1G13040) [Aspergillus nidulans FGSC A4]
  misc_feature (86)..(339): NCBI GI: 121701381 Blast Desc: dual specificity protein phosphatase 3 [Aspergillus clavatus NRRL 1] gi|119397098|gb|EAW07529.1| dual specificity protein phosphatase 3 [Aspergillus clavatus NRRL 1]
  misc_feature (57)..(314): NCBI GI: 67517555 Blast Desc: AN0994.2 [Aspergillus nidulans FGSC A4] gi|40746406|gb|EAA65562.1| AN0994.2 [Aspergillus nidulans FGSC A4]
MESTGSVPAHADGFNALVGTRMAIPNTSYVKRPPSPPAVELLSPFSKFSAIKHTPTYDNVDPKLLSREDWAFISRSGVEMKVIDNVANWTYQDRNNAQEIVDGLYLGPSRKARDRQWLQETGITMLVAARDSQQASANIMDVSKVAQELGIEAAYVDVSGYSELIASFPATMRKINTHKLRYRHINVANAQWHNQMETDSADLPRAKVLIFCETGNERSAIVVVAYLMAVYGMTTPLACSFVIQKRFCASMPDDSKQMLLAYEELLRAQRNVNHYELAAAQHGTDTNNSLIAKKSKRGIDETVGDEQDTDMDGDGGMTSAERLDRDRFLNRPAFAPFRDD

SEQ ID NO: 23888 - DNA, 2202 bp, Muscodor strobelii
  misc_feature: SGI EST ID NO. CUFF.56202.0
  misc_feature: Variant of the nucleotide sequence at SEQ ID NO 23886
accgttggcaacgccttgttagctgccagtgaactcagcaaccgcgtcgagcttcaatgtctttgttccttcctcgaccactccctagttggtagtcgctctttccaattcagtcaaacaaatctacgccatcatgatcattggcggtgttgtgtcttgcaaatctgtttgccttctcaatttgaagatttgggaacagcactaacgtcaacattcttctcactcatatatatctcggtactctagctcaaggttcaatcggccgaatacactggatactatatacgatctctcctggagaatacatgtacagtcgcagctcccgtttccccaggagctattgaatgtgcttcaaccacttttatcggagctcaataattggcacctgcgaggttcctcacagcctcttcagtccttttgtgaaaacagccgcaccaccaaacagcattcctctccattcgttaccaggtcctagacgcagaggcgaacgagcaccacaatcagatttatttcacacgacgtgtgctagtggagacataaatactgcactctacaagaatacattcattccggccttggtgcaacacaatatggaatcgactggctcagtgcccgcccacgctgatgggttcaacgctcttgtaggaacaagaatggcaatccccaacacatcctacgtaaaaagacctccgagtccgcccgctgttgagcttttgtcgccattcagcaaattctcggcaatcaagcatacgccaacctatgataatgtagaccccaaactcctcagtcgggaggattgggccttcatttcccgaagcggcgtggagatgaaagttattgataatgtcgctaactggacctaccaagaccgcaataatgctcaagagatcgtcgacggcctgtatttgggaccctccagaaaagcgcgtgatcgccaatggcttcaagagactggcatcacgatgcttgtcgctgcacgagactcccagcaagctagcgcaaacatcatggacgttagcaaagtcgctcaagagctgggtatcgaagctgcatatgtcgatgtttccggctactcagagttgatcgcttcgttccctgccacgatgagaaagatcaacactcacaaacttcgctatcgtcatatcaatgttgcgaatgcccagtggcacaatcagatggagactgattccgccgacctcccacgcgccaaggtcttgattttctgcgagacaggtaatgagagatccgccatagttgttgtcgcttatctcatggcggtgtacggcatgaccaccccattggcctgcagctttgtcattcagaaacgcttctgtgccagcatgcccgatgactcgaagcaaatgctcctagcgtacgaagaattattgagggcacagcgcaacgtgaaccactatgagcttgctgctgcccaacatggcacagacaccaacaactccctcattgccaagaagtcaaagagaggaatcgacgagactgtcggcgatgagcaggataccgatatggacggtgatggcggtatgactagcgctgaaagattagaccgagatcgctttcttaatcgaccggctttcgccccgtttcgcgacgattgacgatatatacacggacattgatattcgcaatatcacgcataacattgatcaagcaagtgcgtctcacctggagaactcctaggagtacatccatggagcgtggcctactacgttccctggtcgttcctcatacgacaatttgcatagccgactttcttcggtgttttctcatcatgtcaagagttctatctgttctccagtggcatgagttttgcttcctttcggagtttggcgcagaaagaggatagaatgtgttacaagacactgtttttgacggcctcggaaggagagcatagcaaggcgttcggagtcatgcattttgaggtggcgaatggtctcttaactcagcagatattttcattttgttcaatacctctctgtgtatagtagcaagccccctcatcgctgtgcagagcatgcccaccgagacggggccttgtagagacgatgacccgtcgtccaaaattcacgattatgtatacgttcctccgtttttgtctgcaagtgatcatcgttactcaactcacctactcattacgtatttcgcaaaagccacctgacacaatgttttatgttttcagcatttcgc

SEQ ID NO: 23889 - DNA, 1737 bp, Muscodor strobelii
  misc_feature: SGI cDNA ID NO. 568136
  misc_feature: Encodes the peptide sequence at SEQ ID NO 23890
atgagacgtcgactgtccatccagattgctgccttcgttctttgcatcgtcattgtcatcgtcgccaaagatgtcttctttcctcattccaagacttggcagttctctcgcccatggcctaatcaagcgccattcagtcttcttccacaatacgctgatgatataccgacagaacacccgatactcaccctcattgccgaagcggagcagaattggcttcaaacaagagggagacaatcgaagactttggatgaggccgttcgagaataccgacgccgctatcgtatccctactccacccaatttcgatcgttggtacgagttcgcaaggacctatgatacgcctttgatcgacgagttcgaccttatccatgatatgcttacgccgttctggggcgttgatccttcgataatacgcgaccggacggtcgaaacacttggttacgtcgataaaaatcagctttggggactccagattcgaaatggtaatgtttcgttcacagaggacgggaccgtgcctgagatgatgaaaggctttataaagtggctgccggacatggacctcgcttttaacggaagggacgaaccgcgagtgatactcccaaacggcaatctagagcagcttgttcgaaaggccctcaaaagtgagatgccacgggcgaaagcgactaggagaccaaataactcgttcaccaatatgaccgatagtttcaaggacaagttcgaaacgagctacctcactcgcttttttcaaacaacaaaggttccgatgtggcaggcttcgaagatctcttgtggtgttgacacggccgtggggaattcaggtggccctggagtagataatgtatctagatactcagttggcccgctggatttcgtcaggaacgctacggacgcatctgatatctgcaattcgccatcactccaatcgacccacggatatttcttgatggcgtgtccagtgaagatctcgcatgatcttgtaccggttttttcgccgtcgaagatatcgtcttacgccgatatactaattcctgaacccttctattatatcaacagtaactacaaagaagaggacgataccgattggagcgaaaaggatgacacgatctactggcgaggctcgactactggcgggtatagtatcaatggcgaatacaaataccagcatcgacagcgcttggtcagagcgctcaattttaccgatggcgaaggggtcatccttgagcaagcacaagttggagacggcgcaggctggcaggcgaagactgtggcccgttctaattaccgcggcctctcggatgttggctttactgatatgattcaatgcgatgcatcggagtgtcagaaggagcgtcaagagttttctataaagaagtgggagccacgaagtgcaactttcaaacaccggcatcttcttgatatcgacggtaacgcattcagcggtcgtttctacgagtttctccagagtaagagtcttgtctataaggtcgggatttttaaggagtggcaccaagactggctttggccgtgggtgcattatatcccacttagctcccgctttgatgatggagatagcggcgggagcgactggctcgaaaccattaggttcttcaccagcgatcccgttggacgcaaggaggcggagcgactcgcggcccttaagcgcaagtgggctgctgacacgctggggaagaagcagatggaggtgtggcttttcagactattattagagtga

SEQ ID NO: 23890 - protein, 578 aa, Muscodor strobelii
  misc_feature: SGI Peptide ID NO. 568136
  misc_feature (59)..(578): NCBI GI: 85084504 Blast Desc: NCU06430 [Neurospora crassa OR74A] gi|28918411|gb|EAA28085.1| conserved [Neurospora crassa OR74A]
  misc_feature (3)..(578): NCBI GI: 156064121 Blast Desc: SS1G_00068 [Sclerotinia sclerotiorum 1980] gi|154690930|gb|EDN90668.1| SS1G_00068 [Sclerotinia sclerotiorum 1980]
  misc_feature (1)..(578): NCBI GI: 154298950 Blast Desc: BC1G_11722 [Botryotinia fuckeliana B05.10] gi|150857627|gb|EDN32819.1| BC1G_11722 [Botryotinia fuckeliana B05.10]
  misc_feature (56)..(578): NCBI GI: 46125825 Blast Desc: FG07290.1 [Gibberella zeae PH-1]
  misc_feature (2)..(578): NCBI GI: 256732768 Blast Desc: [Nectria haematococca mpVI 77-13-4]
  misc_feature (59)..(578): NCBI GI: 115389484 Blast Desc: conserved [Aspergillus terreus NIH2624] gi|114194643|gb|EAU36343.1| conserved [Aspergillus terreus NIH2624]
  misc_feature (59)..(578): NCBI GI: 171686888 Blast Desc: protein product [Podospora anserina] gi|170943405|emb|CAP69058.1| protein product [Podospora anserina]
  misc_feature (3)..(578): NCBI GI: 255942579 Blast Desc: Pc18g02140 [Penicillium chrysogenum Wisconsin 54-1255] gi|211586791|emb|CAP94438.1| Pc18g02140 [Penicillium chrysogenum Wisconsin 54-1255]
  misc_feature (56)..(578): NCBI GI: 146322471 Blast Desc: capsule-associated protein CAP1 [Aspergillus fumigatus Af293] gi|129557033|gb|EBA27340.1| capsule-associated protein CAP1, [Aspergillus fumigatus Af293]
  misc_feature (28)..(578): NCBI GI: 159130781 Blast Desc: conserved [Aspergillus fumigatus A1163]
MRRRLSIQIAAFVLCIVIVIVAKDVFFPHSKTWQFSRPWPNQAPFSLLPQYADDIPTEHPILTLIAEAEQNWLQTRGRQSKTLDEAVREYRRRYRIPTPPNFDRWYEFARTYDTPLIDEFDLIHDMLTPFWGVDPSIIRDRTVETLGYVDKNQLWGLQIRNGNVSFTEDGTVPEMMKGFIKWLPDMDLAFNGRDEPRVILPNGNLEQLVRKALKSEMPRAKATRRPNNSFTNMTDSFKDKFETSYLTRFFQTTKVPMWQASKISCGVDTAVGNSGGPGVDNVSRYSVGPLDFVRNATDASDICNSPSLQSTHGYFLMACPVKISHDLVPVFSPSKISSYADILIPEPFYYINSNYKEEDDTDWSEKDDTIYWRGSTTGGYSINGEYKYQHRQRLVRALNFTDGEGVILEQAQVGDGAGWQAKTVARSNYRGLSDVGFTDMIQCDASECQKERQEFSIKKWEPRSATFKHRHLLDIDGNAFSGRFYEFLQSKSLVYKVGIFKEWHQDWLWPWVHYIPLSSRFDDGDSGGSDWLETIRFFTSDPVGRKEAERLAALKRKWAADTLGKKQMEVWLFRLLLE

SEQ ID NO: 23891 - DNA, 412 bp, Muscodor strobelii
  misc_feature: SGI EST ID NO. CUFF.56208.0
  misc_feature: Variant of the nucleotide sequence at SEQ ID NO 23889
tgtcatcgtcgccaaagatgtcttctttcctcattccaagacttggcagttctctcgcccatggcctaatcaagcgccattcagtcttcttccacaatacgctgatgatataccgacagaacacccgatactcaccctcattgccgaagcggagcagaattggcttcaaacaagagggagacaatcgaagactttggatgaggccgttcgagaataccgacgccgctatcgtatccctactccacccaatttcgatcgttggtacgagttcgcaaggacctatgatacgcctttgatcgacgagttcgaccttatccatgatatgcttacgccgttctggggcgttgatccttcgataatacgcgaccggacggtcgaaacacttggttacgtcgataaaaatcagctttgg

SEQ ID NO: 23892 - DNA, 1896 bp, Muscodor strobelii
  misc_feature: SGI cDNA ID NO. 568137
  misc_feature: Encodes the peptide sequence at SEQ ID NO 23893
atgacgcaagtacgcaatggatccccggctgtgaagccgtatttcccaaggagcggcccgaagcacgcctcgaacctccttcgccacgagctaccttccaggccgaagacagttggaccggctattgatactgccaatgctaagaggcctttagaagcattcaacgaaaaagctcaccgccaatgcttcaactcgacccccgctgagtctggcgaggctatccagcctccttgccccgcggactttgctgagaaatatctattccctacgctgtcacctaacgagcggctacgactcacacttttatggtaccacaccagatctatcgaacaggatgagcgtctattagctgaaattgacactttggtccggagcgcacagaagagcattggatgggagttcgccgtgtctggtgtgctcaatgagtccacttacaagactcttgccgccgccaacgcaccagtcacatacgtttctcgccgcgaaatcacctgtgctcacactatcaaccagaacttgggcagtgtgttcatggttacggacatgtcaaaggattggcgtttcaagcactcgcctcttgtcgaggcaggtggtatgagaagctacgctggtacgcctctgcgcttgatggcggacaatggtgtcgaaatccctctcggcactctctgtgttgcctcgcccacaccaaaggaaccgcttgaccaggcacaacgcgaaactctggtcaactttgcggagctcattagcgccgccattgctaaccgcactcaccaaagacgcctcaaggtgcgacaagaaatgaccgatctcctctccatcctctccatgaacctcgagtttggaggctgcgaagagaatgctcttgtgatcatgcagcaggcttacccaaacacccatgtatcacttcaatcggtgaagaacggttgtgttcctgttgaaggcagggaattgcctgttccactgtctgaggttcatgacggcctctgggaggatgcagctctcattgaagagagcatcatcacctccaactttgacgagctcaagcctaccgagactgctcgtgctattattgcacgctgtggtaacctagacaagtacgtcgtcatctcaggacttgacatccaccaagtcttcgatgactttgatgcttggttcatcggtaaagccgcttcaatcatatctgatgctatcgaaagcgagcttcccaaggaggctatagcagcaaaggagaaattcatgtgcgatatggctgaacagctacaatacccccttgctggcattcaaggtgtaagcggcttgcttgctggcgatgagggtcacttgatcgtcctgaagaagtcgggacagcacttggctagaactgtcgcagctatgcagaagttcgacaactggacacagccgagcaaacaccgcaggcggcaaggcgtgtatgatttgaaccgtctcaagaaagacatactccccaagatcgtgtcgcaattccagccggaagagctgcgtggcgtgtctgttgagtttagcgacaagctccctagctcgcacttgatgttcaccgactctgagctcatgaaggaaaccttaagagaagttctccaaaatgcagtccaatcagttgcgggtaaaccctcaggaactgtcaaactcaccatgcgcacgcctaaggatggctcgcgagtgatattcgacatagtagacaccggtgctggtatcccaacggctcttcaagaatccatcttccaacccttcactaaggcagaaaacaagaaatcaggagctggtcttggcctcgctatagcaagtcgtaatgcgacaagcttgcacggcaaggtacggcttgtctcttcgacgccagctggttcacacttccaagtcagcttcaacgaccgccttgtttag

SEQ ID NO: 23893 - protein, 631 aa, Muscodor strobelii
  misc_feature: SGI Peptide ID NO. 568137
  misc_feature (518)..(629): Pfam Id: PF02518 Pfam Desc: Histidine kinase-, DNA gyrase B-, and HSP90-like ATPase
  misc_feature (188)..(252): Pfam Id: PF01590 Pfam Desc: GAF domain
  misc_feature (36)..(628): NCBI GI: 256721549 Blast Desc: NECHADRAFT_37376 [Nectria haematococca mpVI 77-13-4]
  misc_feature (14)..(628): NCBI GI: 39726369 Blast Desc: histidine kinase HHK3p [Gibberella moniliformis]
  misc_feature (23)..(628): NCBI GI: 46126491 Blast Desc: FG07623.1 [Gibberella zeae PH-1]
  misc_feature (14)..(628): NCBI GI: 39656319 Blast Desc: histidine kinase HHK3p [Cochliobolus heterostrophus]
  misc_feature (14)..(484): NCBI GI: 189191070 Blast Desc: conserved [Pyrenophora tritici-repentis Pt-1C-BFP] gi|187973480|gb|EDU40979.1| conserved [Pyrenophora tritici-repentis Pt-1C-BFP]
  misc_feature (101)..(435): NCBI GI: 261361683 Blast Desc: histidine kinase [Verticillium albo-atrum VaMs.102]
  misc_feature (478)..(626): NCBI GI: 15614365 Blast Desc: two-component sensor histidine kinase (stage II sporulation protein J) [Bacillus halodurans C-125] gi|10174420|dbj|BAB05521.1| two-component sensor histidine kinase
  misc_feature (403)..(622): NCBI GI: 91223629 Blast Desc: signal transduction histidine kinase [Vibrio alginolyticus 12G01] gi|91191715|gb|EAS77979.1| signal transduction histidine kinase [Vibrio alginolyticus 12G01]
  misc_feature (400)..(626): NCBI GI: 77747905 Blast Desc: histidine kinase/response regulator hybrid protein [Xanthomonas campestris pv. campestris str. ATCC 33913] gi|77761144|ref|YP_242350.2| histidine kinase/response regulator
  misc_feature (400)..(626): NCBI GI: 188990704 Blast Desc: Two-component system sensor histidine kinase-response regulator hybrid protein [Xanthomonas campestris pv. campestris str. B100] gi|21114042|gb|AAM42119.1| histidine kinase/response
MTQVRNGSPAVKPYFPRSGPKHASNLLRHELPSRPKTVGPAIDTANAKRPLEAFNEKAHRQCFNSTPAESGEAIQPPCPADFAEKYLFPTLSPNERLRLTLLWYHTRSIEQDERLLAEIDTLVRSAQKSIGWEFAVSGVLNESTYKTLAAANAPVTYVSRREITCAHTINQNLGSVFMVTDMSKDWRFKHSPLVEAGGMRSYAGTPLRLMADNGVEIPLGTLCVASPTPKEPLDQAQRETLVNFAELISAAIANRTHQRRLKVRQEMTDLLSILSMNLEFGGCEENALVIMQQAYPNTHVSLQSVKNGCVPVEGRELPVPLSEVHDGLWEDAALIEESIITSNFDELKPTETARAIIARCGNLDKYVVISGLDIHQVFDDFDAWFIGKAASIISDAIESELPKEAIAAKEKFMCDMAEQLQYPLAGIQGVSGLLAGDEGHLIVLKKSGQHLARTVAAMQKFDNWTQPSKHRRRQGVYDLNRLKKDILPKIVSQFQPEELRGVSVEFSDKLPSSHLMFTDSELMKETLREVLQNAVQSVAGKPSGTVKLTMRTPKDGSRVIFDIVDTGAGIPTALQESIFQPFTKAENKKSGAGLGLAIASRNATSLHGKVRLVSSTPAGSHFQVSFNDRLV

SEQ ID NO: 23894 - DNA, 2781 bp, Muscodor strobelii
  misc_feature: SGI EST ID NO. CUFF.56215.0
  misc_feature: Variant of the nucleotide sequence at SEQ ID NO 23892
ttttgagtggtactggtgtccagttgtctgtccgaacgagccgctaccatttgctgcgtattagtctccaggattatacgcaagcgcgcttggtgatggtgggtgaggtgggcaccatatctggagacagagtgtcgctgcaagtgccccgaaatatgggctgaacactgttctcgcaatcttggaaatccttcgtcacccccaccacacttcgctcaaggctcgctagaaccaatactctggctcttaggttccgcgtcgcgtgggaagaggagcataagtgcagatgctgcttagtatttgcctgccacggcgcagcaacgtgtgccagaccccacctcagctttcaactcagcctgtacgcatgtagtaatcagcgcggctacgatagcctcgtcgccctgtgcgttgggctgttgtattacctatgccgtaacaatatgcctgactccagtgctagccacattggcatgtgttccatatcggccgcctgtatatatggctttcgccctgtcaccccagccagtcgggaagaggccatcgtggtaagtcaacatctagcagtgaagcctctcctttaagctttacttcttcctgccaacgtgtaacttcgcgcgtgcctcgatcaccactgtatatcaggtagtgtcgagtccaacttgcaaacaaccaacatgacgcaagtacgcaatggatccccggctgtgaagccgtatttcccaaggagcggcccgaagcacgcctcgaacctccttcgccacgagctaccttccaggccgaagacagttggaccggctattgatactgccaatgctaagaggcctttagaagcattcaacgaaaaagctcaccgccaatgcttcaactcgacccccgctgagtctggcgaggctatccagcctccttgccccgcggactttgctgagaaatatctattccctacgctgtcacctaacgagcggctacgactcacacttttatggtaccacaccagatctatcgaacaggatgagcgtctattagctgaaattgacactttggtccggagcgcacagaagagcattggatgggagttcgccgtgtctggtgtgctcaatgagtccacttacaagactcttgccgccgccaacgcaccagtcacatacgtttctcgccgcgaaatcacctgtgctcacactatcaaccagaacttgggcagtgtgttcatggttacggacatgtcaaaggattggcgtttcaagcactcgcctcttgtcgaggcaggtggtatgagaagctacgctggtacgcctctgcgcttgatggcggacaatggtgtcgaaatccctctcggcactctctgtgttgcctcgcccacaccaaaggaaccgcttgaccaggcacaacgcgaaactctggtcaactttgcggagctcattagcgccgccattgctaaccgcactcaccaaagacgcctcaaggtgcgacaagaaatgaccgatctcctctccatcctctccatgaacctcgagtttggaggctgcgaagagaatgctcttgtgatcatgcagcaggcttacccaaacacccatgtatcacttcaatcggtgaagaacggttgtgttcctgttgaaggcagggaattgcctgttccactgtctgaggttcatgacggcctctgggaggatgcagctctcattgaagagagcatcatcacctccaactttgacgagctcaagcctaccgagactgctcgtgctattattgcacgctgtggtaacctagacaagtacgtcgtcatctcaggacttgacatccaccaagtcttcgatgactttgatgcttggttcatcggtaaagccgcttcaatcatatctgatgctatcgaaagcgagcttcccaaggaggctatagcagcaaaggagaaattcatgtgcgatatggctgaacagctacaatacccccttgctggcattcaaggtgtaagcggcttgcttgctggcgatgagggtcacttgatcgtcctgaagaagtcgggacagcacttggctagaactgtcgcagctatgcagaagttcgacaactggacacagccgagcaaacaccgcaggcggcaaggcgtgtatgatttgaaccgtctcaagaaagacatactccccaagatcgtgtcgcaattccagccggaagagctgcgtggcgtgtctgttgagtttagcgacaagctccctagctcgcacttgatgttcaccgactctgagctcatgaaggaaaccttaagagaagttctccaaaatgcagtccaatcagttgcgggtaaaccctcaggaactgtcaaactcaccatgcgcacgcctaaggatggctcgcgagtgatattcgacatagtagacaccggtgctggtatcccaacggctcttcaagaatccatcttccaacccttcactaaggcagaaaacaagaaatcaggagctggtcttggcctcgctatagcaagtcgtaatgcgacaagcttgcacggcaaggtacggcttgtctcttcgacgccagctggttcacacttccaagtcagcttcaacgaccgccttgtttaggtctagatgcccatcatttctttattattctcatgatatccacgaattattcggcgtctcggaggcatttgctttggtgtggtggggcatcgtttcttcacttctttgtacatattgatacaacctagcatcttctccggcattagaggatttagaatggactagacaaaggtctatagagtatatactgaatcctaatcatcaacaacca

SEQ ID NO: 23895 - DNA, 582 bp, Muscodor strobelii
  misc_feature: SGI cDNA ID NO. 568138
  misc_feature: Encodes the peptide sequence at SEQ ID NO 23896
atgacggggactgctctctataccagtattagcagtgcgctcgtcaaagtctgtccaactccatcagcaggcgaatttacagggtgctctgatgatagcatctcaattcacgggatcccgtatatcgtcgttggtgacctagtcgaacaaggctctttagttgtcaacgtagagagtagtacctacaatgataccaggattcttaccgcgatgataaatacagcagccactgcagtgcaaaatgcagctgtaggcaagaactgctacatccagtcgtatgatatcctggaacccggctttaggggtgcgcccccggtgccaacaagcgcgacgtggtgtaatactgtcggatttgctggtccgcactactacaacccatggtggagattgcagccaagcccaggcgccaccgaccatatggatgtccatctagacttccatactgacaacgctggtgacttcctctgtgaagtcttgggccttggtacagaagcatttgcaatcattgcccccgaatttactatcgccgatattgagctaggcgacgccattgcggttctttgtgaacaagacgatgtataa

SEQ ID NO: 23896 - protein, 193 aa, Muscodor strobelii
  misc_feature: SGI Peptide ID NO. 568138
MTGTALYTSISSALVKVCPTPSAGEFTGCSDDSISIHGIPYIVVGDLVEQGSLVVNVESSTYNDTRILTAMINTAATAVQNAAVGKNCYIQSYDILEPGFRGAPPVPTSATWCNTVGFAGPHYYNPWWRLQPSPGATDHMDVHLDFHTDNAGDFLCEVLGLGTEAFAIIAPEFTIADIELGDAIAVLCEQDDV

SEQ ID NO: 23897 - DNA, 1542 bp, Muscodor strobelii
  misc_feature: SGI cDNA ID NO. 568139
  misc_feature: Reduced expression when VOC is produced
  misc_feature: Encodes the peptide sequence at SEQ ID NO 23898
atggtcaaagacttgcatggaggcgacgacacagatgcatcgttctacgccgggctcttggtatctgcgtatgctgtagccgaagcactgactgcgatcggttggggtgcgctttctgatcgctatggacgaaagcctgtggtgttgtttggacttgttggtgttgcaatatcaagtctcatcttcggcttggctgaacaatattggattgcgctacttgcaagattcgtcggtggtgcgctgaatgggaatgttgctgtcatgcaaactatggtggctgagatggttaaagtacctgagcacgaacccgcggcatacgcaacccaacctttcgtatggactctaggaggtattctggggtcagcaatgggaggtttcctcgcgcagccagccatattctatccagacctcttcccagccgacggtctcttcgggcggtatccatatttactcccgaatctagtatcggtagttattatcgtcatagcgatcctgcaaggcatcttcttcctagaagaaacaaacccgcgtagcgccttatttcacggcaccaagaaaacagctgtggaggaagaagcaatagaagatggtgatgatgatctagcagacgagcgaacgccgcttacgcgacaaaacggccgtggcagaaataccaaggcaccagctaacatcgacggtcctgtcttcctcgaagagagtatgccagtggctgtggagcagagtttcgatttgcgtcgaacgtccttcggcacggtacactcaatcaagttgccctccgacttacggaaaccctctccatcacgggatgacgaagaatacaacgggcctacgtacaacttcacgatcattatgttgactatctgcctcgtgatcatagcatggcaccagatggcaatgggaacgcttctaccgacgtacatgctcgatctccccttgaagcccagaggacaactggatctcatcggagggctaggatacacaattcacgatgtcggaatatatcttgccgtgaacggggcaattgggctcttgatccagggactaattttccccatcttcgtagacaaagtcggagtatggcattcattcatctggatggttatcttatatccaatctgctacgtcatcttgccgttcgtatcggcattaccaggagcctggcaatcgggaggcatctacctctccatgattctgggcagtttcttcggtattatcgtcacgccggtcgcactaatcctactaaagaacgcgaccccaagttccgcggtgctagggcgcgtaaatggcctggctatgtcggcgtgctgcctcgcgcgaactgtgtcacctccattggaagggatcatatactcggctggtggttcagcggcagcgtggttcagcctcgtgggcgtaacagggctggggatagtgcaactgctttgggttcctcgagagcatgtgcacgatattgtcgtcgatagtaatattcttgtcaagacgacgagtcatgctgaggagatgcccgcaattcctgagcgcagtgatagcgaatcgggttga

SEQ ID NO: 23898 - protein, 513 aa, Muscodor strobelii
  misc_feature: SGI Peptide ID NO. 568139
  misc_feature (5)..(443): Pfam Id: PF07690 Pfam Desc: Major Facilitator Superfamily
  misc_feature (9)..(443): Pfam Id: PF07690 Pfam Desc: Major Facilitator Superfamily
  misc_feature (6)..(79): Pfam Id: PF00083 Pfam Desc: Sugar (and other) transporter
  misc_feature (1)..(500): NCBI GI: 46115748 Blast Desc: FG03716.1 [Gibberella zeae PH-1]
  misc_feature (1)..(509): NCBI GI: 256724623 Blast Desc: NECHADRAFT_48179 [Nectria haematococca mpVI 77-13-4]
  misc_feature (1)..(492): NCBI GI: 261358676 Blast Desc: conserved [Verticillium albo-atrum VaMs.102]
  misc_feature (1)..(512): NCBI GI: 169615843 Blast Desc: SNOG_11087 [Phaeosphaeria nodorum SN15] gi|160703062|gb|EAT81586.2| SNOG_11087 [Phaeosphaeria nodorum SN15]
  misc_feature (1)..(512): NCBI GI: 189210146 Blast Desc: conserved [Pyrenophora tritici-repentis Pt-1C-BFP] gi|187977498|gb|EDU44124.1| conserved [Pyrenophora tritici-repentis Pt-1C-BFP]
  misc_feature (1)..(500): NCBI GI: 39953067 Blast Desc: MGG_01883 [Magnaporthe grisea 70-15] gi|145020250|gb|EDK04379.1| MGG_01883 [Magnaporthe grisea 70-15]
  misc_feature (1)..(502): NCBI GI: 225681479 Blast Desc: conserved [Paracoccidioides brasiliensis Pb03]
  misc_feature (1)..(502): NCBI GI: 226288616 Blast Desc: conserved [Paracoccidioides brasiliensis Pb18]
  misc_feature (1)..(502): NCBI GI: 226283325 Blast Desc: conserved [Paracoccidioides brasiliensis Pb01]
  misc_feature (1)..(476): NCBI GI: 261192188 Blast Desc: MFS transporter [Ajellomyces dermatitidis SLH14081] gi|239589376|gb|EEQ72019.1| MFS transporter [Ajellomyces dermatitidis SLH14081] gi|239615093|gb|EEQ92080.1| MFS ER-3]
  misc_feature: Useful for introducing or modulating the production of volatile compounds
MVKDLHGGDDTDASFYAGLLVSAYAVAEALTAIGWGALSDRYGRKPVVLFGLVGVAISSLIFGLAEQYWIALLARFVGGALNGNVAVMQTMVAEMVKVPEHEPAAYATQPFVWTLGGILGSAMGGFLAQPAIFYPDLFPADGLFGRYPYLLPNLVSVVIIVIAILQGIFFLEETNPRSALFHGTKKTAVEEEAIEDGDDDLADERTPLTRQNGRGRNTKAPANIDGPVFLEESMPVAVEQSFDLRRTSFGTVHSIKLPSDLRKPSPSRDDEEYNGPTYNFTIIMLTICLVIIAWHQMAMGTLLPTYMLDLPLKPRGQLDLIGGLGYTIHDVGIYLAVNGAIGLLIQGLIFPIFVDKVGVWHSFIWMVILYPICYVILPFVSALPGAWQSGGIYLSMILGSFFGIIVTPVALILLKNATPSSAVLGRVNGLAMSACCLARTVSPPLEGIIYSAGGSAAAWFSLVGVTGLGIVQLLWVPREHVHDIVVDSNILVKTTSHAEEMPAIPERSDSESG

SEQ ID NO: 23899 - DNA, 4909 bp, Muscodor strobelii
  misc_feature: SGI EST ID NO. CUFF.56333.1
  misc_feature: Variant of the nucleotide sequence at SEQ ID NO 23897
gttcgcgagagtattaaagggcagatgatcagtcattatgtcgttcttttggtctgctttcatcctaggttgggcggaccttgggagaaccgacagtttgggacgagattgctttttttgcgcattttcttgagcgcaatcgccgacttcgcagctgtgattggaatttgttcagaccgccccccctcatctacttgcttgtgtgcctcgagtttgcctctttgcattccaggttgctcagcctctgcagttctctagcgcggggtgtatagatgattgaacgacgggaaattcgaaaattagcaatcgaagttttagcttcgtcaagttcgaattcaactaacatttggaggggaagtttgtagctggcaggcaatggctccaactaataaaccggcaggggaaacaatcccgttccctgccaaacaattgacgatactggcaatatgtcgattctcagaacccatagcattcaactctattcttgcgtatacctacgtaatggtcaaagacttgcatggaggcgacgacacagatgcatcgttctacgccgggctcttggtatctgcgtatgctgtagccgaagcactgactgcgatcggttggggtgcgctttctgatcgctatggacgaaagcctgtggtgttgtttggacttgttggtgttgcaatatcaagtctcatcttcggcttggctgaacaatattggattgcgctacttgcaagattcgtcggtggtgcgctgaatgggaatgttgctgtcatgcaaactatggtggctgagatggttaaagtacctgagcacgaacccgcggcatacgcaacccaacctttcgtatggactctaggaggtattctggggtcagcaatgggaggtttcctcgcgcagccagccatattctatccagacctcttcccagccgacggtctcttcgggcggtatccatatttactcccgaatctagtatcggtagttattatcgtcatagcgatcctgcaaggcatcttcttcctagaagaaacaaacccgcgtagcgccttatttcacggcaccaagaaaacagctgtggaggaagaagcaatagaagatggtgatgatgatctagcagacgagcgaacgccgcttacgcgacaaaacggccgtggcagaaataccaaggcaccagctaacatcgacggtcctgtcttcctcgaagagagtatgccagtggctgtggagcagagtttcgatttgcgtcgaacgtccttcggcacggtacactcaatcaagttgccctccgacttacggaaaccctctccatcacgggatgacgaagaatacaacgggcctacgtacaacttcacgatcattatgttgactatctgcctcgtgatcatagcatggcaccagatggcaatgggaacgcttctaccgacgtacatgctcgatctccccttgaagcccagaggacaactggatctcatcggagggctaggatacacaattcacgatgtcggaatatatcttgccgtgaacggggcaattgggctcttgatccagggactaattttccccatcttcgtagacaaagtcggagtatggcattcattcatctggatggttatcttatatccaatctgctacgtcatcttgccgttcgtatcggcattaccaggagcctggcaatcgggaggcatctacctctccatgattctgggcagtttcttcggtattatcgtcacgccggtcgcactaatcctactaaagaacgcgaccccaagttccgcggtgctagggcgcgtaaatggcctggctatgtcggcgtgctgcctcgcgcgaactgtgtcacctccattggaagggatcatatactcggctggtggttcagcggcagcgtggttcagcctcgtgggcgtaacagggctggggatagtgcaactgctttgggttcctcgagagcatgtgcacgatattgtcgtcgatagtaatattcttgtcaagacgacgagtcatgctgaggagatgcccgcaattcctgagcgcagtgatagcgaatcgggttgattcgtcgggctgtttagggaatggccttcaaatacctaataatgagtatatacagccatttggtacttggtccgtcagagaccattctgacgcttggaagtgttctttccagggcggactcgttaagatcgggaatggtatgaggcaatgagcaatgaaacactttaatgaacggagtactggctaaggcataggcggtatcgttagattgggttgcatatatacagattgtttacgctttacgctgcgccttttgccgtatcgactcgactaaactgttaatatcgtcattggcgcccttgatcttttgtttcttcaccttcccactctctctggatgtctcgtcgatttcatatctatcgtttttgcgtttcttgcgcccctcctcaagaacttgcttcattcctggtgtcgccttgaactttggattcgacgggtctatagcaaactcatggttctcgaagacggctttgaaacgatcgtcaccgacgttcatctcgaagccttgctgcagaccaccatgatcctcgactttgttcttccccttctttttgaacttcttggctttcttcttttctgccttcgttatctcatccatattgaaatgatcgagatgctcaacctgctctcttgagttgtcggccataatcttctcaagatgcgctttttcggtggcatcctcggcggccttagcctccttttctgctcgtctcttcatcctctcttctttcctttccgatgttttagataccttggcaggctcttcagtcgtgaaaaatgggtcatcgaatcctaagtcctcttcagagtctgccgatgcttcagcggctgtctctcccggagcaacgccggttcgcttagctacagcaatctccttcttccgggctttacgctctcgctcttttcttgcatatttctcgattgttgtctcctctacgtcgggctctttctgtttctggtcgcccataagagcggccgtgaacgtgatctgcatgtctcctaccggtccggactttgcagaagatttggtcatgggttcagctgtaaggcccagggcttctcgcagcttcttcgccttgagctcttttttacttaatttcggttgatcttcggcaacctccgtctcggccacaatttctccacctaaggtctcgtggtcatcctcgctatcgctagcaagatacgctcgaaggtcattctcctcgatgtctgttcgactacctgtaaaagcgcgcctcgcggattcctttcgggcagcctcgtcaggatttatatcccaagtgagtttgaccttcgaatgctgcagagcatctgtgacgaattcggtgggttggtaattacttgaggtagaatcgctttcgtctctcggttcgtcatcaaatgtaacatcgtcgggaatgaaccgcagatcaataaagttggatgacgcgagatactcagtcccgtcgcacgatgtgtatatcttctccgccgttgcggaatcagagcagctgaccactgcatagtaataccgcagtcggtccaactgatatgatctgagggcgtcaccatcaaaatcttcatcgtcaccctctttgatgatttggttttttatcttctcgtcctcatcttcatcactatcgtcctcgctgtctgccgagtctgactcggactcatcttcgtcttttgcggccttcttgaagatttccttgggaggtccctcaagctcctctcgctgcatgcgctctttgccaaactcagaaggatatattgagaccttctcgacgcggccctccttaggcgcaaaggaggagaaaagggccattaggtcgacagctttgatgttatcccaatcaaggtttaccacggcaaagcgtcttgtgatctctccttgctcgacttcggcctgctcgtcacggaggcgtgacatgctagcagtcggtttgacttctgcaccgccttcttcctcgtcctcatcctcgtcttcatcatcagattctgaaccagactcactctcggacgaggaaaatccaccacctcgagccgggtcatacttttcgtctgccttttcgagctccctctgaactacgtcgtcgtcttcaacctcaaggccctcgtcttcttcaggttcgtagatgtcctgcagggctttctttttgttgccaggcttcaactttcggccgtatctgtcaagcttagcgctggacgtgaactcttcgtcgtcgaacacacgctggaaccgtttgtcgatcttggttttggttcggcttttggagggtagtcgaaagcgaggatcgttttcgaaattggcaaagcgggcgtccgtggcggcagcgcctgaagagcgagcgtgcttcttcttatctttcggcattgttgtgtccctaattacttatcaaagacaggtaaacaatttgagaagtgataggacagattgtgataactcgaagccgcttgaaacgcgggatctcgcgtcaagaactcgtccaattaggtgccgatggtagtactgaaggagcttgacacacttcctcaagactcaaaatttaggtgggtcgtaactttttctgcccgccgacggacctagagctatgcaccttccccactatgcgcttcgaccgcctgctgcatcgaacctgcatttgatggaggggaactgacatcgcatctcgcataaccccgctagtcggctactagcttcgccgtctgcaacaacgcgttttgaattcaatgatcgtcaatcttatctcacataatgcctgacattacagctttcaagagttgctgtcagcgcggtttcctgagtgtcagatctatcgaattgaaccgaaaacatgcataggacttgtcagcagcgattctgccgcgtcgagccgggataaccagc

SEQ ID NO: 23900 - DNA, 1668 bp, Muscodor strobelii
  misc_feature: SGI cDNA ID NO. 568140
  misc_feature: Encodes the peptide sequence at SEQ ID NO 23901
atggctccaactaataaaccggcaggggaaacaatcccgttccctgccaaacaattgacgatactggcaatatgtcgattctcagaacccatagcattcaactctattcttgcgtatacctacgtaatggtcaaagacttgcatggaggcgacgacacagatgcatcgttctacgccgggctcttggtatctgcgtatgctgtagccgaagcactgactgcgatcggttggggtgcgctttctgatcgctatggacgaaagcctgtggtgttgtttggacttgttggtgttgcaatatcaagtctcatcttcggcttggctgaacaatattggattgcgctacttgcaagattcgtcggtggtgcgctgaatgggaatgttgctgtcatgcaaactatggtggctgagatggttaaagtacctgagcacgaacccgcggcatacgcaacccaacctttcgtatggactctaggaggtattctggggtcagcaatgggaggtttcctcgcgcagccagccatattctatccagacctcttcccagccgacggtctcttcgggcggtatccatatttactcccgaatctagtatcggtagttattatcgtcatagcgatcctgcaaggcatcttcttcctagaagaaacaaacccgcgtagcgccttatttcacggcaccaagaaaacagctgtggaggaagaagcaatagaagatggtgatgatgatctagcagacgagcgaacgccgcttacgcgacaaaacggccgtggcagaaataccaaggcaccagctaacatcgacggtcctgtcttcctcgaagagagtatgccagtggctgtggagcagagtttcgatttgcgtcgaacgtccttcggcacggtacactcaatcaagttgccctccgacttacggaaaccctctccatcacgggatgacgaagaatacaacgggcctacgtacaacttcacgatcattatgttgactatctgcctcgtgatcatagcatggcaccagatggcaatgggaacgcttctaccgacgtacatgctcgatctccccttgaagcccagaggacaactggatctcatcggagggctaggatacacaattcacgatgtcggaatatatcttgccgtgaacggggcaattgggctcttgatccagggactaattttccccatcttcgtagacaaagtcggagtatggcattcattcatctggatggttatcttatatccaatctgctacgtcatcttgccgttcgtatcggcattaccaggagcctggcaatcgggaggcatctacctctccatgattctgggcagtttcttcggtattatcgtcacgccggtcgcactaatcctactaaagaacgcgaccccaagttccgcggtgctagggcgcgtaaatggcctggctatgtcggcgtgctgcctcgcgcgaactgtgtcacctccattggaagggatcatatactcggctggtggttcagcggcagcgtggttcagcctcgtgggcgtaacagggctggggatagtgcaactgctttgggttcctcgagagcatgtgcacgatattgtcgtcgatagtaatattcttgtcaagacgacgagtcatgctgaggagatgcccgcaattcctgagcgcagtgatagcgaatcgggttga

SEQ ID NO: 23901 - protein, 555 aa, Muscodor strobelii
  misc_feature: SGI Peptide ID NO. 568140
  misc_feature (22)..(485): Pfam Id: PF07690 Pfam Desc: Major Facilitator Superfamily
  misc_feature (48)..(121): Pfam Id: PF00083 Pfam Desc: Sugar (and other) transporter
  misc_feature (14)..(542): NCBI GI: 46115748 Blast Desc: FG03716.1 [Gibberella zeae PH-1]
  misc_feature (1)..(551): NCBI GI: 256724623 Blast Desc: NECHADRAFT_48179 [Nectria haematococca mpVI 77-13-4]
  misc_feature (24)..(534): NCBI GI: 261358676 Blast Desc: conserved [Verticillium albo-atrum VaMs.102]
  misc_feature (7)..(554): NCBI GI: 189210146 Blast Desc: conserved [Pyrenophora tritici-repentis Pt-1C-BFP] gi|187977498|gb|EDU44124.1| conserved [Pyrenophora tritici-repentis Pt-1C-BFP]
  misc_feature (24)..(554): NCBI GI: 169615843 Blast Desc: SNOG_11087 [Phaeosphaeria nodorum SN15] gi|160703062|gb|EAT81586.2| SNOG_11087 [Phaeosphaeria nodorum SN15]
  misc_feature (37)..(542): NCBI GI: 39953067 Blast Desc: MGG_01883 [Magnaporthe grisea 70-15] gi|145020250|gb|EDK04379.1| MGG_01883 [Magnaporthe grisea 70-15]
  misc_feature (14)..(518): NCBI GI: 261192188 Blast Desc: MFS transporter [Ajellomyces dermatitidis SLH14081] gi|239589376|gb|EEQ72019.1| MFS transporter [Ajellomyces dermatitidis SLH14081] gi|239615093|gb|EEQ92080.1| MFS ER-3]
  misc_feature (3)..(548): NCBI GI: 258575911 Blast Desc: conserved [Uncinocarpus reesii 1704] gi|237902403|gb|EEP76804.1| conserved [Uncinocarpus reesii 1704]
  misc_feature (1)..(521): NCBI GI: 255954805 Blast Desc: Pc21g11230 [Penicillium chrysogenum Wisconsin 54-1255] gi|211589866|emb|CAP96020.1| Pc21g11230 [Penicillium chrysogenum Wisconsin 54-1255]
  misc_feature (3)..(522): NCBI GI: 242794949 Blast Desc: MFS transporter, [Talaromyces stipitatus ATCC 10500] gi|218719068|gb|EED18488.1| MFS transporter, [Talaromyces stipitatus ATCC 10500]
MAPTNKPAGETIPFPAKQLTILAICRFSEPIAFNSILAYTYVMVKDLHGGDDTDASFYAGLLVSAYAVAEALTAIGWGALSDRYGRKPVVLFGLVGVAISSLIFGLAEQYWIALLARFVGGALNGNVAVMQTMVAEMVKVPEHEPAAYATQPFVWTLGGILGSAMGGFLAQPAIFYPDLFPADGLFGRYPYLLPNLVSVVIIVIAILQGIFFLEETNPRSALFHGTKKTAVEEEAIEDGDDDLADERTPLTRQNGRGRNTKAPANIDGPVFLEESMPVAVEQSFDLRRTSFGTVHSIKLPSDLRKPSPSRDDEEYNGPTYNFTIIMLTICLVIIAWHQMAMGTLLPTYMLDLPLKPRGQLDLIGGLGYTIHDVGIYLAVNGAIGLLIQGLIFPIFVDKVGVWHSFIWMVILYPICYVILPFVSALPGAWQSGGIYLSMILGSFFGIIVTPVALILLKNATPSSAVLGRVNGLAMSACCLARTVSPPLEGIIYSAGGSAAAWFSLVGVTGLGIVQLLWVPREHVHDIVVDSNILVKTTSHAEEMPAIPERSDSESG

SEQ ID NO: 23902 - DNA, 4970 bp, Muscodor strobelii
  misc_feature: SGI EST ID NO. CUFF.56333.0
  misc_feature: Variant of the nucleotide sequence at SEQ ID NO 23900
gttcgcgagagtattaaagggcagatgatcagtcattatgtcgttcttttggtctgctttcatcctaggttgggcggaccttgggagaaccgacagtttgggacgagattgctttttttgcgcattttcttgagcgcaatcgccgacttcgcagctgtgattggaatttgttcagaccgccccccctcatctacttgcttgtgtgcctcgagtttgcctctttgcattccaggttgctcagcctctgcagttctctagcgcggggtgtatagatgattgaacgacgggaaattcgaaaattagcaatcgaagttttagcttcgtcaagttcgaattcaactaacatttggaggggaagtttgtagctggcaggcaatggctccaactaataaaccggcaggggaaacaatcccgttccctgccaaacaattgacgatactggcaatatgtcgattctcagaacccatagcattcaactctattcttgcgtatacctacgtaatggtcaaagacttgcatggaggcgacgacacagatgcatcgttctacgccgggctcttggtatctgcgtatgctgtagccgaagcactgactgcgatcggttggggtgcgctttctgatcgctatggacgaaagcctgtggtgttgtttggacttgttggtgttgcaatatcaagtctcatcttcggcttggctgaacaatattggattgcgctacttgcaagattcgtcggtggtgcgctgaatgggaatgttgctgtcatgcaaactatggtggctgagatggttaaagtacctgagcacgaacgtagggtttctgcactcccaataaatttcccgcatttgtccgtatgctgatttctggacagccgcggcatacgcaacccaacctttcgtatggactctaggaggtattctggggtcagcaatgggaggtttcctcgcgcagccagccatattctatccagacctcttcccagccgacggtctcttcgggcggtatccatatttactcccgaatctagtatcggtagttattatcgtcatagcgatcctgcaaggcatcttcttcctagaagaaacaaacccgcgtagcgccttatttcacggcaccaagaaaacagctgtggaggaagaagcaatagaagatggtgatgatgatctagcagacgagcgaacgccgcttacgcgacaaaacggccgtggcagaaataccaaggcaccagctaacatcgacggtcctgtcttcctcgaagagagtatgccagtggctgtggagcagagtttcgatttgcgtcgaacgtccttcggcacggtacactcaatcaagttgccctccgacttacggaaaccctctccatcacgggatgacgaagaatacaacgggcctacgtacaacttcacgatcattatgttgactatctgcctcgtgatcatagcatggcaccagatggcaatgggaacgcttctaccgacgtacatgctcgatctccccttgaagcccagaggacaactggatctcatcggagggctaggatacacaattcacgatgtcggaatatatcttgccgtgaacggggcaattgggctcttgatccagggactaattttccccatcttcgtagacaaagtcggagtatggcattcattcatctggatggttatcttatatccaatctgctacgtcatcttgccgttcgtatcggcattaccaggagcctggcaatcgggaggcatctacctctccatgattctgggcagtttcttcggtattatcgtcacgccggtcgcactaatcctactaaagaacgcgaccccaagttccgcggtgctagggcgcgtaaatggcctggctatgtcggcgtgctgcctcgcgcgaactgtgtcacctccattggaagggatcatatactcggctggtggttcagcggcagcgtggttcagcctcgtgggcgtaacagggctggggatagtgcaactgctttgggttcctcgagagcatgtgcacgatattgtcgtcgatagtaatattcttgtcaagacgacgagtcatgctgaggagatgcccgcaattcctgagcgcagtgatagcgaatcgggttgattcgtcgggctgtttagggaatggccttcaaatacctaataatgagtatatacagccatttggtacttggtccgtcagagaccattctgacgcttggaagtgttctttccagggcggactcgttaagatcgggaatggtatgaggcaatgagcaatgaaacactttaatgaacggagtactggctaaggcataggcggtatcgttagattgggttgcatatatacagattgtttacgctttacgctgcgccttttgccgtatcgactcgactaaactgttaatatcgtcattggcgcccttgatcttttgtttcttcaccttcccactctctctggatgtctcgtcgatttcatatctatcgtttttgcgtttcttgcgcccctcctcaagaacttgcttcattcctggtgtcgccttgaactttggattcgacgggtctatagcaaactcatggttctcgaagacggctttgaaacgatcgtcaccgacgttcatctcgaagccttgctgcagaccaccatgatcctcgactttgttcttccccttctttttgaacttcttggctttcttcttttctgccttcgttatctcatccatattgaaatgatcgagatgctcaacctgctctcttgagttgtcggccataatcttctcaagatgcgctttttcggtggcatcctcggcggccttagcctccttttctgctcgtctcttcatcctctcttctttcctttccgatgttttagataccttggcaggctcttcagtcgtgaaaaatgggtcatcgaatcctaagtcctcttcagagtctgccgatgcttcagcggctgtctctcccggagcaacgccggttcgcttagctacagcaatctccttcttccgggctttacgctctcgctcttttcttgcatatttctcgattgttgtctcctctacgtcgggctctttctgtttctggtcgcccataagagcggccgtgaacgtgatctgcatgtctcctaccggtccggactttgcagaagatttggtcatgggttcagctgtaaggcccagggcttctcgcagcttcttcgccttgagctcttttttacttaatttcggttgatcttcggcaacctccgtctcggccacaatttctccacctaaggtctcgtggtcatcctcgctatcgctagcaagatacgctcgaaggtcattctcctcgatgtctgttcgactacctgtaaaagcgcgcctcgcggattcctttcgggcagcctcgtcaggatttatatcccaagtgagtttgaccttcgaatgctgcagagcatctgtgacgaattcggtgggttggtaattacttgaggtagaatcgctttcgtctctcggttcgtcatcaaatgtaacatcgtcgggaatgaaccgcagatcaataaagttggatgacgcgagatactcagtcccgtcgcacgatgtgtatatcttctccgccgttgcggaatcagagcagctgaccactgcatagtaataccgcagtcggtccaactgatatgatctgagggcgtcaccatcaaaatcttcatcgtcaccctctttgatgatttggttttttatcttctcgtcctcatcttcatcactatcgtcctcgctgtctgccgagtctgactcggactcatcttcgtcttttgcggccttcttgaagatttccttgggaggtccctcaagctcctctcgctgcatgcgctctttgccaaactcagaaggatatattgagaccttctcgacgcggccctccttaggcgcaaaggaggagaaaagggccattaggtcgacagctttgatgttatcccaatcaaggtttaccacggcaaagcgtcttgtgatctctccttgctcgacttcggcctgctcgtcacggaggcgtgacatgctagcagtcggtttgacttctgcaccgccttcttcctcgtcctcatcctcgtcttcatcatcagattctgaaccagactcactctcggacgaggaaaatccaccacctcgagccgggtcatacttttcgtctgccttttcgagctccctctgaactacgtcgtcgtcttcaacctcaaggccctcgtcttcttcaggttcgtagatgtcctgcagggctttctttttgttgccaggcttcaactttcggccgtatctgtcaagcttagcgctggacgtgaactcttcgtcgtcgaacacacgctggaaccgtttgtcgatcttggttttggttcggcttttggagggtagtcgaaagcgaggatcgttttcgaaattggcaaagcgggcgtccgtggcggcagcgcctgaagagcgagcgtgcttcttcttatctttcggcattgttgtgtccctaattacttatcaaagacaggtaaacaatttgagaagtgataggacagattgtgataactcgaagccgcttgaaacgcgggatctcgcgtcaagaactcgtccaattaggtgccgatggtagtactgaaggagcttgacacacttcctcaagactcaaaatttaggtgggtcgtaactttttctgcccgccgacggacctagagctatgcaccttccccactatgcgcttcgaccgcctgctgcatcgaacctgcatttgatggaggggaactgacatcgcatctcgcataaccccgctagtcggctactagcttcgccgtctgcaacaacgcgttttgaattcaatgatcgtcaatcttatctcacataatgcctgacattacagctttcaagagttgctgtcagcgcggtttcctgagtgtcagatctatcgaattgaaccgaaaacatgcataggacttgtcagcagcgattctgccgcgtcgagccgggataaccagc

SEQ ID NO: 23903 - DNA, 1488 bp, Muscodor strobelii
  misc_feature: SGI cDNA ID NO. 568141
  misc_feature: Encodes the peptide sequence at SEQ ID NO 23904
atgcagcgagaggagcttgagggacctcccaaggaaatcttcaagaaggccgcaaaagacgaagatgagtccgagtcagactcggcagacagcgaggacgatagtgatgaagatgaggacgagaagataaaaaaccaaatcatcaaagagggtgacgatgaagattttgatggtgacgccctcagatcatatcagttggaccgactgcggtattactatgcagtggtcagctgctctgattccgcaacggcggagaagatatacacatcgtgcgacgggactgagtatctcgcgtcatccaactttattgatctgcggttcattcccgacgatgttacatttgatgacgaaccgagagacgaaagcgattctacctcaagtaattaccaacccaccgaattcgtcacagatgctctgcagcattcgaaggtcaaactcacttgggatataaatcctgacgaggctgcccgaaaggaatccgcgaggcgcgcttttacaggtagtcgaacagacatcgaggagaatgaccttcgagcgtatcttgctagcgatagcgaggatgaccacgagaccttaggtggagaaattgtggccgagacggaggttgccgaagatcaaccgaaattaagtaaaaaagagctcaaggcgaagaagctgcgagaagccctgggccttacagctgaacccatgaccaaatcttctgcaaagtccggaccggtaggagacatgcagatcacgttcacggccgctcttatgggcgaccagaaacagaaagagcccgacgtagaggagacaacaatcgagaaatatgcaagaaaagagcgagagcgtaaagcccggaagaaggagattgctgtagctaagcgaaccggcgttgctccgggagagacagccgctgaagcatcggcagactctgaagaggacttaggattcgatgacccatttttcacgactgaagagcctgccaaggtatctaaaacatcggaaaggaaagaagagaggatgaagagacgagcagaaaaggaggctaaggccgccgaggatgccaccgaaaaagcgcatcttgagaagattatggccgacaactcaagagagcaggttgagcatctcgatcatttcaatatggatgagataacgaaggcagaaaagaagaaagccaagaagttcaaaaagaaggggaagaacaaagtcgaggatcatggtggtctgcagcaaggcttcgagatgaacgtcggtgacgatcgtttcaaagccgtcttcgagaaccatgagtttgctatagacccgtcgaatccaaagttcaaggcgacaccaggaatgaagcaagttcttgaggaggggcgcaagaaacgcaaaaacgatagatatgaaatcgacgagacatccagagagagtgggaaggtgaagaaacaaaagatcaagggcgccaatgacgatattaacagtttagtcgagtcgatacggcaaaaggcgcagcgtaaagcgtaa

SEQ ID NO: 23904 - protein, 495 aa, Muscodor strobelii
  misc_feature: SGI Peptide ID NO. 568141
  misc_feature (413)..(442): Pfam Id: PF08159 Pfam Desc: NUC153 domain
  misc_feature (43)..(486): NCBI GI: 116195328 Blast Desc: CHGG_04262 [Chaetomium globosum CBS 148.51] gi|88180175|gb|EAQ87643.1| CHGG_04262 [Chaetomium globosum CBS 148.51]
  misc_feature (1)..(451): NCBI GI: 154317661 Blast Desc: BC1G_03182 [Botryotinia fuckeliana B05.10] gi|150844356|gb|EDN19549.1| BC1G_03182 [Botryotinia fuckeliana B05.10]
  misc_feature (1)..(453): NCBI GI: 46122617 Blast Desc: FG05686.1 [Gibberella zeae PH-1]
  misc_feature (1)..(453): NCBI GI: 256729608 Blast Desc: NECHADRAFT_22088 [Nectria haematococca mpVI 77-13-4]
  misc_feature (1)..(492): NCBI GI: 171691320 Blast Desc: protein product [Podospora anserina] gi|170945608|emb|CAP71721.1| protein product [Podospora anserina]
  misc_feature (1)..(487): NCBI GI: 85083127 Blast Desc: NCU04485 [Neurospora crassa OR74A] gi|28918138|gb|EAA27818.1| conserved [Neurospora crassa OR74A]
  misc_feature (1)..(476): NCBI GI: 145611890 Blast Desc: MGG_00053 [Magnaporthe grisea 70-15] gi|145019115|gb|EDK03394.1| MGG_00053 [Magnaporthe grisea 70-15]
  misc_feature (1)..(488): NCBI GI: 225558452 Blast Desc: pre-rRNA-processing protein ESF1 [Ajellomyces capsulatus G186AR]
  misc_feature (8)..(492): NCBI GI: 240105986 Blast Desc: NUC153 domain containing protein [Coccidioides posadasii C735 delta SOWgp]
  misc_feature (8)..(492): NCBI GI: 119192738 Blast Desc: CIMG_00746 [Coccidioides immitis RS]
MQREELEGPPKEIFKKAAKDEDESESDSADSEDDSDEDEDEKIKNQIIKEGDDEDFDGDALRSYQLDRLRYYYAVVSCSDSATAEKIYTSCDGTEYLASSNFIDLRFIPDDVTFDDEPRDESDSTSSNYQPTEFVTDALQHSKVKLTWDINPDEAARKESARRAFTGSRTDIEENDLRAYLASDSEDDHETLGGEIVAETEVAEDQPKLSKKELKAKKLREALGLTAEPMTKSSAKSGPVGDMQITFTAALMGDQKQKEPDVEETTIEKYARKERERKARKKEIAVAKRTGVAPGETAAEASADSEEDLGFDDPFFTTEEPAKVSKTSERKEERMKRRAEKEAKAAEDATEKAHLEKIMADNSREQVEHLDHFNMDEITKAEKKKAKKFKKKGKNKVEDHGGLQQGFEMNVGDDRFKAVFENHEFAIDPSNPKFKATPGMKQVLEEGRKKRKNDRYEIDETSRESGKVKKQKIKGANDDINSLVESIRQKAQRKA

SEQ ID NO: 23905 - DNA, 2121 bp, Muscodor strobelii
  misc_feature: SGI cDNA ID NO. 568142
  misc_feature: Encodes the peptide sequence at SEQ ID NO 23906
atgccgaaagataagaagaagcacgctcgctcttcaggcgctgccgccacggacgcccgctttgccaatttcgaaaacgatcctcgctttcgactaccctccaaaagccgaaccaaaaccaagatcgacaaacggttccagcgtgtgttcgacgacgaagagttcacgtccagcgctaagcttgacagatacggccgaaagttgaagcctggcaacaaaaagaaagccctgcaggacatctacgaacctgaagaagacgagggccttgaggttgaagacgacgacgtagttcagagggagctcgaaaaggcagacgaaaagtatgacccggctcgaggtggtggattttcctcgtccgagagtgagtctggttcagaatctgatgatgaagacgaggatgaggacgaggaagaaggcggtgcagaagtcaaaccgactgctagcatgtcacgcctccgtgacgagcaggccgaagtcgagcaaggagagatcacaagacgctttgccgtggtaaaccttgattgggataacatcaaagctgtcgacctaatggcccttttctcctcctttgcgcctaaggagggccgcgtcgagaaggtctcaatatatccttctgagtttggcaaagagcgcatgcagcgagaggagcttgagggacctcccaaggaaatcttcaagaaggccgcaaaagacgaagatgagtccgagtcagactcggcagacagcgaggacgatagtgatgaagatgaggacgagaagataaaaaaccaaatcatcaaagagggtgacgatgaagattttgatggtgacgccctcagatcatatcagttggaccgactgcggtattactatgcagtggtcagctgctctgattccgcaacggcggagaagatatacacatcgtgcgacgggactgagtatctcgcgtcatccaactttattgatctgcggttcattcccgacgatgttacatttgatgacgaaccgagagacgaaagcgattctacctcaagtaattaccaacccaccgaattcgtcacagatgctctgcagcattcgaaggtcaaactcacttgggatataaatcctgacgaggctgcccgaaaggaatccgcgaggcgcgcttttacaggtagtcgaacagacatcgaggagaatgaccttcgagcgtatcttgctagcgatagcgaggatgaccacgagaccttaggtggagaaattgtggccgagacggaggttgccgaagatcaaccgaaattaagtaaaaaagagctcaaggcgaagaagctgcgagaagccctgggccttacagctgaacccatgaccaaatcttctgcaaagtccggaccggtaggagacatgcagatcacgttcacggccgctcttatgggcgaccagaaacagaaagagcccgacgtagaggagacaacaatcgagaaatatgcaagaaaagagcgagagcgtaaagcccggaagaaggagattgctgtagctaagcgaaccggcgttgctccgggagagacagccgctgaagcatcggcagactctgaagaggacttaggattcgatgacccatttttcacgactgaagagcctgccaaggtatctaaaacatcggaaaggaaagaagagaggatgaagagacgagcagaaaaggaggctaaggccgccgaggatgccaccgaaaaagcgcatcttgagaagattatggccgacaactcaagagagcaggttgagcatctcgatcatttcaatatggatgagataacgaaggcagaaaagaagaaagccaagaagttcaaaaagaaggggaagaacaaagtcgaggatcatggtggtctgcagcaaggcttcgagatgaacgtcggtgacgatcgtttcaaagccgtcttcgagaaccatgagtttgctatagacccgtcgaatccaaagttcaaggcgacaccaggaatgaagcaagttcttgaggaggggcgcaagaaacgcaaaaacgatagatatgaaatcgacgagacatccagagagagtgggaaggtgaagaaacaaaagatcaagggcgccaatgacgatattaacagtttagtcgagtcgatacggcaaaaggcgcagcgtaaagcgtaa

SEQ ID NO: 23906 - protein, 706 aa, Muscodor strobelii
  misc_feature: SGI Peptide ID NO. 568142
  misc_feature (624)..(653): Pfam Id: PF08159 Pfam Desc: NUC153 domain
  misc_feature (1)..(703): NCBI GI: 171691320 Blast Desc: protein product [Podospora anserina] gi|170945608|emb|CAP71721.1| protein product [Podospora anserina]
  misc_feature (1)..(697): NCBI GI: 116195328 Blast Desc: CHGG_04262 [Chaetomium globosum CBS 148.51] gi|88180175|gb|EAQ87643.1| CHGG_04262 [Chaetomium globosum CBS 148.51]
  misc_feature (18)..(664): NCBI GI: 46122617 Blast Desc: FG05686.1 [Gibberella zeae PH-1]
  misc_feature (1)..(698): NCBI GI: 85083127 Blast Desc: NCU04485 [Neurospora crassa OR74A] gi|28918138|gb|EAA27818.1| conserved [Neurospora crassa OR74A]
  misc_feature (7)..(663): NCBI GI: 256729608 Blast Desc: NECHADRAFT_22088 [Nectria haematococca mpVI 77-13-4]
  misc_feature (16)..(687): NCBI GI: 145611890 Blast Desc: MGG_00053 [Magnaporthe grisea 70-15] gi|145019115|gb|EDK03394.1| MGG_00053 [Magnaporthe grisea 70-15]
  misc_feature (1)..(662): NCBI GI: 154317661 Blast Desc: BC1G_03182 [Botryotinia fuckeliana B05.10] gi|150844356|gb|EDN19549.1| BC1G_03182 [Botryotinia fuckeliana B05.10]
  misc_feature (12)..(699): NCBI GI: 225558452 Blast Desc: pre-rRNA-processing protein ESF1 [Ajellomyces capsulatus G186AR]
  misc_feature (2)..(704): NCBI GI: 258574055 Blast Desc: [Uncinocarpus reesii 1704] gi|237901475|gb|EEP75876.1| [Uncinocarpus reesii 1704]
  misc_feature (17)..(703): NCBI GI: 240105986 Blast Desc: NUC153 domain containing protein [Coccidioides posadasii C735 delta SOWgp]
MPKDKKKHARSSGAAATDARFANFENDPRFRLPSKSRTKTKIDKRFQRVFDDEEFTSSAKLDRYGRKLKPGNKKKALQDIYEPEEDEGLEVEDDDVVQRELEKADEKYDPARGGGFSSSESESGSESDDEDEDEDEEEGGAEVKPTASMSRLRDEQAEVEQGEITRRFAVVNLDWDNIKAVDLMALFSSFAPKEGRVEKVSIYPSEFGKERMQREELEGPPKEIFKKAAKDEDESESDSADSEDDSDEDEDEKIKNQIIKEGDDEDFDGDALRSYQLDRLRYYYAVVSCSDSATAEKIYTSCDGTEYLASSNFIDLRFIPDDVTFDDEPRDESDSTSSNYQPTEFVTDALQHSKVKLTWDINPDEAARKESARRAFTGSRTDIEENDLRAYLASDSEDDHETLGGEIVAETEVAEDQPKLSKKELKAKKLREALGLTAEPMTKSSAKSGPVGDMQITFTAALMGDQKQKEPDVEETTIEKYARKERERKARKKEIAVAKRTGVAPGETAAEASADSEEDLGFDDPFFTTEEPAKVSKTSERKEERMKRRAEKEAKAAEDATEKAHLEKIMADNSREQVEHLDHFNMDEITKAEKKKAKKFKKKGKNKVEDHGGLQQGFEMNVGDDRFKAVFENHEFAIDPSNPKFKATPGMKQVLEEGRKKRKNDRYEIDETSRESGKVKKQKIKGANDDINSLVESIRQKAQRKA

SEQ ID NO: 23907 - DNA, 2649 bp, Muscodor strobelii
  misc_feature: SGI cDNA ID NO. 568143
  misc_feature: Elevated expression when VOC is produced
  misc_feature: Encodes the peptide sequence at SEQ ID NO 23908
atggatttgtttcgcaaggtcggacatgccttggaagaaggcattgaaaatgtcaaagacgcaattgaagagcgggatgagaaccgtcgtccccaaactcaacaagctggacaagctggcaaatttgaacatgaggaacacggtggccgtgatcacgatatcaggcccgtcgataccaaccatcgcttccaatccttctcgcctcagaccaagggcaacgcgaagtggtacgtcgacggggcttcgtacttttgggcagtgtccgacgctttagaacaggcacgtgagagtatctacatcctcgattggtggctcagccctgagctatatcttcgacgacctccttcacgcaatgagcaataccgcttggacaatatgctgcgtgcggccgctgagagaggcgttgaagtcaatgtaattgtgtacaaggaggtcacccaagcactcacattggactcagcacatacgaagcacgctcttgaagctttacaccctaacgtgaaagttttccggcatcccgaccactcacccacaagcaagggaaaactggaagccgcctttaaaggcctttctctggacaacctcagattgaacgctatgggactctccaagtgtcctcaaggtacacttaaggagctttacggtgcctttggcgataccgttctctattgggcgcaccacgagaaactatgtgttgttgatcgtcgagtcgcgtttatgggtggactggatatgtgttttggaagatacgataccaatagtcatcctatcgccgatgcacaccccggagatctggacgctattctcttccctggtcaggacttcaacaacgcccgagtgtttgattttgacggtgttgagaaatggaaccagaataaattggatagagcgaaggcctcgagaatgggatggtctgacatttctatctccttgaatggacccatcgttcacaaccttcttgaccacttcattgatcgctggaactatatcttcgacgagaagtacaacgagcaaaacccaggcaagtataggaaatttgccaatccaggctctgcattacagtcgagggggaatgaacaacaagagcaccggcgccaccatatgccccatatgggagatattgaaggtcaactcaatcgtggcatacgtcgcttcatgggtgaaggcgggccaggtggtcaagattacgagggcgaggagaggggtcattatgacaacgccggacatctgaatatccagctttgccgaagtgcctgcgactggtcttcgggtcacccattggagcactctattgcaaatgcctatgttcatgcgatcgagaattcagagcatttcgtatacattgagaatcagttcttcattactgccacgggagacgagcagcacccggttgaaaacaagattggtgctagcattgtgtctcgtattgtccgtgcccatcaaaatggcgagaatttccgcgtcatagtccttatgccagcagtgccggctttcgcaggtgacctgcaatctgacggcgctcttggaactcgagctattatggaatatcagtacaacagcatcaaccggggtggtcacagtatcatcgaatgtctccagcgaaagggcatcgacgattggcgccgttacatcggcttcttcaacctgcgtaactacgatcgcctcaatatttctgcgaccatgggagacgcagaaggtcgaagtggagttcgatacagcgatgcccgacgtgagcacgatgatatggttgaccgagactacgagcgtcacgacaggggctatggccaacacggccgccacgaggaatatgagagatatcagagtgcagctgcccgtacctcggatgaaacatgggacacggtaagcgcttgctacatggagggtggtcctgatatccggcgtgtaccttggcatggcagtgagcaagatgagatgaacgctttcgtttccgaggaactgtacattcactctaaagtgctcatcgcagacgaccgtctggttatctgcggctccgcgaacttgaatgaccgctctcaactcggatctcacgattccgaaatcgctgttgtcatcgaggatccagagacggtcgagtccgaaatggacggtcgtccctaccaagcctcccgcttcgcaacctcactgcgtcgtcaactcttccgcaagcacctcggtcttctgccggatcagcgcgtggacagacccaacaaaaactggacacccgtcgatcgcgacccgcagcagtacgactgggactcgcgatctgatcgcatcgtccaagatccgctttccgaagagttctggcagcactggacacgcaccgcccgaactaacaccgaggtcttcagcaaggtgttccacaatgtgcctaacgataatgtgcgcaactggcatcagtataaggacttcttcagcaagcacttcatcatccccggcgaggagtacgacgatcatgagaaagagggccgtgtcgactacggccacgtcgtgcctgaggagttccagggcggtgttggagaggtcaaggaatggctttctcgcgtccgtggtacgcttgtggagatgccgctcgatttcttggttgaggttgaggacttggctaaggagggattgagtcttaatgcgtttactgatgagatttatacctga

SEQ ID NO: 23908 - protein, 882 aa, Muscodor strobelii
  misc_feature: SGI Peptide ID NO. 568143
  misc_feature (222)..(249): Pfam Id: PF00614 Pfam Desc: Phospholipase D Active site motif
  misc_feature (651)..(678): Pfam Id: PF00614 Pfam Desc: Phospholipase D Active site motif
  misc_feature (43)..(882): NCBI GI: 39975799 Blast Desc: MGG_06174 [Magnaporthe grisea 70-15] gi|145011515|gb|EDJ96171.1| MGG_06174 [Magnaporthe grisea 70-15]
  misc_feature (44)..(882): NCBI GI: 116194570 Blast Desc: CHGG_03883 [Chaetomium globosum CBS 148.51] gi|88179796|gb|EAQ87264.1| CHGG_03883 [Chaetomium globosum CBS 148.51]
  misc_feature (44)..(882): NCBI GI: 171683305 Blast Desc: protein product [Podospora anserina] gi|170941612|emb|CAP67266.1| protein product [Podospora anserina]
  misc_feature (44)..(882): NCBI GI: 261352355 Blast Desc: phospholipase D2 [Verticillium albo-atrum VaMs.102]
  misc_feature (41)..(882): NCBI GI: 156063382 Blast Desc: SS1G_01809 [Sclerotinia sclerotiorum 1980] gi|154697143|gb|EDN96881.1| SS1G_01809 [Sclerotinia sclerotiorum 1980]
  misc_feature (41)..(882): NCBI GI: 154319259 Blast Desc: BC1G_02581 [Botryotinia fuckeliana B05.10] gi|150857012|gb|EDN32204.1| BC1G_02581 [Botryotinia fuckeliana B05.10]
  misc_feature (54)..(882): NCBI GI: 169775931 Blast Desc: [Aspergillus oryzae RIB40] gi|83771167|dbj|BAE61299.1| protein product [Aspergillus oryzae]
  misc_feature (3)..(882): NCBI GI: 189207875 Blast Desc: phospholipase D Active site motif protein [Pyrenophora tritici-repentis Pt-1C-BFP] gi|187976364|gb|EDU42990.1| phospholipase D Active site motif protein [Pyrenophora Pt-1C-BFP]
  misc_feature (57)..(882): NCBI GI: 171676904 Blast Desc: protein product [Podospora anserina] gi|170936519|emb|CAP61179.1| protein product [Podospora anserina]
  misc_feature (57)..(882): NCBI GI: 116196714 Blast Desc: CHGG_04955 [Chaetomium globosum CBS 148.51] gi|88180868|gb|EAQ88336.1| CHGG_04955 [Chaetomium globosum CBS 148.51]
  misc_feature (56)..(588): SWISSPROT Homolog: EC 3.1.4.4 Phospholipase D
  misc_feature: Useful for introducing or modulating the production of volatile compounds
MDLFRKVGHALEEGIENVKDAIEERDENRRPQTQQAGQAGKFEHEEHGGRDHDIRPVDTNHRFQSFSPQTKGNAKWYVDGASYFWAVSDALEQARESIYILDWWLSPELYLRRPPSRNEQYRLDNMLRAAAERGVEVNVIVYKEVTQALTLDSAHTKHALEALHPNVKVFRHPDHSPTSKGKLEAAFKGLSLDNLRLNAMGLSKCPQGTLKELYGAFGDTVLYWAHHEKLCVVDRRVAFMGGLDMCFGRYDTNSHPIADAHPGDLDAILFPGQDFNNARVFDFDGVEKWNQNKLDRAKASRMGWSDISISLNGPIVHNLLDHFIDRWNYIFDEKYNEQNPGKYRKFANPGSALQSRGNEQQEHRRHHMPHMGDIEGQLNRGIRRFMGEGGPGGQDYEGEERGHYDNAGHLNIQLCRSACDWSSGHPLEHSIANAYVHAIENSEHFVYIENQFFITATGDEQHPVENKIGASIVSRIVRAHQNGENFRVIVLMPAVPAFAGDLQSDGALGTRAIMEYQYNSINRGGHSIIECLQRKGIDDWRRYIGFFNLRNYDRLNISATMGDAEGRSGVRYSDARREHDDMVDRDYERHDRGYGQHGRHEEYERYQSAAARTSDETWDTVSACYMEGGPDIRRVPWHGSEQDEMNAFVSEELYIHSKVLIADDRLVICGSANLNDRSQLGSHDSEIAVVIEDPETVESEMDGRPYQASRFATSLRRQLFRKHLGLLPDQRVDRPNKNWTPVDRDPQQYDWDSRSDRIVQDPLSEEFWQHWTRTARTNTEVFSKVFHNVPNDNVRNWHQYKDFFSKHFIIPGEEYDDHEKEGRVDYGHVVPEEFQGGVGEVKEWLSRVRGTLVEMPLDFLVEVEDLAKEGLSLNAFTDEIYT

SEQ ID NO: 23909 - DNA, 3052 bp, Muscodor strobelii
  misc_feature: SGI EST ID NO. CUFF.56236.0
  misc_feature: Variant of the nucleotide sequence at SEQ ID NO 23907
tttaccaccaacaagcaatcatttttgtgctctccttgtgtttgctatcgttccacactcagtattttgctctggtgtcgtgactatatcgctactgattcttacgccaatctattcttattctttgttgctgtctcccgcttttcagcccctgtctagctcgttcggctgcatacaggacttgaccccaccatcgcgttctaactgtcgtcattcagctctggctcgccagaacagtaaaaatggatttgtttcgcaaggtcggacatgccttggaagaaggcattgaaaatgtcaaagacgcaattgaagagcgggatgagaaccgtcgtccccaaactcaacaagctggacaagctggcaaatttgaacatgaggaacacggtggccgtgatcacgatatcaggcccgtcgataccaaccatcgcttccaatccttctcgcctcagaccaagggcaacgcgaagtggtacgtcgacggggcttcgtacttttgggcagtgtccgacgctttagaacaggcacgtgagagtatctacatcctcgattggtggctcagccctgagctatatcttcgacgacctccttcacgcaatgagcaataccgcttggacaatatgctgcgtgcggccgctgagagaggcgttgaagtcaatgtaattgtgtacaaggaggtcacccaagcactcacattggactcagcacatacgaagcacgctcttgaagctttacaccctaacgtgaaagttttccggcatcccgaccactcacccacaagcaagggaaaactggaagccgcctttaaaggcctttctctggacaacctcagattgaacgctatgggactctccaagtgtcctcaaggtacacttaaggagctttacggtgcctttggcgataccgttctctattgggcgcaccacgagaaactatgtgttgttgatcgtcgagtcgcgtttatgggtggactggatatgtgttttggaagatacgataccaatagtcatcctatcgccgatgcacaccccggagatctggacgctattctcttccctggtcaggacttcaacaacgcccgagtgtttgattttgacggtgttgagaaatggaaccagaataaattggatagagcgaaggcctcgagaatgggatggtctgacatttctatctccttgaatggacccatcgttcacaaccttcttgaccacttcattgatcgctggaactatatcttcgacgagaagtacaacgagcaaaacccaggcaagtataggaaatttgccaatccaggctctgcattacagtcgagggggaatgaacaacaagagcaccggcgccaccatatgccccatatgggagatattgaaggtcaactcaatcgtggcatacgtcgcttcatgggtgaaggcgggccaggtggtcaagattacgagggcgaggagaggggtcattatgacaacgccggacatctgaatatccagctttgccgaagtgcctgcgactggtcttcgggtcacccattggagcactctattgcaaatgcctatgttcatgcgatcgagaattcagagcatttcgtatacattgagaatcagttcttcattactgccacgggagacgagcagcacccggttgaaaacaagattggtgctagcattgtgtctcgtattgtccgtgcccatcaaaatggcgagaatttccgcgtcatagtccttatgccagcagtgccggctttcgcaggtgacctgcaatctgacggcgctcttggaactcgagctattatggaatatcagtacaacagcatcaaccggggtggtcacagtatcatcgaatgtctccagcgaaagggcatcgacgattggcgccgttacatcggcttcttcaacctgcgtaactacgatcgcctcaatatttctgcgaccatgggagacgcagaaggtcgaagtggagttcgatacagcgatgcccgacgtgagcacgatgatatggttgaccgagactacgagcgtcacgacaggggctatggccaacacggccgccacgaggaatatgagagatatcagagtgcagctgcccgtacctcggatgaaacatgggacacggtaagcgcttgctacatggagggtggtcctgatatccggcgtgtaccttggcatggcagtgagcaagatgagatgaacgctttcgtttccgaggaactgtacattcactctaaagtgctcatcgcagacgaccgtctggttatctgcggctccgcgaacttgaatgaccgctctcaactcggatctcacgattccgaaatcgctgttgtcatcgaggatccagagacggtcgagtccgaaatggacggtcgtccctaccaagcctcccgcttcgcaacctcactgcgtcgtcaactcttccgcaagcacctcggtcttctgccggatcagcgcgtggacagacccaacaaaaactggacacccgtcgatcgcgacccgcagcagtacgactgggactcgcgatctgatcgcatcgtccaagatccgctttccgaagagttctggcagcactggacacgcaccgcccgaactaacaccgaggtcttcagcaaggtgttccacaatgtgcctaacgataatgtgcgcaactggcatcagtataaggacttcttcagcaagcacttcatcatccccggcgaggagtacgacgatcatgagaaagagggccgtgtcgactacggccacgtcgtgcctgaggagttccagggcggtgttggagaggtcaaggaatggctttctcgcgtccgtggtacgcttgtggagatgccgctcgatttcttggttgaggttgaggacttggctaaggagggattgagtcttaatgcgtttactgatgagatttatacctgatctaacgcagaaatgtgtttggggttaaaaatggggttggatctcgcaggctggtcttgttgggttatcctgaatcgtaactctgtgctggatttgcgtcttgaggtgatgcggtgctaggtatttgcgcattgcaatcgtcctttaccatacgtcccgat

SEQ ID NO: 23910 - DNA, 1290 bp, Muscodor strobelii
  misc_feature: SGI cDNA ID NO. 568144
  misc_feature: Encodes the peptide sequence at SEQ ID NO 23911
atgcgttactcacttcttgctcccgccatcctggcgagcgccgttcacgcatggctgcccatggatcgcgatctcgctgccttcaaccagactcatcgattcgcagagctgggcaagcgttggcaaccttctctacctagcggtacgacgaaaattcgtggtgtcaactttggatcatggctcatctgcgagaagtggttgatgacggatgagtgggtcaacaccatgggctgtggtgattcggtctccgagttcgactgtatgaacgaccactacaagggcggcaaccgcgatgccggtaatgctgcgttcgagaagcactggagcacatggattacccccgacgacgtgcaaaaagtctacaatgtcggcttgaacaccatccgtatcccgatcggatactggtcctataacgatatcgtcgacacggcatctgagcccttcgcagacggaaatctcatgctgccttacctcgacgccgttgtgcagaaagccgctgacctcggaatttacgtcatcattgacctacacggtgctcccggtggtcaacagcaagatgtcttcaccggccagaaccccaacccggccggcttcttcaacgactacgactatggccgtgccgagaaatggctaacatggatgacaaaccgcatccacacaaactctgcctactcctccgtaggaatgatcgaagtcctcaacgagcccgtctccggccacgacgccggcggtcgatacccagcacccggcgaggaaaccctcgtctcgtcatattacggcggagccctcgccgcagtccgcaacgaagagtcctccctgggcgtgtcaggcgacaaggcattaaccgtacaatttatgtcagagaaatgggactccggaaacccccgcgacaactcggccgtcgcaaacgatggtgcagcaggctacgacgaccacaactacatcggcttcgccgtgtccaacaacggggaccaaacagcgctcatgcaatccgcatgtcgcgattcgcgcgtagtctcggggcaagatttcacgatcacgggtgaatggagcatgacgagcagcgtggactggaacgatcagtctttcttccataatttcttcactgctcagcagcagttgtatgagaagcccggtatggcgggttgggtttactggacgtggaagagtgcgctgaatgacccgaggtgggattatcattatgctactgggttgagtgggtatgtgcctacggatgctgctgggttggaggggaatgtgtataatgatgtttgtgctgggtttacgtag

SEQ ID NO: 23911 - protein, 429 aa, Muscodor strobelii
  misc_feature: SGI Peptide ID NO. 568144
  misc_feature (86)..(396): Pfam Id: PF00150 Pfam Desc: Cellulase (glycosyl hydrolase family 5)
  misc_feature (86)..(236): Pfam Id: PF00150 Pfam Desc: Cellulase (glycosyl hydrolase family 5)
  misc_feature (1)..(428): NCBI GI: 157779718 Blast Desc: beta-1,6-glucanase [Hypocrea virens]
  misc_feature (1)..(428): NCBI GI: 19072999 Blast Desc: AF395757_1 beta-1,6-glucanase precursor [Hypocrea virens]
  misc_feature (1)..(428): NCBI GI: 190663747 Blast Desc: glucan endo-1,6-beta-glucanase [Hypocrea lixii]
  misc_feature (1)..(428): NCBI GI: 222090446 Blast Desc: beta-1,6-glucanase BG16.1 [Hypocrea lixii]
  misc_feature (1)..(428): NCBI GI: 1052824 Blast Desc: glucan endo-1,6-beta-glucanase; glucan endo-1,6-beta-glucosidase [Hypocrea lixii]
  misc_feature (1)..(428): NCBI GI: 46127775 Blast Desc: FG08265.1 [Gibberella zeae PH-1]
  misc_feature (1)..(428): NCBI GI: 22655548 Blast Desc: b-1,6-glucanase [Neotyphodium sp. FCB-2002]
  misc_feature (1)..(428): NCBI GI: 256730411 Blast Desc: glycoside hydrolase family 5 [Nectria haematococca mpVI 77-13-4]
  misc_feature (1)..(429): NCBI GI: 51173868 Blast Desc: beta-1,6-glucanase [Acremonium sp. OXF C13]
  misc_feature (1)..(428): NCBI GI: 116766034 Blast Desc: beta-1,6-glucanase [Neotyphodium lolii]
  misc_feature (51)..(400): SWISSPROT Homolog: EC 3.2.1.58 Glucan 1,3-beta-glucosidase
MRYSLLAPAILASAVHAWLPMDRDLAAFNQTHRFAELGKRWQPSLPSGTTKIRGVNFGSWLICEKWLMTDEWVNTMGCGDSVSEFDCMNDHYKGGNRDAGNAAFEKHWSTWITPDDVQKVYNVGLNTIRIPIGYWSYNDIVDTASEPFADGNLMLPYLDAVVQKAADLGIYVIIDLHGAPGGQQQDVFTGQNPNPAGFFNDYDYGRAEKWLTWMTNRIHTNSAYSSVGMIEVLNEPVSGHDAGGRYPAPGEETLVSSYYGGALAAVRNEESSLGVSGDKALTVQFMSEKWDSGNPRDNSAVANDGAAGYDDHNYIGFAVSNNGDQTALMQSACRDSRVVSGQDFTITGEWSMTSSVDWNDQSFFHNFFTAQQQLYEKPGMAGWVYWTWKSALNDPRWDYHYATGLSGYVPTDAAGLEGNVYNDVCAGFT

SEQ ID NO: 23912 - DNA, 4912 bp, Muscodor strobelii
  misc_feature: SGI EST ID NO. CUFF.56240.0
  misc_feature: Variant of the nucleotide sequence at SEQ ID NO 23910
gtagcatgtagcacagtcactcgctcaaatgccctatttcttactacgaaaactgttccatgtcggctcgatcaaatatcactactaatgctacatccaagatgtcatctaaatttccttctagaatgcccatggaatgaagcattgaaatattcagtcaattagtctcgcactgccacatgtcagaagtttccacgcaaggttggcagcgtcaacccgggagattcacacaggcagcactacctactaggcagccctaggtacaacacagtctccatgttcccattatgttgaatggcaggctcgatgctgcctcatgcagactttgttcgtcgcaacttctcgaaacatatctgcagtgggaagagatgacacaatttttgattttgtctactgcattggatttgtctctccaagacaccacatgcaagcagtgtactggaggccggtacaatgctcgaagatagtacccatccactccctaaactttcacactcggaggtctcagtatactgtgcatccaagtcaccttcacccaaatcacattctttcatgtcgtagaaaacatttccgcgagctcgtgtataatcatggccgagcctccagtaaaacgccagcgcctgagcgatagcgaggactctaagaagagagaatgggaccgatcagccccttcttcccttcttcaccccattagtcccccaaggaagaagagagtacaagaacaaattcggcattcctctcccttccatctcacaatgatcagagatctcccagacactgacaatgttggagcactgtctctgggcgatctagttggagatccactcattgctgagatttgggagttcaactatcttcacgatatcgactttctcctgggtcatctcgaccaagacactcgagttctgaccaagatccatattgtccatggcttctggaaaaatgaggatactagtagactgatgctgcaggaacaagcatctcgacatgaaaatgtcacacttcacactgcgtttatgccagagatgtttggcacccatcattccaagatgatgatcttcatcagacatgatgatacagcgcaggtcgttatacatacagcaaacatgatcgcaaaggactggacgaatatgacgaacggaatctggcagtctcctctgcttccaaaacttcagaccccagatactagcaataatgcagaagcaccgctagggagcggtccgagattcaaagtcgatcttttgaattatcttcgtgcgtataacacgcgacgaaacgtttgtaaaccgctagttgacgagcttgcggggtacgacttttctgctatccgtgggtcgctcattgccagtgtcccgggcaagcataatgtagagcacgaaccaaacgcgactcattggggatggcaaggtctcaaggaaaccttgaaaagtgtaccaatgtgagttatatctaccagagaacaggcctgcatatgaattggaaaaatcagactttttgtatagtaaagtcataaatagtagctaaccaggaatgcttcgaccgataagacagttaggaaaatccgatattgtagtccaaatctcctccatagccacacttggggccaaagatacctggttgcaacgcactcttttcgactcgctctcgcccgtgtcgtctggagacccaaagccaaagttcaaggtcgtattccctacggcagacgagattcgcctttcactagacggctatgcatctggcggctcgatacataccaaaatccagtcatcgcagcaagcaaaacaacttgaatatctgcggcctctatttcaccactgggctaatgacggtgcctccaactcgtcattgagagatgccggtcgtcagcgcgcagcaccgcacatcaagacgtatattcgacatggcgagaagtcaatcgactgggcattattgacctcggccaatatctccaaacaggcatggggagaagcgaccaataaaagtggtgaagtgcggatcgcttcatgggaaataggcgttctagtttggccagagctgctcactggagacgccaacgccagactcgtaggcacgttccagactgatgagccggcgagggaagaggagatcggagaagaccacatgcccatcgtggggctcagaatcccatatagtatgccattgcagaagtatggatctacagaggtgccttgggtcgcgactaatcgtcacttgatccctgattggaagggacaacaatggctaggctggggacagtaattgtcgatctacgaaaatacttgcacataagaattaagcataaagcttgtgtgttgaaaagacacaaacggcagttgtgttaaccatgggatatgagcaaggagagacgggtggcgtcagccatcctgaccctcgtcccaaaattacagagttactatcaaatgaaatgcggccactagcaggatatcgacttgtacggtacattgtacgccgataaaactctgcaatgggacatcatttcgccaatgctctcttattgaagtacgtggtgaatactgagtctacctagttatcgagtctaccgagtccgctccaagagtatctcttataaatctacgtatccgtagaatgctgtgccaaggacgggagaggagatcctatgatgatctgggaccgtggttcaacttggctctgcaccccggcctcaacgaagcagccaattggcatttttatttataggtatggccgacgaggctcgccgcaatatgaggtgttcggtcgcatacaagacagcagggttcaatctgtttcacgtttccgtggcccacggcctgcctatttcagagggaacaaagggacccaaggtgggcgagtatactagtagttcgtgtctgcgagctcgcagattccgattgcgttaaggccagtagaagacagggccttcgtagcagtcttgtgatgactattatatgctattctgatgaacacagcaattgttaacgtcgatcacgaaaaggacctgacatcagccagagatcagccatacataaagggtcggtattccattttcgttgcgacttgcctttaagattaaggctcgttcttggcatccctgaatgcacacgcaatttaagtttagatgattggatgagagacgctcccagcggtcagcttccccacataccacacgacttcatcgccttacttacggggtccggctttgcatgtcgatcctagggagcggacaagagcggagttaatacggtagttaacgctaccacgcccgctaggtttcaagacttggaaagaatatggaaggccgtaaacatcgctgacgttttaatccagcctgtaattccaatcggtccgagatggcatcagcgtggtgcagagggtggcggcgggcgagaaaccgcttgtttagtcacgatgtgtaaaagggccatatatatgatgtgacctcgactttattgcgaatctgtttcgccactccgcatccatcttcggcgcagtctatccattcattcctgtcaagatgcgttactcacttcttgctcccgccatcctggcgagcgccgttcacgcatggctgcccatggatcgcgatctcgctgccttcaaccagactcatcgattcgcagagctgggcaagcgttggcaaccttctctacctagcggtacgacgaaaattcgtggtgtcaactttggatcatggctcatctgcgagaagtggttgatgacggatgagtgggtcaacaccatgggctgtggtgattcggtctccgagttcgactgtatgaacgaccactacaagggcggcaaccgcgatgccggtaatgctgcgttcgagaagcactggagcacatggattacccccgacgacgtgcaaaaagtctacaatgtcggcttgaacaccatccgtatcccgatcggatactggtcctataacgatatcgtcgacacggcatctgagcccttcgcagacggaaatctcatgctgccttacctcgacgccgttgtgcagaaagccgctgacctcggaatttacgtcatcattgacctacacggtgctcccggtggtcaacagcaagatgtcttcaccggccagaaccccaacccggccggcttcttcaacgactacgactatggccgtgccgagaaatggctaacatggatgacaaaccgcatccacacaaactctgcctactcctccgtaggaatgatcgaagtcctcaacgagcccgtctccggccacgacgccggcggtcgatacccagcacccggcgaggaaaccctcgtctcgtcatattacggcggagccctcgccgcagtccgcaacgaagagtcctccctgggcgtgtcaggcgacaaggcattaaccgtacaatttatgtcagagaaatgggactccggaaacccccgcgacaactcggccgtcgcaaacgatggtgcagcaggctacgacgaccacaactacatcggcttcgccgtgtccaacaacggggaccaaacagcgctcatgcaatccgcatgtcgcgattcgcgcgtagtctcggggcaagatttcacgatcacgggtgaatggagcatgacgagcagcgtggactggaacgatcagtctttcttccataatttcttcactgctcagcagcagttgtatgagaagcccggtatggcgggttgggtttactggacgtggaagagtgcgctgaatgacccgaggtgggattatcattatgctactgggttgagtgggtatgtgcctacggatgctgctgggttggaggggaatgtgtataatgatgtttgtgctgggtttacgtagatgccttcaccatctgcccggatggcttgatggtgatgagagttgagggaatgaataaaatgagaatggataccccataccatctttgtgtatatgtgacgatgtttg

SEQ ID NO: 23913 - DNA, 2061 bp, Muscodor strobelii
  misc_feature: SGI cDNA ID NO. 568145
  misc_feature: Reduced expression when VOC is produced
  misc_feature: Encodes the peptide sequence at SEQ ID NO 23914
atgcgggtttcttcgctcgcgctgctgtttggcgcagcaaagttggccctcacccaggccaccggcgccgccctcaaagaactgtccgaagatgactttaccacattcaacgacaaaaaggtgccccctctgctcgagctcaccgacgagagcttcgagaaagagacgaaggcgtccaagtttatggtcgtcaaatatttcaatccctattgtcctcactgtatagattttgcgcctacttatcaaaccttgtacgaattctactacacctcagccgcgacgaaagatgccaagaaaccaaaagaaaccgttcctttcgaagaagcgtacgatattcgatttgccaccctcaactgtcttgcctacggtgatgtctgtgcagagcatgacattgtcgcctacccccgcacagtcatcttcaaggatagtgagcgcgtcgacatgatcgctggcgctaaatctatagatcaagtctcagaggcgatcgaggcacagcttgagaaagagaaccctggaactcggcccaagaagctgtatttacctgagccagaagcgactgaggctcccggtttcagacgccctggcgccaagtcctccgctgctaccaagaccgaacccgatgccaaagccgtcaaggacacaaagccagccaagccaaccgtgactccgaacatcgagggcacatcagtgtctctgaccgccgagagcttccagaacctagtcactatgacacaggatccctggttcatcaagttttacgctccctggtgccaccactgccaggccatggctcccaactgggaacaattggccaaggagatgaaaggcagactgaacatcggcgaggtcaactgcgaggtggagagcaggctctgcaaagatgtccgcgtcaagggctatcctaccatccactttttcaagggcggcgaacgagtcgagtatgacggtcttcgagcgctcggcgacttcctcaactacgctgagaaagcacttgatatcatcgaaggtatccaggatgtagatgcggagtctttcgctgagctggagaagaaggaagacgtcattttcgtatatttctacgaccaggctaccgccagcgaagatttcgccgccctcaacagactacccctgagcttaatcggacgtgcgaagctcgtcaagacggatgaccctgcgctatatgagcgcttcaagattaccacgtggcctagaatgcttgtgtcgcgagagggccgacctacatattacacacctttgacgccaagagaaatgcgagacacccatatggtcctttcgtggatgaagtccgtatggctgcctattgtccctgagctcacagcttccaacgcccgcgagatcatggatgggaagattgtcgtcctcggtgttctgaaccgagaaaacgaggacaatttcattcaagccaagcacgaaatgaaggaggctgcgacagaatggatggacaagcagattcaagccttccagcttgagcgacagaatctccgagatgccaaacagttacgcctcgaggaagcagaggaccgaggcgaccagcgcggagtgagaaacgccaagagtattcgcatcaacatggattggtctgaccgcaaagaggttgcctttgcctgggttgatggtactttctggcagagatggattcggactacctatggaatcgacagcaaggatggcgatcgtgttatcatcaacgacgaagataaccggcgatactgggacgaaagcgtcaacggattcagcatcaccccgtcgcgcgtatcaattctcgagactatccccaaagtcaccgtttcaccgcccctcatcaagcccaagctcaccatctcgagcttcgagaaggtcttcttcgacatcaagatgaccttcgtcgaacatccctacctttccggtggctgcatcgcgggtatcgctttcggaatcatctcgtggtacaggggacgcagccgcatgggccgtgggcacttcaagctcgacgacagtctcccgattaaagagatcaaggacagtcttctgggcaacaccgccaacggtaagaacgactga

SEQ ID NO: 23914 - protein, 686 aa, Muscodor strobelii
  misc_feature: SGI Peptide ID NO. 568145
  misc_feature (228)..(330): Pfam Id: PF00085 Pfam Desc: Thioredoxin
  misc_feature (43)..(165): Pfam Id: PF00085 Pfam Desc: Thioredoxin
  misc_feature (43)..(84): Pfam Id: PF00085 Pfam Desc: Thioredoxin
  misc_feature (64)..(686): NCBI GI: 238493255 Blast Desc: disulfide isomerase, [Aspergillus flavus NRRL3357] gi|220696358|gb|EED52700.1| disulfide isomerase, [Aspergillus flavus NRRL3357]
  misc_feature (199)..(665): NCBI GI: 156034729 Blast Desc: SS1G_13300 [Sclerotinia sclerotiorum 1980] gi|154698703|gb|EDN98441.1| SS1G_13300 [Sclerotinia sclerotiorum 1980]
  misc_feature (34)..(686): NCBI GI: 226279851 Blast Desc: conserved [Paracoccidioides brasiliensis Pb01]
  misc_feature (19)..(634): NCBI GI: 255950436 Blast Desc: Pc22g20860 [Penicillium chrysogenum Wisconsin 54-1255] gi|211593002|emb|CAP99374.1| Pc22g20860 [Penicillium chrysogenum Wisconsin 54-1255]
  misc_feature (34)..(659): NCBI GI: 226289731 Blast Desc: conserved [Paracoccidioides brasiliensis Pb18]
  misc_feature (31)..(641): NCBI GI: 258577049 Blast Desc: conserved [Uncinocarpus reesii 1704] gi|237902972|gb|EEP77373.1| conserved [Uncinocarpus reesii 1704]
  misc_feature (34)..(686): NCBI GI: 121715492 Blast Desc: disulfide isomerase, [Aspergillus clavatus NRRL 1] gi|119403512|gb|EAW13929.1| disulfide isomerase, [Aspergillus clavatus NRRL 1]
  misc_feature (200)..(661): NCBI GI: 154311210 Blast Desc: BC1G_06723 [Botryotinia fuckeliana B05.10] gi|150851127|gb|EDN26320.1| BC1G_06723 [Botryotinia fuckeliana B05.10]
  misc_feature (34)..(659): NCBI GI: 225682342 Blast Desc: conserved [Paracoccidioides brasiliensis Pb03]
  misc_feature (1)..(658): NCBI GI: 119178105 Blast Desc: CIMG_07920 [Coccidioides immitis RS]
  misc_feature: Useful for introducing or modulating the production of volatile compounds
MRVSSLALLFGAAKLALTQATGAALKELSEDDFTTFNDKKVPPLLELTDESFEKETKASKFMVVKYFNPYCPHCIDFAPTYQTLYEFYYTSAATKDAKKPKETVPFEEAYDIRFATLNCLAYGDVCAEHDIVAYPRTVIFKDSERVDMIAGAKSIDQVSEAIEAQLEKENPGTRPKKLYLPEPEATEAPGFRRPGAKSSAATKTEPDAKAVKDTKPAKPTVTPNIEGTSVSLTAESFQNLVTMTQDPWFIKFYAPWCHHCQAMAPNWEQLAKEMKGRLNIGEVNCEVESRLCKDVRVKGYPTIHFFKGGERVEYDGLRALGDFLNYAEKALDIIEGIQDVDAESFAELEKKEDVIFVYFYDQATASEDFAALNRLPLSLIGRAKLVKTDDPALYERFKITTWPRMLVSREGRPTYYTPLTPREMRDTHMVLSWMKSVWLPIVPELTASNAREIMDGKIVVLGVLNRENEDNFIQAKHEMKEAATEWMDKQIQAFQLERQNLRDAKQLRLEEAEDRGDQRGVRNAKSIRINMDWSDRKEVAFAWVDGTFWQRWIRTTYGIDSKDGDRVIINDEDNRRYWDESVNGFSITPSRVSILETIPKVTVSPPLIKPKLTISSFEKVFFDIKMTFVEHPYLSGGCIAGIAFGIISWYRGRSRMGRGHFKLDDSLPIKEIKDSLLGNTANGKND

SEQ ID NO: 23915 - DNA, 3004 bp, Muscodor strobelii
  misc_feature: SGI EST ID NO. CUFF.56654.0
  misc_feature: Variant of the nucleotide sequence at SEQ ID NO 23913
tgtcatcctagcctagcagttgggagagctgcgaataggcacaacgcctgttccatatccaaataataccgtaacatatcttcatcgcgctgaattcaactgttccttgctattgatcccctaagactttaattcctctatcttcgttttcttcattgttgggtttccgcatcgcctgcgccgcactctgcagcgggccagtttttctgtcgctccttcatcaggtatctggcaatcccgcagtgcctcgtatttccgtccgccgacacaaatgcgctacgccccctgacgcgatctgaagccccctaatcattgtttcgccaaccgaaccttcagcctcctcccacatccctcgaaaccatcgagtcgacggcagactcctgaacaatccaacacctacctttgtcgctgtcgctgttgcctatatttctgttgtagctgtcggtgcagctgacacactgcagccatgcgggtttcttcgctcgcgctgctgtttggcgcagcaaagttggccctcacccaggccaccggcgccgccctcaaagaactgtccgaagatgactttaccacattcaacgacaaaaaggtgccccctctgctcgagctcaccgacgagagcttcgagaaagagacgaaggcgtccaagtttatggtcgtcaaatatttcaatccctattgtcctcactgtatagattttgcgcctacttatcaaaccttgtacgaattctactacacctcagccgcgacgaaagatgccaagaaaccaaaagaaaccgttcctttcgaagaagcgtacgatattcgatttgccaccctcaactgtcttgcctacggtgatgtctgtgcagagcatgacattgtcgcctacccccgcacagtcatcttcaaggatagtgagcgcgtcgacatgatcgctggcgctaaatctatagatcaagtctcagaggcgatcgaggcacagcttgagaaagagaaccctggaactcggcccaagaagctgtatttacctgagccagaagcgactgaggctcccggtttcagacgccctggcgccaagtcctccgctgctaccaagaccgaacccgatgccaaagccgtcaaggacacaaagccagccaagccaaccgtgactccgaacatcgagggcacatcagtgtctctgaccgccgagagcttccagaacctagtcactatgacacaggatccctggttcatcaagttttacgctccctggtgccaccactgccaggccatggctcccaactgggaacaattggccaaggagatgaaaggcagactgaacatcggcgaggtcaactgcgaggtggagagcaggctctgcaaagatgtccgcgtcaagggctatcctaccatccactttttcaagggcggcgaacgagtcgagtatgacggtcttcgagcgctcggcgacttcctcaactacgctgagaaagcacttgatatcatcgaaggtatccaggatgtagatgcggagtctttcgctgagctggagaagaaggaagacgtcattttcgtatatttctacgaccaggctaccgccagcgaagatttcgccgccctcaacagactacccctgagcttaatcggacgtgcgaagctcgtcaagacggatgaccctgcgctatatgagcgcttcaagattaccacgtggcctagaatgcttgtgtcgcgagagggccgacctacatattacacacctttgacgccaagagaaatgcgagacacccatatggtcctttcgtggatgaagtccgtatggctgcctattgtccctgagctcacagcttccaacgcccgcgagatcatggatgggaagattgtcgtcctcggtgttctgaaccgagaaaacgaggacaatttcattcaagccaagcacgaaatgaaggaggctgcgacagaatggatggacaagcagattcaagccttccagcttgagcgacagaatctccgagatgccaaacagttacgcctcgaggaagcagaggaccgaggcgaccagcgcggagtgagaaacgccaagagtattcgcatcaacatggattggtctgaccgcaaagaggttgcctttgcctgggttgatggtactttctggcagagatggattcggactacctatggaatcgacagcaaggatggcgatcgtgttatcatcaacgacgaagataaccggcgatactgggacgaaagcgtcaacggattcagcatcaccccgtcgcgcgtatcaattctcgagactatccccaaagtcaccgtttcaccgcccctcatcaagcccaagctcaccatctcgagcttcgagaaggtcttcttcgacatcaagatgaccttcgtcgaacatccctacctttccggtggctgcatcgcgggtatcgctttcggaatcatctcgtggtacaggggacgcagccgcatgggccgtgggcacttcaagctcgacgacagtctcccgattaaagagatcaaggacagtcttctgggcaacaccgccaacggtaagaacgactgaacgaaccaccgaaatcgaggactgaaagcaaggcgccacgatcacataaagtcgtcgcggggatgccaacatcatcccgcggggagttctgtatactaccctcttgatatatcacacaccgctcgtgtcgtcgcatcattttaggtatcatctcatagcgacacgccagctttgatggatgttagacggagttttttggtcttggttatgaaaagggaggggagggcttttcatcatgtcatgattgtggtctgtcttttcgtaatacaatgcggccatggcgtgttggggaaggggttctgtttgacttgaccggcatctctcacgctgtatagggctctctatggaaaggtacaccaatgatgggcgaggaagatgcgtccgttaaacatggaacctctttcgtgtattttgaatgtcgcatagcctggcgtcgtaatactatattttcatgaatgtctaaaatcatgtcgtgcg

SEQ ID NO: 23916 - DNA, 306 bp, Muscodor strobelii
  misc_feature: SGI cDNA ID NO. 568146
  misc_feature: Encodes the peptide sequence at SEQ ID NO 23917
atgtcttccgtcgacgccaacagcccggccttcgtcgccaaccctgccttcaagaaggcggccgacgagtcgaaacagctcaccaagcgccctaccaacgacgagctgcttgagctctacggtctcttcaaggtcggactgggcgacaatttcgccgaggctaagaagcccggatacctcgacttgaaggagaaatacaagtacgagtcctggaagaagttcgccgagaccgagggcctatcgcaagagcaggcccaggagaagtacatcgcgaaggtggaggagctcaaggccaaatacgcttaa

SEQ ID NO: 23917 - protein, 101 aa, Muscodor strobelii
  misc_feature: SGI Peptide ID NO. 568146
  misc_feature (13)..(101): Pfam Id: PF00887 Pfam Desc: Acyl CoA binding protein
  misc_feature (16)..(101): NCBI GI: 171683307 Blast Desc: protein product [Podospora anserina] gi|170941613|emb|CAP67267.1| protein product [Podospora anserina]
  misc_feature (16)..(101): NCBI GI: 85107476 Blast Desc: NCU06346 [Neurospora crassa OR74A] gi|28923985|gb|EAA33144.1| NCU06346 [Neurospora crassa OR74A]
  misc_feature (16)..(101): NCBI GI: 39975793 Blast Desc: MGG_06177 [Magnaporthe grisea 70-15] gi|145011512|gb|EDJ96168.1| MGG_06177 [Magnaporthe grisea 70-15]
  misc_feature (16)..(101): NCBI GI: 256727500 Blast Desc: NECHADRAFT_58149 [Nectria haematococca mpVI 77-13-4]
  misc_feature (14)..(101): NCBI GI: 226279849 Blast Desc: conserved [Paracoccidioides brasiliensis Pb01]
  misc_feature (17)..(101): NCBI GI: 225682340 Blast Desc: PABG_02855 [Paracoccidioides brasiliensis Pb03]
  misc_feature (17)..(101): NCBI GI: 226289729 Blast Desc: conserved [Paracoccidioides brasiliensis Pb18]
  misc_feature (16)..(101): NCBI GI: 145234867 Blast Desc: An03g01800 [Aspergillus niger] gi|134057758|emb|CAK38153.1| protein product [Aspergillus niger]
  misc_feature (16)..(101): NCBI GI: 116194576 Blast Desc: CHGG_03886 [Chaetomium globosum CBS 148.51] gi|88179799|gb|EAQ87267.1| CHGG_03886 [Chaetomium globosum CBS 148.51]
  misc_feature (10)..(101): NCBI GI: 261191837 Blast Desc: conserved [Ajellomyces dermatitidis SLH14081] gi|239589642|gb|EEQ72285.1| conserved [Ajellomyces dermatitidis SLH14081] gi|239608616|gb|EEQ85603.1| conserved [Ajellomyces
MSSVDANSPAFVANPAFKKAADESKQLTKRPTNDELLELYGLFKVGLGDNFAEAKKPGYLDLKEKYKYESWKKFAETEGLSQEQAQEKYIAKVEELKAKYA

SEQ ID NO: 23918 - DNA, 888 bp, Muscodor strobelii
  misc_feature: SGI EST ID NO. CUFF.56658.0
  misc_feature: Variant of the nucleotide sequence at SEQ ID NO 23916
ggccagtgacgggtcgcaaccccgctcgccctgagtaccacctgccgagctgttgggattcagggattgcaggatggcatatgacgaacaaccccgccaaacctcagacctagcttgtccccccatcatcccaacataaacaccacgatcttccgagcttcattcagttgtccaattttgacatatctcttctccactcctctgtatctaaacaagattgttgtgcctgcaacaagacaatccaattcccacaatgtcttccgtcgacgccaacagcccggccttcgtcgccaaccctgccttcaagaaggcggccgacgagtcgaaacagctcaccaagcgccctaccaacgacgagctgcttgagctctacggtctcttcaaggtcggactgggcgacaatttcgccgaggctaagaagcccggatacctcgacttgaaggagaaatacaagtacgagtcctggaagaagttcgccgagaccgagggcctatcgcaagagcaggcccaggagaagtacatcgcgaaggtggaggagctcaaggccaaatacgcttaagcgagctgctcgacacaaatcttgatgatcgaataccgataccgattacatactttggcgtgaaatgacagtctagacaaacagacagacagacaaggcacaaaagaagatgtgatgcatacatacatagcacggcggtcagaacacgttgcactttgggctttagcttgttttattacttaagcttaaactcgcaaatcaactacatttttgaacgacttcctatcattagatcttgacttgtttgtggcttgttcgcgtgaaaggcatgccagaccgtcgagtagatcggcgaataatgcaggcttatatatatacctaaatctcta

SEQ ID NO: 23919 - DNA, 1146 bp, Muscodor strobelii
  misc_feature: SGI cDNA ID NO. 568147
  misc_feature: Encodes the peptide sequence at SEQ ID NO 23920
atgacaaagacgatcgtggtactaggcggcgcatacgccggtgtgcaaatcgcacacaggctcctcaaacatacgaggcctcatgttaaagacttgaaggtcattctcatctccaagaattcccacttctactggaacatggcatcagtccgtgcaattgtcccaggtgtcatgaaagagaccgagtacagccaacccattgcccctggtttctcccagtatccggcggaagcttttgaattcgttattggtactgccgaggccgtcgactcagaaaataaaactgtaaaggtactagtaactgaagatggttcccagcaggtcgtcaactacgatcagctagtcatcgcaacgggcacacgcggtgttggtaatacggcagtgccgtggaagaacaacggcacatatgaagagataatttctcttatcaccgagactcaaaacaaggtcaaggccgccaagcacattgtggtcgctggtgctggcgccacaggtgttgagacagcggctgagttggcttttgaatacgcaaatcctaaagactcagctaacaggaaggaaattgtcctcttgtcaggtgataaagaggtgatgggtggcgacagcatcgcgagcaacgtggcatcagagttgaagaaactgcacgtagttgtccgcccttcagcacgcgtggcatctaccaacgagctccccgacggcaagactgaaattgttcttgagagtggagagaagatagtcacagacttgtatctacccacgatgggcgtggtgccgaacaccgagtttctcccgtctgcactcctgacagataagaaattcgccaacatcgatgagttttaccgcgtcaagggagccgaagatgtttgggctgctggcgacgtggtctggaaaccacgcggtagttttgtcctcactgacaagcaagctgccggcgttgcgaagaatatcgatgccgtactcaagggcaaaggccccacgcccgtcaagactatcccgattgatgttcttatggtcaccactggtcgaagccgcggtgctggacgcatgggcgtggtgaaggctttcagcatgatggtttactatatcaaggggaagaccctcggtactgaacggttaccaagctgggttgatggttctcgattctaa

SEQ ID NO: 23920 - protein, 381 aa, Muscodor strobelii
  misc_feature: SGI Peptide ID NO. 568147
  misc_feature (155)..(255): Pfam Id: PF00070 Pfam Desc: Pyridine nucleotide-disulphide oxidoreductase
  misc_feature (4)..(298): Pfam Id: PF07992 Pfam Desc: Pyridine nucleotide-disulphide oxidoreductase
  misc_feature (1)..(381): NCBI GI: 261352348 Blast Desc: conserved [Verticillium albo-atrum VaMs.102]
  misc_feature (1)..(381): NCBI GI: 256726930 Blast Desc: NECHADRAFT_33204 [Nectria haematococca mpVI 77-13-4]
  misc_feature (1)..(381): NCBI GI: 46136409 Blast Desc: FG09720.1 [Gibberella zeae PH-1]
  misc_feature (3)..(379): NCBI GI: 39975789 Blast Desc: MGG_06179 [Magnaporthe grisea 70-15] gi|145011510|gb|EDJ96166.1| MGG_06179 [Magnaporthe grisea 70-15]
  misc_feature (1)..(381): NCBI GI: 156045061 Blast Desc: SS1G_09719 [Sclerotinia sclerotiorum 1980] gi|154694114|gb|EDN93852.1| SS1G_09719 [Sclerotinia sclerotiorum 1980]
  misc_feature (1)..(379): NCBI GI: 116194578 Blast Desc: CHGG_03887 [Chaetomium globosum CBS 148.51] gi|88179800|gb|EAQ87268.1| CHGG_03887 [Chaetomium globosum CBS 148.51]
  misc_feature (3)..(379): NCBI GI: 154295649 Blast Desc: BC1G_13095 [Botryotinia fuckeliana B05.10] gi|150843975|gb|EDN19168.1| BC1G_13095 [Botryotinia fuckeliana B05.10]
  misc_feature (1)..(381): NCBI GI: 156053928 Blast Desc: SS1G_05812 [Sclerotinia sclerotiorum 1980] gi|154703592|gb|EDO03331.1| SS1G_05812 [Sclerotinia sclerotiorum 1980]
  misc_feature (1)..(300): NCBI GI: 154298384 Blast Desc: BC1G_11647 [Botryotinia fuckeliana B05.10] gi|150858100|gb|EDN33292.1| BC1G_11647 [Botryotinia fuckeliana B05.10]
  misc_feature (3)..(379): NCBI GI: 171683309 Blast Desc: protein product [Podospora anserina] gi|170941614|emb|CAP67268.1| protein product [Podospora anserina]
MTKTIVVLGGAYAGVQIAHRLLKHTRPHVKDLKVILISKNSHFYWNMASVRAIVPGVMKETEYSQPIAPGFSQYPAEAFEFVIGTAEAVDSENKTVKVLVTEDGSQQVVNYDQLVIATGTRGVGNTAVPWKNNGTYEEIISLITETQNKVKAAKHIVVAGAGATGVETAAELAFEYANPKDSANRKEIVLLSGDKEVMGGDSIASNVASELKKLHVVVRPSARVASTNELPDGKTEIVLESGEKIVTDLYLPTMGVVPNTEFLPSALLTDKKFANIDEFYRVKGAEDVWAAGDVVWKPRGSFVLTDKQAAGVAKNIDAVLKGKGPTPVKTIPIDVLMVTTGRSRGAGRMGVVKAFSMMVYYIKGKTLGTERLPSWVDGSRF

SEQ ID NO: 23921 - DNA, 1681 bp, Muscodor strobelii
  misc_feature: SGI EST ID NO. CUFF.56246.0
  misc_feature: Variant of the nucleotide sequence at SEQ ID NO 23919
cgaacttcctgtcaaaattaccttgtgagaggagcgttgcggtacaagcgttttacagtgacagggtcgaatacatcaccacttacacggcattacccgctaaaacctttctcacaccagccggacttcaccaatttgctccctcacggcaaccaaaaattcaccacaacgacagaaattagtaaaaatgacaaagacgatcgtggtactaggcggcgcatacgccggtgtgcaaatcgcacacaggctcctcaaacatacgaggcctcatgttaaagacttgaaggtcattctcatctccaagaattcccacttctactggaacatggcatcagtccgtgcaattgtcccaggtgtcatgaaagagaccgagtacagccaacccattgcccctggtttctcccagtatccggcggaagcttttgaattcgttattggtactgccgaggccgtcgactcagaaaataaaactgtaaaggtactagtaactgaagatggttcccagcaggtcgtcaactacgatcagctagtcatcgcaacgggcacacgcggtgttggtaatacggcagtgccgtggaagaacaacggcacatatgaagagataatttctcttatcaccgagactcaaaacaaggtcaaggccgccaagcacattgtggtcgctggtgctggcgccacaggtgttgagacagcggctgagttggcttttgaatacgcaaatcctaaagactcagctaacaggaaggaaattgtcctcttgtcaggtgataaagaggtgatgggtggcgacagcatcgcgagcaacgtggcatcagagttgaagaaactgcacgtagttgtccgcccttcagcacgcgtggcatctaccaacgagctccccgacggcaagactgaaattgttcttgagagtggagagaagatagtcacagacttgtatctacccacgatgggcgtggtgccgaacaccgagtttctcccgtctgcactcctgacagataagaaattcgccaacatcgatgagttttaccgcgtcaagggagccgaagatgtttgggctgctggcgacgtggtctggaaaccacgcggtagttttgtcctcactgacaagcaagctgccggcgttgcgaagaatatcgatgccgtactcaagggcaaaggccccacgcccgtcaagactatcccgattgatgttcttatggtcaccactggtcgaagccgcggtgctggacgcatgggcgtggtgaaggctttcagcatgatggtttactatatcaaggggaagaccctcggtactgaacggttaccaagctgggttgatggttctcgattctaaaccatatatgctatatgagtttagcaggtcattcattggaagacatgagccgtaactccacattgggtacggttgtgcctgcaaagacatgataagggaaaagcatggagagcggcgggcagttagatgccgatgctgcaattggcgatcctctcgtttggagtttacagaagcggtacaaaaggggcgagatggttgataataccttgagatacccagccccacaagacaatttatttgttaaatttcttcacgaattctctacacatttaattacttatatcttcacttctttgtcactctgaaacttttaaaatgtgatgatcgtaggtattattacgattcagc

SEQ ID NO: 23922 - DNA, 1206 bp, Muscodor strobelii
  misc_feature: SGI cDNA ID NO. 568148
  misc_feature: Encodes the peptide sequence at SEQ ID NO 23923
atggccccgcgcatcgagccccaggagatcgagacatattggaacatcttcaccactaggaccaatggcggcaagttcttgaccggcgagcaagccgctccgctgctgaagaacagtggcttgcgcgatgaccagctcgagcgcgtctgggacgtcgcggacgtcgacaacgatggcaacctcgacttcgaggagttctgcgtcgccatgcgcatcatcttcgacatagtcaacggcgaatacaacgaagtccccacgacgctgcccgactggctggtccccgaatccaaatcacacctcgtccaagccaacagagccctcaccggcaagcaagtccagtttgagcaggtagacgacgactccgacactccgggcttaaaagatggcttcgagtggtacatgaacccacaagacaaggccaagtacgagtcgatatatcaggaaaacagagacatgcgcggagaagtgtcattcaacgccctcgaagatttatacgaatccctcgacgtaccagacaccgacatccgctcagcatggaacctcatcaacccatccgccggctcctccataaacaaagacgcctgcctcgcattcctccacatcctcaacaaccgacacgaaggcttccggattccccgcaccgtcccagcctccctacgctcctccttcgaacgcaatcagatcgactatcaagtagacagccagcggaacgctagcgctgcgtcgcgatgggccgccaaggcagacgacggaccaccgagcacaggccgcaaggccaagttcggcgaccagtacctgacacggctgggtcgcagcggcttcaagacgtcaggcaccgatttcagtacggccaagacggacgccgaatgggaagaggtacggctaaagaagcagcttgctgagcttgacgccaagatggagaaggtggaggaaatagccaaccggcgggcgggcggcaagcgtgagagcaagccagccctcgtaaaacgggagctcgagcagcttttagattacaagaggaaggagctgcgagatttggaggaaggtggtgggaaagcgaagaccgggggcaatctgcggggggttgcagatgatcttcagacggtcaaggaacagattgatgggctcgaggcacatttgagctcccgtatgcagatccttgagcaactgaggagagagatagaagacgagaaagcaaatagataa

SEQ ID NO: 23923 - protein, 401 aa, Muscodor strobelii
  misc_feature: SGI Peptide ID NO. 568148
  misc_feature (45)..(73): Pfam Id: PF00036 Pfam Desc: EF hand
  misc_feature (1)..(401): NCBI GI: 39975787 Blast Desc: conserved [Magnaporthe grisea 70-15] gi|74681601|sp|Q5EN00.1|END3_MAGGR RecName: Full=Actin cytoskeleton-regulatory complex protein END3; AltName: protein 3
  misc_feature (1)..(401): NCBI GI: 116194580 Blast Desc: conserved [Chaetomium globosum CBS 148.51] gi|121927659|sp|Q2H2V8.1|END3_CHAGB RecName: Full=Actin cytoskeleton-regulatory complex protein END3; AltName: protein 3
  misc_feature (1)..(401): NCBI GI: 164425144 Blast Desc: Eps15-like protein pan1p [Neurospora crassa OR74A] gi|205716836|sp|Q7S9V9.2|END3_NEUCR RecName: Full=Actin cytoskeleton-regulatory complex protein end-3; AltName: protein 3
  misc_feature (1)..(398): NCBI GI: 46136411 Blast Desc: FG09721.1 [Gibberella zeae PH-1]
  misc_feature (1)..(387): NCBI GI: 256727501 Blast Desc: [Nectria haematococca mpVI 77-13-4]
  misc_feature (1)..(401): NCBI GI: 171683311 Blast Desc: protein product [Podospora anserina] gi|205716455|sp|B2AS96.1|END3_PODAN RecName: Full=Actin cytoskeleton-regulatory complex protein END3; AltName: protein 3
  misc_feature (4)..(401): NCBI GI: 154296979 Blast Desc: endocytosis and cytoskeletal organization protein [Botryotinia fuckeliana B05.10] gi|205716451|sp|A6SIJ6.1|END3_BOTFB RecName: Full=Actin complex 3
  misc_feature (4)..(401): NCBI GI: 156062398 Blast Desc: SS1G_01315 [Sclerotinia sclerotiorum 1980] gi|205716456|sp|A7E7N7.1|END3_SCLS1 RecName: Full=Actin cytoskeleton-regulatory complex protein end3; AltName: protein 3
  misc_feature (1)..(326): NCBI GI: 261352347 Blast Desc: END3 [Verticillium albo-atrum VaMs.102]
  misc_feature (1)..(401): NCBI GI: 212532135 Blast Desc: cytoskeletal adaptor protein SagA [Penicillium marneffei ATCC 18224] gi|210071588|gb|EEA25677.1| cytoskeletal adaptor protein SagA [Penicillium marneffei ATCC 18224]
MAPRIEPQEIETYWNIFTTRTNGGKFLTGEQAAPLLKNSGLRDDQLERVWDVADVDNDGNLDFEEFCVAMRIIFDIVNGEYNEVPTTLPDWLVPESKSHLVQANRALTGKQVQFEQVDDDSDTPGLKDGFEWYMNPQDKAKYESIYQENRDMRGEVSFNALEDLYESLDVPDTDIRSAWNLINPSAGSSINKDACLAFLHILNNRHEGFRIPRTVPASLRSSFERNQIDYQVDSQRNASAASRWAAKADDGPPSTGRKAKFGDQYLTRLGRSGFKTSGTDFSTAKTDAEWEEVRLKKQLAELDAKMEKVEEIANRRAGGKRESKPALVKRELEQLLDYKRKELRDLEEGGGKAKTGGNLRGVADDLQTVKEQIDGLEAHLSSRMQILEQLRREIEDEKANR

SEQ ID NO: 23924 - DNA, 1634 bp, Muscodor strobelii
  misc_feature: SGI EST ID NO. CUFF.56295.0
  misc_feature: Variant of the nucleotide sequence at SEQ ID NO 23922
tacgtatgggtttggggaatcactcgctcactgactcttgctggctttatgccaaatgaatattgtttgttgtcattaactacccaagtctcgatacttctcgaattccaatcttgcaatttctcaatgatattagaagccacccgataggacagccatcgcaaaaaacgacggtctgcgcccgccgactcagccgaagatggccccgcgcatcgagccccaggagatcgagacatattggaacatcttcaccactaggaccaatggcggcaagttcttgaccggcgagcaagccgctccgctgctgaagaacagtggcttgcgcgatgaccagctcgagcgcgtctgggacgtcgcggacgtcgacaacgatggcaacctcgacttcgaggagttctgcgtcgccatgcgcatcatcttcgacatagtcaacggcgaatacaacgaagtccccacgacgctgcccgactggctggtccccgaatccaaatcacacctcgtccaagccaacagagccctcaccggcaagcaagtccagtttgagcaggtagacgacgactccgacactccgggcttaaaagatggcttcgagtggtacatgaacccacaagacaaggccaagtacgagtcgatatatcaggaaaacagagacatgcgcggagaagtgtcattcaacgccctcgaagatttatacgaatccctcgacgtaccagacaccgacatccgctcagcatggaacctcatcaacccatccgccggctcctccataaacaaagacgcctgcctcgcattcctccacatcctcaacaaccgacacgaaggcttccggattccccgcaccgtcccagcctccctacgctcctccttcgaacgcaatcagatcgactatcaagtagacagccagcggaacgctagcgctgcgtcgcgatgggccgccaaggcagacgacggaccaccgagcacaggccgcaaggccaagttcggcgaccagtacctgacacggctgggtcgcagcggcttcaagacgtcaggcaccgatttcagtacggccaagacggacgccgaatgggaagaggtacggctaaagaagcagcttgctgagcttgacgccaagatggagaaggtggaggaaatagccaaccggcgggcgggcggcaagcgtgagagcaagccagccctcgtaaaacgggagctcgagcagcttttagattacaagaggaaggagctgcgagatttggaggaaggtggtgggaaagcgaagaccgggggcaatctgcggggggttgcagatgatcttcagacggtcaaggaacagattgatgggctcgaggcacatttgagctcccgtatgcagatccttgagcaactgaggagagagatagaagacgagaaagcaaatagataagttatgagctggtggaggtggaagttgtgaggaagaggcggttgatggtaatcgggtacgatacgccagtatgaaatcaataataacccatactcaacaacatcgagcattaggtataagtaacacgccagccagcgtgcgtgtttctctcgctacttttatgtactacgtatatgcaaacgaaacaagttgctttcgatacgaatcccaatagcattttcattggccg

SEQ ID NO: 23925 - DNA, 1182 bp, Muscodor strobelii
  misc_feature: SGI cDNA ID NO. 568149
  misc_feature: Elevated expression when VOC is produced
  misc_feature: Encodes the peptide sequence at SEQ ID NO 23926
atgactccaactcgcgtcgccattgttgggctaaagccccgacctgctgaggtgcaccgatgggcaaacgactccaatgacggaaaggtcgatatttcaggccaactcggattttgggccgttaaatctcatctgccagcattccgctcgatgcctgacaagtacgagatcgtagctatctgcaattcaactatcgattcagcagctttggcgattgaacaatatgacttgaagtccgcaaagccttacggagaccccaaagatctcgcgaacgatcccaatgtggatcttgtagtcatctctgttaatgtacggaggcactttgagctggcgaagccggcactcgagaagaaaaaggatgtttttgtggaatggccgcttggagcaagtgttgcacaggccgaggagctcactcagctggcagcgaaaatgggtgtacgaacctccgttggcgtgcaggctcgagcagatcctctggtcgtcaaactcaaagagatcgtggaatcaggtcaactcgggaaaatcctgaactcttcggtcttagtcaattctgccctcctgcctttatccggttggattgcgggaggagaatactatctgaaccatgattcaggtggcaatgaattcctgatttattttggccacttccttgacagcttcattcacgtcttgggtgattttgccgaagtccaagccattatgaagtcagtggccaagagtgtacccgtgtttaacgagaagaaagagctcgtgaatcccggctaccctaagacgagcgctgaacattttgtcatccatggcgtcctggagagcgatgccttggcttcgttctcagtcagaaagggaccaaatgaaattgatggcgccagttttcgctgggtgatctctgggacaaagggagaagccgaggctattatcccacgtggccaatttcaaagtggcgagcccaatcgtacactcagagtcagaattggtgacgaagacgcaaagaatgtggatttcatcatccccgacgatgagttcgagggcaactttgcgtaccactggagtgccaatccggctcggcagcaccgtgccttcgctgctggaaacaaaaacgagtttgccaatttcgagtcggctttgcgaactcacaaactcttaggtaggattgtgaaggccgcgggatggccctcgatttaa

SEQ ID NO: 23926 - protein, 393 aa, Muscodor strobelii
  misc_feature: SGI Peptide ID NO. 568149
  misc_feature (36)..(152): Pfam Id: PF01408 Pfam Desc: Oxidoreductase family, NAD-binding Rossmann fold
  misc_feature (44)..(152): Pfam Id: PF01408 Pfam Desc: Oxidoreductase family, NAD-binding Rossmann fold
  misc_feature (1)..(389): NCBI GI: 242802212 Blast Desc: oxidoreductase, [Talaromyces stipitatus ATCC 10500] gi|218717273|gb|EED16694.1| oxidoreductase, [Talaromyces stipitatus ATCC 10500]
  misc_feature (1)..(387): NCBI GI: 212540350 Blast Desc: conserved [Penicillium marneffei ATCC 18224] gi|210067629|gb|EEA21721.1| conserved [Penicillium marneffei ATCC 18224]
  misc_feature (1)..(390): NCBI GI: 242800748 Blast Desc: oxidoreductase, [Talaromyces stipitatus ATCC 10500] gi|218716996|gb|EED16417.1| oxidoreductase, [Talaromyces stipitatus ATCC 10500]
  misc_feature (1)..(390): NCBI GI: 212540764 Blast Desc: oxidoreductase, [Penicillium marneffei ATCC 18224] gi|210067836|gb|EEA21928.1| oxidoreductase, [Penicillium marneffei ATCC 18224]
  misc_feature (1)..(384): NCBI GI: 119485256 Blast Desc: NAD-binding Rossmann fold oxidoreductase family protein [Neosartorya fischeri NRRL 181] gi|119410316|gb|EAW20263.1| NAD-binding Rossmann fold family NRRL
  misc_feature (1)..(381): NCBI GI: 119489970 Blast Desc: oxidoreductase [Neosartorya fischeri NRRL 181] gi|119411101|gb|EAW21044.1| oxidoreductase [Neosartorya fischeri NRRL 181]
  misc_feature (1)..(386): NCBI GI: 169777615 Blast Desc: [Aspergillus oryzae RIB40] gi|83772010|dbj|BAE62140.1| protein product [Aspergillus oryzae]
  misc_feature (1)..(386): NCBI GI: 238494794 Blast Desc: oxidoreductase, [Aspergillus flavus NRRL3357] gi|220695283|gb|EED51626.1| oxidoreductase, [Aspergillus flavus NRRL3357]
  misc_feature (37)..(386): NCBI GI: 149210377 Blast Desc: MGCH7_ch7g666 [Magnaporthe grisea 70-15] gi|86196621|gb|EAQ71259.1| MGCH7_ch7g666 [Magnaporthe grisea 70-15]
  misc_feature (37)..(386): NCBI GI: 145609886 Blast Desc: MGG_02902 [Magnaporthe grisea 70-15] gi|145017273|gb|EDK01636.1| MGG_02902 [Magnaporthe grisea 70-15]
  misc_feature: Useful for introducing or modulating the production of volatile compounds
MTPTRVAIVGLKPRPAEVHRWANDSNDGKVDISGQLGFWAVKSHLPAFRSMPDKYEIVAICNSTIDSAALAIEQYDLKSAKPYGDPKDLANDPNVDLVVISVNVRRHFELAKPALEKKKDVFVEWPLGASVAQAEELTQLAAKMGVRTSVGVQARADPLVVKLKEIVESGQLGKILNSSVLVNSALLPLSGWIAGGEYYLNHDSGGNEFLIYFGHFLDSFIHVLGDFAEVQAIMKSVAKSVPVFNEKKELVNPGYPKTSAEHFVIHGVLESDALASFSVRKGPNEIDGASFRWVISGTKGEAEAIIPRGQFQSGEPNRTLRVRIGDEDAKNVDFIIPDDEFEGNFAYHWSANPARQHRAFAAGNKNEFANFESALRTHKLLGRIVKAAGWPSI

SEQ ID NO: 23927 - DNA, 2048 bp, Muscodor strobelii
  misc_feature: SGI EST ID NO. CUFF.56253.0
  misc_feature: Variant of the nucleotide sequence at SEQ ID NO 23925
cggagttcaagtggatccaagaacaagacatgacacaatagacaggctcgtgcaccccctttagcagcctcgtcgaaatgcggtcaggacttagaccgtcacaatgtggctactgatctgtctctatcttgatatgaattcagccttctactgatggcttccggggtgtctgcatataagatattactaattgaacacaaactctccggacgaattagaggtcatgttgttcagtgaacatgatgaattgtcgagtacgatcccgagtaacggtgatatgattcagcacattgtagatgatcattcgtcaatggaactcaagtgggcaccagtaagcgaatggaagcattcgtacgtcgtgccaccacgaccaacatgcagttggctgaggaagcggcgaagagcaatgatagcatcgcgtcacagtccaacatcgacataaatggcgagcaattcccagaggactagataccttttggagggtacaatcaacgcaacctttacactatcttgttttacatcgcttccttataacttgttctatccaacaattcgcaatgactccaactcgcgtcgccattgttgggctaaagccccgacctgctgaggtgcaccgatgggcaaacgactccaatgacggaaaggtcgatatttcaggccaactcggattttgggccgttaaatctcatctgccagcattccgctcgatgcctgacaagtacgagatcgtagctatctgcaattcaactatcgattcagcagctttggcgattgaacaatatgacttgaagtccgcaaagccttacggagaccccaaagatctcgcgaacgatcccaatgtggatcttgtagtcatctctgttaatgtacggaggcactttgagctggcgaagccggcactcgagaagaaaaaggatgtttttgtggaatggccgcttggagcaagtgttgcacaggccgaggagctcactcagctggcagcgaaaatgggtgtacgaacctccgttggcgtgcaggctcgagcagatcctctggtcgtcaaactcaaagagatcgtggaatcaggtcaactcgggaaaatcctgaactcttcggtcttagtcaattctgccctcctgcctttatccggttggattgcgggaggagaatactatctgaaccatgattcaggtggcaatgaattcctgatttattttggccacttccttgacagcttcattcacgtcttgggtgattttgccgaagtccaagccattatgaagtcagtggccaagagtgtacccgtgtttaacgagaagaaagagctcgtgaatcccggctaccctaagacgagcgctgaacattttgtcatccatggcgtcctggagagcgatgccttggcttcgttctcagtcagaaagggaccaaatgaaattgatggcgccagttttcgctgggtgatctctgggacaaagggagaagccgaggctattatcccacgtggccaatttcaaagtggcgagcccaatcgtacactcagagtcagaattggtgacgaagacgcaaagaatgtggatttcatcatccccgacgatgagttcgagggcaactttgcgtaccactggagtgccaatccggctcggcagcaccgtgccttcgctgctggaaacaaaaacgagtttgccaatttcgagtcggctttgcgaactcacaaactcttaggtaggattgtgaaggccgcgggatggccctcgatttaaatatttcaagtagtaacagatcaaatttcgttcaagcaagttaaagctgtattgaaaacttgagatatgagtattcgtgatacctatgggaagatattggagtaggctttggatgctgtgttgggcaagcaatcccacccttgcataccgtagttacagacgctagctacccgagcaagaatcgtggggaagacagtgacaagaaacgaatttaacgagtaacaggaaatgcacatatcgtaggccatagtcacaggcgtatagtatttatatttcgatttcgcatcatctgttagaatcccgtcgcgc

SEQ ID NO: 23928 - DNA, 642 bp, Muscodor strobelii
  misc_feature: SGI cDNA ID NO. 568150
  misc_feature: Encodes the peptide sequence at SEQ ID NO 23929
atgatctggaagatgatatacgatgagcagacccgtctgaagaaggagtatcaaaatttcgatgatggcaaattacttgctgctgttcaagcaatgttgatataccttttgattcaagcccaggacccggacacgatagccgagaatgatgtagcctcattgatagtcacgacatcggatatgtctacaaaacttcattttgggacccaatctaacacttataagtcagatatctatcaactgccacaattaaagctggaagcttgggcattttacgagagcatacggaggaccgtcaatctattttacgtgattggagccgttcttgttgtccttgttggcaaccctgatctcccaggttgtgacagcatccagtcgacacctctcaactgtgtgagagatctctggaacccagatacctcggagagctgggcctctagactccacaaattcgtaagacaaagagcttctaggaaagttttgactcttcatgatcttttacagatcaaggatgagcaagctcagaaggaggataatacagatgcactagtccagaaagaccttgcgaactggtgtgagaacctggatgactttgggacgcttgtatggatggcatcttcacttaatagaaaagctaaatag

SEQ ID NO: 23929 - protein, 213 aa, Muscodor strobelii
  misc_feature: SGI Peptide ID NO. 568150
  misc_feature (1)..(205): NCBI GI: 212540766 Blast Desc: conserved [Penicillium marneffei ATCC 18224] gi|210067837|gb|EEA21929.1| conserved [Penicillium marneffei ATCC 18224]
  misc_feature (2)..(207): NCBI GI: 156061109 Blast Desc: [Sclerotinia sclerotiorum 1980] gi|154700101|gb|EDN99839.1| [Sclerotinia sclerotiorum 1980]
  misc_feature (1)..(204): NCBI GI: 242800744 Blast Desc: TSTA_015050 [Talaromyces stipitatus ATCC 10500] gi|218716995|gb|EED16416.1| TSTA_015050 [Talaromyces stipitatus ATCC 10500]
  misc_feature (10)..(209): NCBI GI: 242771303 Blast Desc: conserved [Talaromyces stipitatus ATCC 10500] gi|218721435|gb|EED20853.1| conserved [Talaromyces stipitatus ATCC 10500]
  misc_feature (2)..(209): NCBI GI: 242777077 Blast Desc: conserved [Talaromyces stipitatus ATCC 10500] gi|218722578|gb|EED21996.1| conserved [Talaromyces stipitatus ATCC 10500]
  misc_feature (1)..(207): NCBI GI: 242789241 Blast Desc: conserved [Talaromyces stipitatus ATCC 10500] gi|218717909|gb|EED17329.1| conserved [Talaromyces stipitatus ATCC 10500]
  misc_feature (1)..(205): NCBI GI: 212527562 Blast Desc: C6 finger domain protein, [Penicillium marneffei ATCC 18224] gi|210073336|gb|EEA27423.1| C6 finger domain protein, [Penicillium marneffei ATCC 18224]
  misc_feature (1)..(211): NCBI GI: 242783875 Blast Desc: conserved [Talaromyces stipitatus ATCC 10500] gi|218720421|gb|EED19840.1| conserved [Talaromyces stipitatus ATCC 10500]
  misc_feature (1)..(144): NCBI GI: 46115252 Blast Desc: FG03468.1 [Gibberella zeae PH-1]
  misc_feature (2)..(208): NCBI GI: 212545625 Blast Desc: conserved [Penicillium marneffei ATCC 18224] gi|210064486|gb|EEA18581.1| conserved [Penicillium marneffei ATCC 18224]
MIWKMIYDEQTRLKKEYQNFDDGKLLAAVQAMLIYLLIQAQDPDTIAENDVASLIVTTSDMSTKLHFGTQSNTYKSDIYQLPQLKLEAWAFYESIRRTVNLFYVIGAVLVVLVGNPDLPGCDSIQSTPLNCVRDLWNPDTSESWASRLHKFVRQRASRKVLTLHDLLQIKDEQAQKEDNTDALVQKDLANWCENLDDFGTLVWMASSLNRKAK

SEQ ID NO: 23930 - DNA, 527 bp, Muscodor strobelii
  misc_feature: SGI EST ID NO. CUFF.56258.0
  misc_feature: Variant of the nucleotide sequence at SEQ ID NO 23928
cagatatctatcaactgccacaattaaagctggaagcttgggcattttacgagagcatacggaggaccgtcaatctattttacgtgattggagccgttcttgttgtccttgttggcaaccctgatctcccaggttgtgacagcatccagtcgacacctctcaactgtgtgagagatctctggaacccagatacctcggagagctgggcctctagactccacaaattcgtaagacaaagagcttctaggaaagttttgactcttcatgatcttttacagatcaaggatgagcaagctcagaaggaggataatacagatgcactagtccagaaagaccttgcgaactggtgtgagaacctggatgactttgggacgcttgtatggatggcatcttcacttaatagaaaagctaaataggcaactagattggacaacccgtgtattgtgctctctgcacgtcacgggctgggcgcagtttcctgatcgtcacatacaaagccccaataccttaggcacagggaaaccggc

SEQ ID NO: 23931 - DNA, 3249 bp, Muscodor strobelii
  misc_feature: SGI cDNA ID NO. 568151
  misc_feature: Encodes the peptide sequence at SEQ ID NO 23932
atggcttcacagtctgagaaagccctcgttgccaggctgcctggcagcatagaacagccgtatattgagggacaagaactcagttggtcaaaacttgatttcactggccaaaccatcctcgtcaaagtatttacagactattatggaagtttctcgatggcatgcataatgttggagcttggtcttttcgacgccattgcattccgcgacagataccacgcagaagtaattgagtatgagacgcagtacaggaccgctttctggttgcaagatgcacagttgagcaattcagaggaagaagtgtctatgttgggcctcagacacatccaccaacatgacgtggaacccgcgtgtctgttcctgaagtcttttaagaagtttcaaaagcacgcccaaagcgtgcaagcttacggaggaacaacattctacaagtggccgctttttatcgacatgtcagacgtcagatcgttagatgtcaaccggatgctccccttcggtcctcaactcggagaaggcaatgaagaaaatgatgactattggatgagattcgaaggtcctatgacgactgatgagcgtacactagtgaatctagtatgtatgcttgaggtcgaaaagaaagacgagacagaagaggaggccgagccggaagcgaaagtggagagaggaaggggatataaaccagttgtgaaattgacgtcttttgtgctgccacctggttgcgtttgctacggaccccatggtacaaggacctctctagccgctgggagatatgaagtgtgctggccagcaaaggacatctctcgcggagtgcacgacggacccttcagcaacgaagacggtccgcgagggcctcccatcacgacaactgatcaaaacatcgtacctgacgaatatcctgaagctttcttccagtttcgattgcctgagaaatacttcatcagggatctgaatgagaagttaatgacattagacccggaagatgtcgacaacgagcaagaaacgaactacggaagactgcgaggacagggtggcatatacacaatcgtatcttcacaggatgacgatccggatgacatggatctgggacagctacctgagctgccttcgttgccagagaatgttttcttccgatggaacattcctaagagtcatgttgcagcagacatcgtcatgattcgtaacggcaacttggtcacccctccacttgaatccggagttcatgagctcaagatcaatggagggctcattgatctgtacaatgaagctggtcgctataagttgttagaggcgccaatcatccgcgaagtggtgtacaagcctgcagacttgtactctcaggcctttgacaggcatatgtccaccgtccctcctagtcatctacagacagcacttgaacaacacttgctgaagacgcatgaagctccagtcacgaagcttggctatccaggcgcagactctgtcaagtcgaagagctacataatcaaagaggaagaagatgatagcgataattctgagatctacagtgaaagcagtgaacactatgaggtctccgaagacgacgaggacagtgaagatgaagagatggttggccatgatgatggatcaagagaacttcatacatataagtacgacgagaaagatcgcttgatatatcgtcgtcgctgtcgctatcgccctcgctatcgctatcgcctttacgaagtcgaagaagacgacaatgccagctcgagcgaagttgatggcgaaataataatcgatgatgatggcgacataatcgatgatgatgaagctcaagttgagcatgaaggacattccgctcaatcagcagcaacccatgaggctatgagcatgtttctggctcagagagagttgctctacagcgatgaagaccctctggtttctgggcatatcaagcgggctttcacaactgtagctcatcataaagactggctcgatcacgaggaagcaggagaaaagaaaacggacgccaggctggctagaagagcacggaacagtatatcacgagaaacgatcatgcacacacgggatgcgcatcggagaggcctggaagaatatcaagctcaggaggaagccagaatagagtctgacgtgaagaaaaatacctcagtagccgaaggtgctagggctcgacgaacgagtcatatgagagcagccagtgcaattgcacagtcttctcctgcacctttcggtttcgagtctcgcgatgtcgatgttgggcatgactccagtctacagcatcctgacgaacagcagcaactcgagaagaatacagtgaggatcttgttcaagagggaacatattggagatagtgatgatgagtctattcctgagacacagcccactacccaacaagaacttttcaacaacggacgagatagaactgcatctgtgccacaggtggatactgagctccaacccacccaacagcgacgaaacaggaatgcatctggaacacagaagcgtcgacgcaggaactatgaggcagaagcagatgaagagtttcttccagtgcagccaagaaaaagtggacggcgtcgaccgcgtccatctcgtgcacgaaatgtggtgaatgtgccgacatctacgccgaactcagcacagcacaatggcgagtcccgaccgaaccatcaaaccatgacacatgcgcaagctgtccctgtctccggccctgcacagcctcaacaatcatttgctgtagttacacctgacacaagccgtcgtgcagatctactctggtaccaggcagtcgaagccttgcgccagcaaaaggatcgctacccgaatccgaatatgcagtcgcccctttccagtcttgtccttcagcctcctcctccccgctcagaagccagtcatcctgacgttgcggaagaatacatgatgacaggcgttggagctccagtttctcttgaaatggatactacaagtgtgttcgatcatctagtaacaccctccgaccagaccgcaggacctcagcaaggcttaaatagcagcaaccaaagagcgacaattctcgagtctggcccccctgttactccgccactcgacaaacctgttacgcccatccccacgcccactggacttaccgctgacaagcgacagcaagagattgatgaagaagaagaagaaatcgtccgacagttgaaaaattggtcccacaaagtggtcgtggaaagcaatgctgtggaaaaggacgacaaaaaggaagaaatacaatcatcagaagaataa

SEQ ID NO: 23932 - protein, 1082 aa, Muscodor strobelii
  misc_feature: SGI Peptide ID NO. 568151
MASQSEKALVARLPGSIEQPYIEGQELSWSKLDFTGQTILVKVFTDYYGSFSMACIMLELGLFDAIAFRDRYHAEVIEYETQYRTAFWLQDAQLSNSEEEVSMLGLRHIHQHDVEPACLFLKSFKKFQKHAQSVQAYGGTTFYKWPLFIDMSDVRSLDVNRMLPFGPQLGEGNEENDDYWMRFEGPMTTDERTLVNLVCMLEVEKKDETEEEAEPEAKVERGRGYKPVVKLTSFVLPPGCVCYGPHGTRTSLAAGRYEVCWPAKDISRGVHDGPFSNEDGPRGPPITTTDQNIVPDEYPEAFFQFRLPEKYFIRDLNEKLMTLDPEDVDNEQETNYGRLRGQGGIYTIVSSQDDDPDDMDLGQLPELPSLPENVFFRWNIPKSHVAADIVMIRNGNLVTPPLESGVHELKINGGLIDLYNEAGRYKLLEAPIIREVVYKPADLYSQAFDRHMSTVPPSHLQTALEQHLLKTHEAPVTKLGYPGADSVKSKSYIIKEEEDDSDNSEIYSESSEHYEVSEDDEDSEDEEMVGHDDGSRELHTYKYDEKDRLIYRRRCRYRPRYRYRLYEVEEDDNASSSEVDGEIIIDDDGDIIDDDEAQVEHEGHSAQSAATHEAMSMFLAQRELLYSDEDPLVSGHIKRAFTTVAHHKDWLDHEEAGEKKTDARLARRARNSISRETIMHTRDAHRRGLEEYQAQEEARIESDVKKNTSVAEGARARRTSHMRAASAIAQSSPAPFGFESRDVDVGHDSSLQHPDEQQQLEKNTVRILFKREHIGDSDDESIPETQPTTQQELFNNGRDRTASVPQVDTELQPTQQRRNRNASGTQKRRRRNYEAEADEEFLPVQPRKSGRRRPRPSRARNVVNVPTSTPNSAQHNGESRPNHQTMTHAQAVPVSGPAQPQQSFAVVTPDTSRRADLLWYQAVEALRQQKDRYPNPNMQSPLSSLVLQPPPPRSEASHPDVAEEYMMTGVGAPVSLEMDTTSVFDHLVTPSDQTAGPQQGLNSSNQRATILESGPPVTPPLDKPVTPIPTPTGLTADKRQQEIDEEEEEIVRQLKNWSHKVVVESNAVEKDDKKEEIQSSEE

SEQ ID NO: 23933 - DNA, 690 bp, Muscodor strobelii
  misc_feature: SGI cDNA ID NO. 568152
  misc_feature: Encodes the peptide sequence at SEQ ID NO 23934
atgcccagcacatcacccgtcgtcctcatcctcggagcagggccaaacattggccaagctgtcgctcggaaatttgcatcgaaaggctacaaagtcgggctcgccgcgcgctcagtgaacgaggcagaaagcacggatagtcagctgaacatcccgagtgacttcaccaagtctgacgatgtcatcaatgcattcaacaaggtcactaaagcctttggcgtcccaagtgtagtcgtctataatgttagcgcatcgacattcacccctaaagaggacccattcgcccttccgctagccgcattgaatcgagatcttgcaataaatgttacgagtgcttttgtcgccgcgcaacaggctactttgggcttcgcacaacttcctgcatctgcttcgaagacattcatctatacgggaaatatcttgaacacgaccatcctcccagcatttatcgaccaaggcatgggaaagtctgccggtgcacacatggtttgggctgcttcagctgcgtataaagaccgaggattcaagttttattatgccgatgaacgtaaagcggatgggacggccatttacaaggtcgacggagaggcgcatgctgatacgtattggaagctggcagaagagaaggcacatgggccgtggctatatacattcgtgaaaggagcaggttatacaaaatttgataattag

SEQ ID NO: 23934 - protein, 229 aa, Muscodor strobelii
  misc_feature: SGI Peptide ID NO. 568152
  misc_feature (1)..(228): NCBI GI: 256720872 Blast Desc: NECHADRAFT_50337 [Nectria haematococca mpVI 77-13-4]
  misc_feature (1)..(227): NCBI GI: 116214433 Blast Desc: CHGG_11057 [Chaetomium globosum CBS 148.51] gi|88175412|gb|EAQ82881.1| CHGG_11057 [Chaetomium globosum CBS 148.51]
  misc_feature (1)..(228): NCBI GI: 46126551 Blast Desc: FG07653.1 [Gibberella zeae PH-1]
  misc_feature (1)..(227): NCBI GI: 242797822 Blast Desc: short-chain dehydrogenase, [Talaromyces stipitatus ATCC 10500] gi|218716386|gb|EED15807.1| short-chain dehydrogenase, [Talaromyces stipitatus ATCC 10500]
  misc_feature (1)..(227): NCBI GI: 256723611 Blast Desc: NECHADRAFT_52180 [Nectria haematococca mpVI 77-13-4]
  misc_feature (59)..(220): NCBI GI: 46102612 Blast Desc: FG00010.1 [Gibberella zeae PH-1]
  misc_feature (5)..(227): NCBI GI: 156059224 Blast Desc: SS1G_03624 [Sclerotinia sclerotiorum 1980] gi|154701411|gb|EDO01150.1| SS1G_03624 [Sclerotinia sclerotiorum 1980]
  misc_feature (5)..(227): NCBI GI: 46111007 Blast Desc: FG02385.1 [Gibberella zeae PH-1]
  misc_feature (4)..(227): NCBI GI: 212529432 Blast Desc: short-chain dehydrogenases/reductase, [Penicillium marneffei ATCC 18224] gi|210074271|gb|EEA28358.1| short-chain dehydrogenases/reductase, [Penicillium marneffei ATCC 18224]
  misc_feature (5)..(228): NCBI GI: 154317362 Blast Desc: BC1G_03583 [Botryotinia fuckeliana B05.10] gi|150845000|gb|EDN20193.1| BC1G_03583 [Botryotinia fuckeliana B05.10]
MPSTSPVVLILGAGPNIGQAVARKFASKGYKVGLAARSVNEAESTDSQLNIPSDFTKSDDVINAFNKVTKAFGVPSVVVYNVSASTFTPKEDPFALPLAALNRDLAINVTSAFVAAQQATLGFAQLPASASKTFIYTGNILNTTILPAFIDQGMGKSAGAHMVWAASAAYKDRGFKFYYADERKADGTAIYKVDGEAHADTYWKLAEEKAHGPWLYTFVKGAGYTKFDN

SEQ ID NO: 23935 - DNA, 424 bp, Muscodor strobelii
  misc_feature: SGI EST ID NO. CUFF.56280.0
  misc_feature: Variant of the nucleotide sequence at SEQ ID NO 23933
cggatagtcagctgaacatcccgagtgacttcaccaagtctgacgatgtcatcaatgcattcaacaaggtcactaaagcctttggcgtcccaagtgtagtcgtctataatgttagcgcatcgacattcacccctaaagaggacccattcgcccttccgctagccgcattgaatcgagatcttgcaataaatgttacgagtgcttttgtcgccgcgcaacaggctactttgggcttcgcacaacttcctgcatctgcttcgaagacattcatctatacgggaaatatcttgaacacgaccatcctcccagcatttatcgaccaaggcatgggaaagtctgccggtgcacacatggtttgggctgcttcagctgcgtataaagaccgaggattcaagttttattatgccgatgaacgtaaagcgga

SEQ ID NO: 23936 - DNA, 810 bp, Muscodor strobelii
  misc_feature: SGI cDNA ID NO. 568153
  misc_feature: Encodes the peptide sequence at SEQ ID NO 23937
atggtagccgacacactttcgcttgcaggaaaaactgcattcgtgacaggctctggtagagagagtggtattggtgcggcaattgctagagcattggcgcgcaatggtgcacgtgtagcgattcattacgtgtcagaagattccaaggcgcgggcagagaaagtggccgctgacatcagtaatgagcttggcgcagaaatcaccgtcgtaagagggagcataggagactatgccactgcaatggatatggttcaacaaattctgaaagcattcaacgtcgaccatatcgacatcctcgtcaataatgcagcgacatcatgtaatacttctctgttagaagttcagcaagaacaacttgaatatgaatttggtataaacgtgtttggcgtgatttacctgatacaagccgtcgtcgacgtaggtcggatgcccaaaggcggacgcatcgtcaatattgggactgtttcctctaagctgttgatcccgccacctgtatatgctgcatcaaaagccgcaactgatgccttgacaacgctctgggctggtgagcttggcaagacacatggaattacggtcaatacactggcaccagggcccgttccgacagacatgtcggaaacgtatctcaagatgtctgacggatctcctagtgagattgctcttgcaatgtatgaacaggcgcgagctgcgaatcggctcggttcagtcgaagatctagctgatgccacggttctgctagtttcggaaaagagccggtggatcactgcgcagtatatttcagtcagcggtggagttaccggtactatgtga

SEQ ID NO: 23937 - protein, 269 aa, Muscodor strobelii
  misc_feature: SGI Peptide ID NO. 568153
  misc_feature (11)..(185): Pfam Id: PF00106 Pfam Desc: short chain dehydrogenase
  misc_feature (1)..(269): NCBI GI: 242797971 Blast Desc: short-chain dehydrogenase, [Talaromyces stipitatus ATCC 10500] gi|218716417|gb|EED15838.1| short-chain dehydrogenase, [Talaromyces stipitatus ATCC 10500]
  misc_feature (1)..(266): NCBI GI: 256721788 Blast Desc: NECHADRAFT_53235 [Nectria haematococca mpVI 77-13-4]
  misc_feature (1)..(267): NCBI GI: 46126481 Blast Desc: FG07618.1 [Gibberella zeae PH-1]
  misc_feature (4)..(266): NCBI GI: 46139135 Blast Desc: FG11082.1 [Gibberella zeae PH-1]
  misc_feature (1)..(266): NCBI GI: 242816001 Blast Desc: short-chain dehydrogenase, [Talaromyces stipitatus ATCC 10500] gi|218715021|gb|EED14444.1| short-chain dehydrogenase, [Talaromyces stipitatus ATCC 10500]
  misc_feature (4)..(267): NCBI GI: 212539528 Blast Desc: short chain type dehydrogenase, [Penicillium marneffei ATCC 18224] gi|210067218|gb|EEA21310.1| short chain type dehydrogenase, [Penicillium marneffei ATCC 18224]
  misc_feature (5)..(265): NCBI GI: 145236743 Blast Desc: An06g01980 [Aspergillus niger] gi|134075480|emb|CAK48041.1| protein product [Aspergillus niger]
  misc_feature (1)..(266): NCBI GI: 116195434 Blast Desc: CHGG_04315 [Chaetomium globosum CBS 148.51] gi|88180228|gb|EAQ87696.1| CHGG_04315 [Chaetomium globosum CBS 148.51]
  misc_feature (4)..(267): NCBI GI: 242804291 Blast Desc: short-chain dehydrogenase, [Talaromyces stipitatus ATCC 10500] gi|218717690|gb|EED17111.1| short-chain dehydrogenase, [Talaromyces stipitatus ATCC 10500]
  misc_feature (1)..(266): NCBI GI: 242773443 Blast Desc: short chain type dehydrogenase, [Talaromyces stipitatus ATCC 10500] gi|218721860|gb|EED21278.1| short chain type dehydrogenase, [Talaromyces stipitatus ATCC 10500]
  misc_feature (8)..(265): SWISSPROT Homolog: EC 1.1.1.100 3-oxoacyl-[acyl-carrier-protein] reductase
MVADTLSLAGKTAFVTGSGRESGIGAAIARALARNGARVAIHYVSEDSKARAEKVAADISNELGAEITVVRGSIGDYATAMDMVQQILKAFNVDHIDILVNNAATSCNTSLLEVQQEQLEYEFGINVFGVIYLIQAVVDVGRMPKGGRIVNIGTVSSKLLIPPPVYAASKAATDALTTLWAGELGKTHGITVNTLAPGPVPTDMSETYLKMSDGSPSEIALAMYEQARAANRLGSVEDLADATVLLVSEKSRWITAQYISVSGGVTGTM

SEQ ID NO: 23938 - DNA, 969 bp, Muscodor strobelii
  misc_feature: SGI cDNA ID NO. 568154
  misc_feature: Elevated expression when VOC is produced
  misc_feature: Encodes the peptide sequence at SEQ ID NO 23939
atggaggccctcgccctgggcagtttctgccgcattcctagtgagatcgttcttcagattgccgaccacatggaccaacctacacttcagagtttcatgaaggcaaataaatggttcgaccagctctacagaagctatgaggcctctatttgcatggcacgaattgcgatgctccctgcgccacccccaactgcgaacattctcacctcggccacaacagaacgtcgacgtttgtgcggccagaacacgttccagcaggttgaagagttagagcgccgcgcagaacggatcaatcgccttttcgaggaagctcctaagtacttccgcatagaagcgcccggctggcttcctaccttgtcagatgagcagcacgcacgattcacagattcactgaagcgagctctctggcagtgcgatatgatcgcagacgtggcagcaaacgagccctgcaagccgattccccctgaggcctatgcggatatcctctccggagtttactctaagagcactcttacgtggggacaatgcgcacgagacccttttgccaatgtgggagcacgaccgagacagatagagtacatccagtccctcccactgccagacatcgtgggcatctacttgctcgtcaacatgctaggcttcgatttttccagcgcccgcgaggactcggcatcatctgatcccgccctattcgagcgaattaccgtgttttcaggaggtgacctgcacaagatggcaaaggagatgagccgcgctggcatgtacgaactcaccgaatgggagatgggttcccccggcgtcctccaggggctcaagatgacgctcacggcccgcttcagagacttggttaccgaagagggtgaggagcccagcgacgatggtgatcttgataaggagcgaatgcagaaagcggtcaacgagatcattttgggaacggacgacgaggagaagaatgatttagttggctag

SEQ ID NO: 23939 - protein, 322 aa, Muscodor strobelii
  misc_feature: SGI Peptide ID NO. 568154
  misc_feature (12)..(237): NCBI GI: 116199989 Blast Desc: CHGG_08150 [Chaetomium globosum CBS 148.51] gi|88179429|gb|EAQ86897.1| CHGG_08150 [Chaetomium globosum CBS 148.51]
  misc_feature (12)..(145): NCBI GI: 171684347 Blast Desc: protein product [Podospora anserina] gi|170942134|emb|CAP67786.1| protein product [Podospora anserina]
  misc_feature (15)..(237): NCBI GI: 145614770 Blast Desc: [Magnaporthe grisea 70-15] gi|145021658|gb|EDK05787.1| [Magnaporthe grisea 70-15]
  misc_feature: Useful for introducing or modulating the production of volatile compounds
MEALALGSFCRIPSEIVLQIADHMDQPTLQSFMKANKWFDQLYRSYEASICMARIAMLPAPPPTANILTSATTERRRLCGQNTFQQVEELERRAERINRLFEEAPKYFRIEAPGWLPTLSDEQHARFTDSLKRALWQCDMIADVAANEPCKPIPPEAYADILSGVYSKSTLTWGQCARDPFANVGARPRQIEYIQSLPLPDIVGIYLLVNMLGFDFSSAREDSASSDPALFERITVFSGGDLHKMAKEMSRAGMYELTEWEMGSPGVLQGLKMTLTARFRDLVTEEGEEPSDDGDLDKERMQKAVNEIILGTDDEEKNDLVG

SEQ ID NO: 23940 - DNA, 1621 bp, Muscodor strobelii
  misc_feature: SGI EST ID NO. CUFF.56297.0
  misc_feature: Variant of the nucleotide sequence at SEQ ID NO 23938
ctgagcttcctgtaatgcccaagcttgacagtgtgactactgagtcactgacacaagcagtcattgttcaagaccgggaacgtgcaaccttgatggccggtcccttgagctaagagctcctccccataaccacgtcaccggctgattactaccttttacaacaactgcccgcaaggttttacatcacctcctctgtccctcaaacatcacattcacaaatattctcccatccccagataacttcaacatcatcgtcttcttcttgccattaggtatatcgtgtcactctgtttcatctcttagttataagctcaagtagcatttgtgctcatacttaacccttgcgtggaatcgagtcggcaccttccatatatcaatcactcggttcagagactctcataatggaggccctcgccctgggcagtttctgccgcattcctagtgagatcgttcttcagattgccgaccacatggaccaacctacacttcagagtttcatgaaggcaaataaatggttcgaccagctctacagaagctatgaggcctctatttgcatggcacgaattgcgatgctccctgcgccacccccaactgcgaacattctcacctcggccacaacagaacgtcgacgtttgtgcggccagaacacgttccagcaggttgaagagttagagcgccgcgcagaacggatcaatcgccttttcgaggaagctcctaagtacttccgcatagaagcgcccggctggcttcctaccttgtcagatgagcagcacgcacgattcacagattcactgaagcgagctctctggcagtgcgatatgatcgcagacgtggcagcaaacgagccctgcaagccgattccccctgaggcctatgcggatatcctctccggagtttactctaagagcactcttacgtggggacaatgcgcacgagacccttttgccaatgtgggagcacgaccgagacagatagagtacatccagtccctcccactgccagacatcgtgggcatctacttgctcgtcaacatgctaggcttcgatttttccagcgcccgcgaggactcggcatcatctgatcccgccctattcgagcgaattaccgtgttttcaggagtgcattctgcgtcatggaacgtggtttatctggggccatgtgatggaaaagggtgacctgcacaagatggcaaaggagatgagccgcgctggcatgtacgaactcaccgaatgggagatgggttcccccggcgtcctccaggggctcaagatgacgctcacggcccgcttcagagacttggttaccgaagagggtgaggagcccagcgacgatggtgatcttgataaggagcgaatgcagaaagcggtcaacgagatcattttgggaacggacgacgaggagaagaatgatttagttggctaggacacaggattttcttttgatttcatataaagatagcgtcgcatggatcagcagagggcatcaatgaggttgtttgatgagtcaggaataagcataaaggcggcactgaggaatagcgggcatggtttgccctcagggaaggttacctgaggagataggatttgtttattgaacataaagcgagagtcacattgataag

SEQ ID NO: 23941 - DNA, 375 bp, Muscodor strobelii
  misc_feature: SGI cDNA ID NO. 568155
  misc_feature: Encodes the peptide sequence at SEQ ID NO 23942
atgccctcactctttgcttcgtcgtcctcggcctcagacccagagcgtcacagtctactcgagcgaggcgaggagaaggccaagcgtgtcttctcaggctttgttgacttcgttttctcgggaaacatcttagaaatcgctttcggtctgatccttgcaaatgcattcaccagcgtgacacaatcatttgtaaatgatatcctattgccccctttgtcggtaattctcccgctgcatcgcaacatggacgagaaatttgcagtcttgaaacccggtccgcgttttgaagagctcgatggatacacaaccattgcgcaagcgcagcatgacggcgctgttgttatggcttatgggtatgcgccttcttttatttga

SEQ ID NO: 23942 - protein, 124 aa, Muscodor strobelii
  misc_feature: SGI Peptide ID NO. 568155
  misc_feature (1)..(118): NCBI GI: 256731882 Blast Desc: NECHADRAFT_80701 [Nectria haematococca mpVI 77-13-4]
  misc_feature (11)..(118): NCBI GI: 261352446 Blast Desc: conserved [Verticillium albo-atrum VaMs.102]
  misc_feature (12)..(118): NCBI GI: 145613616 Blast Desc: MGG_01480 [Magnaporthe grisea 70-15] gi|145020677|gb|EDK04806.1| MGG_01480 [Magnaporthe grisea 70-15]
  misc_feature (22)..(119): NCBI GI: 171683277 Blast Desc: protein product [Podospora anserina] gi|170941598|emb|CAP67252.1| protein product [Podospora anserina]
  misc_feature (22)..(118): NCBI GI: 46136271 Blast Desc: FG09651.1 [Gibberella zeae PH-1]
  misc_feature (13)..(118): NCBI GI: 119473979 Blast Desc: ion channel, [Neosartorya fischeri NRRL 181] gi|119407018|gb|EAW16968.1| ion channel, [Neosartorya fischeri NRRL 181]
  misc_feature (13)..(118): NCBI GI: 70986068 Blast Desc: ion channel [Aspergillus fumigatus Af293] gi|66846163|gb|EAL86496.1| ion channel, [Aspergillus fumigatus Af293]
  misc_feature (13)..(118): NCBI GI: 159128332 Blast Desc: ion channel, [Aspergillus fumigatus A1163]
  misc_feature (31)..(119): NCBI GI: 164429285 Blast Desc: NCU09933 [Neurospora crassa OR74A] gi|157073013|gb|EAA28654.2| conserved [Neurospora crassa OR74A]
  misc_feature (34)..(119): NCBI GI: 16945414 Blast Desc: related to large-conductance mechanosensitive channel [Neurospora crassa]
MPSLFASSSSASDPERHSLLERGEEKAKRVFSGFVDFVFSGNILEIAFGLILANAFTSVTQSFVNDILLPPLSVILPLHRNMDEKFAVLKPGPRFEELDGYTTIAQAQHDGAVVMAYGYAPSFI

SEQ ID NO: 23943 - DNA, 541 bp, Muscodor strobelii
  misc_feature: SGI EST ID NO. CUFF.56303.0
  misc_feature: Variant of the nucleotide sequence at SEQ ID NO 23941
cactttcgacctttcgtccatatcttgtttccctttgtttcgagttttcggggattttctctgtccgttgtttctttgtcgcgatcgaattgtacagtaacggtttctagagctatcttttatcatctctatacccattgaccttgagcgtttcgtttcaattattgggtaccgatttcgagtctcgagacctcggctttccacatcatgccctcactctttgcttcgtcgtcctcggcctcagacccagagcgtcacagtctactcgagcgaggcgaggagaaggccaagcgtgtcttctcaggctttgttgacttcgttttctcgggaaacatcttagaaatcgctttcggtctgatccttgcaaatgcattcaccagcgtgacacaatcatttgtaaatgatatcctattgccccctttgtcggtaattctcccgctgcatcgcaacatggacgagaaatttgcagtcttgaaacccggtccgcgttttgaagagctcgatggatacacaaccattgcgcaagcgcagcatgacggcg

SEQ ID NO: 23944 - DNA, 1869 bp, Muscodor strobelii
  misc_feature: SGI cDNA ID NO. 568156
  misc_feature: Encodes the peptide sequence at SEQ ID NO 23945
atgacgatagctagaactagacttctcacagccattgtgtgcactctgctcgtgggcccctttaggtcttcagcctcaacacaccatacccagcaatggcttcgagactccccatccaattgctccttaccagcatatcgcaaccctaaactatccgtcgacactcgcgttgatgatctgctgcagcgcatgactctcgaggagaaagcaggccaactattccaacaatacatcaccgcgggccccaatggaacactagacgacacgacgatcatgtacatcgatgagctgcaaatgtctcatcttgcattcctaggtgatatcctagacccagtagtggcagcagagtaccacaatcgtctacagcaacgagctatagatcacactcgtttggggattcccatcaccttcgctacggattatcgtcatcacatcggacctgggtttatcggcccaccgccaaatgggtacttttcgaagtggccggggtttcttgggcttgcggcgttgcgggaccccgagttgattaggcaacacgcagaaatcgccagagaagaatttctgtctatcgggtttcgcctgggactacaccctggggtggatctcagcacggaaccacgatgggcacgtatcgccgagtcgtttggtgagtcggcagaacttgtctcgttgctcgtcacgccgtatatcgagggcttccagaccaaagaattcggcgtcaattcaatgagcattacgacaaaggcattccccggcggaggaccaatgcagaatggctgggatagccacttcgcatatggcatgaatcagacataccccggtaacaacctggagtaccacctcacaccgttcaaagcagccatcgctgccggcactagacagattatgccttactatagtcgacctattaacactgaatacgaatcagtgggcttcggatacaataaaggaatcgtcaccgatcttctcaagggagagctcggcttcgagggtattgttctcactgattttggtctgatcaccgattcggagccccttggccagttcttacccgcccgtgcatggggagtcgaagaattgacagatttggaacgagccgctaagattctcgacgccggctgtgaccaatttgggggtgaaaatcgtccagagcttgtcatacagcttgtacaggagggaatagtgcctattgagcgaatagaccattcagtccgaaagttgctcaaagaaaaatttcttctcggactcttcgataatccgctcgtctcggtcgagaacgctgttgctgtctcgaagaaaaaggagtaccatcatcttggatttgaggcgcagcgtcgcgcatacacgttattgacaaacaacgacgatattctcccactcaacaacattgaaaagtcaaccaagttctatatcgaaggcttcaacgcttctttcataaaagaccggggttacgctgttgttgcaatgccggaggaagcagacattgcgctgctacgtctccaatcaccatcccaaccacgcggaggcgccttcgaaataacattcaatcaaggatcgctcgaatttttagatgaggagaaggcacgtcagtcagctgtttacaatgctgtgccaactatcgtagacatgcagctcgataggcccgcagccattcccgaaattgctgaacaggcttcagcgctgctcggaagttttggcgcgactgaagatgcgatgctcgatatcatttttggtgtcgctaaacctgaagggaaactgccgtatgatcttcctcggtccgatgctgctgtagcggtcaatctggaggatgttccatttgatacggagaacccagttttccatttcggccatggattgagctataaatga

SEQ ID NO: 23945 - protein, 622 aa, Muscodor strobelii
  misc_feature: SGI Peptide ID NO. 568156
  misc_feature (125)..(379): Pfam Id: PF00933 Pfam Desc: Glycosyl hydrolase family 3 N terminal domain
  misc_feature (448)..(622): Pfam Id: PF01915 Pfam Desc: Glycosyl hydrolase family 3 C terminal domain
  misc_feature (125)..(234): Pfam Id: PF00933 Pfam Desc: Glycosyl hydrolase family 3 N terminal domain
  misc_feature (531)..(621): Pfam Id: PF01915 Pfam Desc: Glycosyl hydrolase family 3 C terminal domain
  misc_feature (2)..(621): NCBI GI: 39966399 Blast Desc: MGG_10038 [Magnaporthe grisea 70-15] gi|145015330|gb|EDJ99866.1| MGG_10038 [Magnaporthe grisea 70-15]
  misc_feature (37)..(621): NCBI GI: 169774303 Blast Desc: [Aspergillus oryzae RIB40] gi|83769482|dbj|BAE59617.1| protein product [Aspergillus oryzae]
  misc_feature (42)..(621): NCBI GI: 238497181 Blast Desc: conserved [Aspergillus flavus NRRL3357] gi|220694706|gb|EED51050.1| conserved [Aspergillus flavus NRRL3357]
  misc_feature (42)..(622): NCBI GI: 67522695 Blast Desc: AN1804.2 [Aspergillus nidulans FGSC A4] gi|40745813|gb|EAA64969.1| AN1804.2 [Aspergillus nidulans FGSC A4] gi|259487150|tpe|CBF85593.1| TPA: beta-1,4-glucosidase FGSC
  misc_feature (29)..(621): NCBI GI: 169595502 Blast Desc: SNOG_00490 [Phaeosphaeria nodorum SN15] gi|160701107|gb|EAT91985.2| SNOG_00490 [Phaeosphaeria nodorum SN15]
  misc_feature (46)..(622): NCBI GI: 189208602 Blast Desc: periplasmic beta-glucosidase precursor [Pyrenophora tritici-repentis Pt-1C-BFP] gi|187976727|gb|EDU43353.1| periplasmic beta-glucosidase precursor [Pyrenophora Pt-1C-BFP]
  misc_feature (44)..(622): NCBI GI: 256720846 Blast Desc: glycoside hydrolase family 3 [Nectria haematococca mpVI 77-13-4]
  misc_feature (39)..(622): NCBI GI: 261359133 Blast Desc: periplasmic beta-glucosidase/beta-xylosidase [Verticillium albo-atrum VaMs.102]
  misc_feature (44)..(622): NCBI GI: 46134039 Blast Desc: FG09159.1 [Gibberella zeae PH-1]
  misc_feature (39)..(621): NCBI GI: 242763182 Blast Desc: conserved [Talaromyces stipitatus ATCC 10500] gi|218723720|gb|EED23137.1| conserved [Talaromyces stipitatus ATCC 10500]
  misc_feature (34)..(621): SWISSPROT Homolog: EC 3.2.1.21 Beta-glucosidase
  misc_feature (34)..(621): SWISSPROT Homolog: EC 3.2.1.37 Xylan 1,4-beta-xylosidase
MTIARTRLLTAIVCTLLVGPFRSSASTHHTQQWLRDSPSNCSLPAYRNPKLSVDTRVDDLLQRMTLEEKAGQLFQQYITAGPNGTLDDTTIMYIDELQMSHLAFLGDILDPVVAAEYHNRLQQRAIDHTRLGIPITFATDYRHHIGPGFIGPPPNGYFSKWPGFLGLAALRDPELIRQHAEIAREEFLSIGFRLGLHPGVDLSTEPRWARIAESFGESAELVSLLVTPYIEGFQTKEFGVNSMSITTKAFPGGGPMQNGWDSHFAYGMNQTYPGNNLEYHLTPFKAAIAAGTRQIMPYYSRPINTEYESVGFGYNKGIVTDLLKGELGFEGIVLTDFGLITDSEPLGQFLPARAWGVEELTDLERAAKILDAGCDQFGGENRPELVIQLVQEGIVPIERIDHSVRKLLKEKFLLGLFDNPLVSVENAVAVSKKKEYHHLGFEAQRRAYTLLTNNDDILPLNNIEKSTKFYIEGFNASFIKDRGYAVVAMPEEADIALLRLQSPSQPRGGAFEITFNQGSLEFLDEEKARQSAVYNAVPTIVDMQLDRPAAIPEIAEQASALLGSFGATEDAMLDIIFGVAKPEGKLPYDLPRSDAAVAVNLEDVPFDTENPVFHFGHGLSYK

SEQ ID NO: 23946 - DNA, 1054 bp, Muscodor strobelii
  misc_feature: SGI EST ID NO. CUFF.56300.0
  misc_feature: Variant of the nucleotide sequence at SEQ ID NO 23944
tcaagggagagctcggcttcgagggtattgttctcactgattttggtctgatcaccgattcggagccccttggccagttcttacccgcccgtgcatggggagtcgaagaattgacagatttggaacgagccgctaagattctcgacgccggctgtgaccaatttgggggtgaaaatcgtccagagcttgtcatacagcttgtacaggagggaatagtgcctattgagcgaatagaccattcagtccgaaagttgctcaaagaaaaatttcttctcggactcttcgataatccgctcgtctcggtcgagaacgctgttgctgtctcgaagaaaaaggagtaccatcatcttggatttgaggcgcagcgtcgcgcatacacgttattgacaaacaacgacgatattctcccactcaacaacattgaaaagtcaaccaagttctatatcgaaggcttcaacgcttctttcataaaagaccggggttacgctgttgttgcaatgccggaggaagcagacattgcgctgctacgtctccaatcaccatcccaaccacgcggaggcgccttcgaaataacattcaatcaaggatcgctcgaatttttagatgaggagaaggcacgtcagtcagctgtttacaatgctgtgccaactatcgtagacatgcagctcgataggcccgcagccattcccgaaattgctgaacaggcttcagcgctgctcggaagttttggcgcgactgaagatgcgatgctcgatatcatttttggtgtcgctaaacctgaagggaaactgccgtatgatcttcctcggtccgatgctgctgtagcggtcaatctggaggatgttccatttgatacggagaacccagttttccatttcggccatggattgagctataaatgatgctgtaattgtgtacagagtggcgcacagtagatctatagtgtattgttctttatttcaaaatgcgtgcgcatccgaacctcctctcgtatatagttggtaatatacaataattgcagttggtggtaaatagggaattgagcagtcttgat

SEQ ID NO: 23947 - DNA, 1296 bp, Muscodor strobelii
  misc_feature: SGI cDNA ID NO. 568157
  misc_feature: Reduced expression when VOC is produced
  misc_feature: Encodes the peptide sequence at SEQ ID NO 23948
atgccacccccaccgccgccgccgccccctccgcctccgggcatgggaggaccaccgcctcccccaccacctcctccaggaggactaccctcgcgcccaccagcagcaggtggcggccgtggcgctttacttggtgatattcaaaagggaagggctctgaagaaggctgtcacaaatgatcgatccgccccggtagttggaaagtcatccggaggtggtggcggaccaccactgggcggagcgcctccgattcccactctcccaaaggcacccggtggactagctcctccgccccctccaggaggtgccagagccaggagtaacagcgatactgatggggcctcgtcaatggactcggcgccccagctcggcggtctgtttgctggtggcatgcccaagttgaagaagcgcagtggaggggtagatactggggcaaaccaagactcctcatactcggccgattctggctctgcgccagctcctccttcggcacccaggccaccggctggaggcgctccagccataccaggacgcgcagtaccctctcttcccaaagcgccgtcagcagttccgtcgatagcgaatttacgaaagacagccagtaccacgccccggccactatcatcggtgtctatagcctcatccaaaggtccgccgccgcccattggcaagaaaccccctcctccgccaggggtcaggaaaccgtcaggactgggggcagcaccacctcagcctccgccattgcctggcgcgccagcacctcctcccccttcctcggcaccgcccccgcctgcaccacctccaccatcttcagcaccagctcctcccccaccgccgcctcccccggctgctgctccaagacctccgatagcacagactcgctcacaaccaccacctccacctcctgccgctcctccgacaagcggtcctccacagctcggcaatgtaatacaagcagctatcagctcgagaggcggccgttcatcaccaacagcggcacctcccgcacctccgccgcctccccctgcagcggcccctccacaagcggcccccaccgccagagccaagtcgacctcgagcaagctcgaatctgcgccagactatgctcgatccaagcgcctacacacttacaccaacgaatggcaccggaacaaagagcccgagcccctcaggaagtgcattgccgagtccacgcgcgggagaaaagcacaaggattccgatcgagaggacgaagtcactcccgcctcgggagacttccagacgactggtccgaagccgaacaagccgacgattga

SEQ ID NO: 23948 - protein, 431 aa, Muscodor strobelii
  misc_feature: SGI Peptide ID NO. 568157
  misc_feature (31)..(199): NCBI GI: 154318409 Blast Desc: BC1G_03372 [Botryotinia fuckeliana B05.10] gi|150842895|gb|EDN18088.1| BC1G_03372 [Botryotinia fuckeliana B05.10]
  misc_feature (29)..(212): NCBI GI: 156053023 Blast Desc: SS1G_06679 [Sclerotinia sclerotiorum 1980] gi|154704457|gb|EDO04196.1| SS1G_06679 [Sclerotinia sclerotiorum 1980]
  misc_feature (29)..(219): NCBI GI: 154288020 Blast Desc: [Ajellomyces capsulatus NAm1] gi|150408446|gb|EDN03987.1| [Ajellomyces capsulatus NAm1]
  misc_feature (27)..(166): NCBI GI: 240109861 Blast Desc: WH2 motif family protein [Coccidioides posadasii C735 delta SOWgp]
  misc_feature (35)..(175): NCBI GI: 256735180 Blast Desc: NECHADRAFT_98784 [Nectria haematococca mpVI 77-13-4]
  misc_feature (36)..(212): NCBI GI: 145615748 Blast Desc: MGG_11027 [Magnaporthe grisea 70-15] gi|145022759|gb|EDK06571.1| MGG_11027 [Magnaporthe grisea 70-15]
  misc_feature (27)..(155): NCBI GI: 119184374 Blast Desc: CIMG_07003 [Coccidioides immitis RS]
  misc_feature (36)..(155): NCBI GI: 46108228 Blast Desc: FG00996.1 [Gibberella zeae PH-1]
  misc_feature (29)..(199): NCBI GI: 171687833 Blast Desc: protein product [Podospora anserina] gi|170943878|emb|CAP69530.1| protein product [Podospora anserina]
  misc_feature (29)..(220): NCBI GI: 225560093 Blast Desc: basic proline-rich protein [Ajellomyces capsulatus G186AR]
  misc_feature: Useful for introducing or modulating the production of volatile compounds
MPPPPPPPPPPPPGMGGPPPPPPPPPGGLPSRPPAAGGGRGALLGDIQKGRALKKAVTNDRSAPVVGKSSGGGGGPPLGGAPPIPTLPKAPGGLAPPPPPGGARARSNSDTDGASSMDSAPQLGGLFAGGMPKLKKRSGGVDTGANQDSSYSADSGSAPAPPSAPRPPAGGAPAIPGRAVPSLPKAPSAVPSIANLRKTASTTPRPLSSVSIASSKGPPPPIGKKPPPPPGVRKPSGLGAAPPQPPPLPGAPAPPPPSSAPPPPAPPPPSSAPAPPPPPPPPAAAPRPPIAQTRSQPPPPPPAAPPTSGPPQLGNVIQAAISSRGGRSSPTAAPPAPPPPPPAAAPPQAAPTARAKSTSSKLESAPDYARSKRLHTYTNEWHRNKEPEPLRKCIAESTRGRKAQGFRSRGRSHSRLGRLPDDWSEAEQADD

SEQ ID NO: 23949 - DNA, 2824 bp, Muscodor strobelii
  misc_feature: SGI EST ID NO. CUFF.56547.0
  misc_feature: Variant of the nucleotide sequence at SEQ ID NO 23947
caacggtcgggcagctgcagttgcaattgaggctgagtcgagtcgaacaaagggccaaacgtcgtgtgtccaggcaccagtccgccgtctcgcaatatatcacccattcatatcgacgcacattgccccgactatcgttattccacttcccattgccggcattgctttcgacactttcgctttgctcacatcgctgccgacgccatcgtttattcttacaacgactctcagccccagctcgacattccgccgttgcagcccagcagagccacgtccgaccacactaagcatccaaaacgataagaaattgcagcccgtagaggcacaccacaccaatatcacatatcacagtatcagacaaggctggccgtgatgccacccccaccgccgccgccgccccctccgcctccgggcatgggaggaccaccgcctcccccaccacctcctccaggaggactaccctcgcgcccaccagcagcaggtggcggccgtgtatgtcggccaatatggcaccgatatcagatctcaaggctaattctataccgctcagggcgctttacttggtgatattcaaaagggaagggctctgaagaaggctgtcacaaatgatcgatccgccccggtagttggaaagtcatccggaggtggtggcggaccaccactgggcggagcgcctccgattcccactctcccaaaggcacccggtggactagctcctccgccccctccaggaggtgccagagccaggagtaacagcgatactgatggggcctcgtcaatggactcggcgccccagctcggcggtctgtttgctggtggcatgcccaagttgaagaagcgcagtggaggggtagatactggggcaaaccaagactcctcatactcggccgattctggctctgcgccagctcctccttcggcacccaggccaccggctggaggcgctccagccataccaggacgcgcagtaccctctcttcccaaagcgccgtcagcagttccgtcgatagcgaatttacgaaagacagccagtaccacgccccggccactatcatcggtgtctatagcctcatccaaaggtccgccgccgcccattggcaagaaaccccctcctccgccaggggtcaggaaaccgtcaggactgggggcagcaccacctcagcctccgccattgcctggcgcgccagcacctcctcccccttcctcggcaccgcccccgcctgcaccacctccaccatcttcagcaccagctcctcccccaccgccgcctcccccggctgctgctccaagacctccgatagcacagactcgctcacaaccaccacctccacctcctgccgctcctccgacaagcggtcctccacagctcggcaatgtaatacaagcagctatcagctcgagaggcggccgttcatcaccaacagcggcacctcccgcacctccgccgcctccccctgcagcggcccctccacaagcggcccccaccgccagagccaagtcgacctcgagcaagctcgaatctgcgccagactatgctcgatccaagcgcctacacacttacaccaacgaatggcaccggaacaaagagcccgagcccctcaggaagtgcattgccgagtccacgcgcgggaggtgggtcaggagagcgatatattgtcaacgatgggcggtggcgttttacagaagaggccatgtttccgaagccgagggagttccgtggcggtagtgccaagagatatcgggcgggaagggggagcagtgtgcctcttgatctgagcgcgctctagaaaagcacaaggattccgatcgagaggacgaagtcactcccgcctcgggagacttccagacgactggtccgaagccgaacaagccgacgattgacgaatatttttgaacgaattggcacaccggctttaaaggaatgagatgagagaggatggacacgacacgtcaacctcgaaacgatgaaatggcatcccgatatggtgtcatggcaatcgggcccaccacgtggaacgagcaccatttagaatggctatccggatgaaaagcctgcgtcgctgcaaagcagacttcatgatgagaagtgtctgtgcaggcagcaaagcagaacttaggaaatgatagaatgaatgaatcaaagtcttatgatactacgtctaagtacgacagaagtcgtcaagaccaagatacttcttacccttttgcgctgacatcactttccacaatagttctacctcttagccaaaaccatgcttgaatttcttctcgagtatctccaaacttcacattttttcttttcgcgctccgcaattgagacggagatgcattcttgcagtctcgaaaatgtatcgcctctatcgagtctctcgcatgaagcacgggacctatccacatacacacattccttacaatggcttgatgatgtagaaaagatagcgtctgggttgaagatacggctagtcctagatcaacttaaggaatcaggcagaactgcatgtttgcattctatatgctgaaatttttcgcatataccaaatcggactagcttgctttgttgtgaataagggttggtgatgaggtaaataaggtatatgaggccgtgatggtatggctctatacagggactcggagcagcgaatgagaaaaaagaaagatagctagaaaatttaggggttcaatagatggaggagaaaaaaattatgccccagctaggaatcgaacctagatcggtgtgcaacgccgagatggagacactgagttccagtgtctgagtcgcaacaattacaccatcatgaccattagaccaccggggcgattgttg

SEQ ID NO: 23950 - DNA, 1905 bp, Muscodor strobelii
  misc_feature: SGI cDNA ID NO. 568158
  misc_feature: Encodes the peptide sequence at SEQ ID NO 23951
atgtcgtctgaaacaacagacttgactcgcgcgtcgcctggcccatcgccggccagcgagctttgtgataattgcagagcactcatgacagtggatggactatgggaagctcagtcgtcggccggctactatcatagctatgtcaccttcaagccgcccgacgataacgaagactgcgagttttgtttcttgatgaaataccgggaagctcgcgttcaattagacacatccatcacctggttacatattttcagaacgtgtgcagacgaggatgacgacactcagtcccactctaatcctactacgtacgacatcttaccatttagctacatctcccatggatttcaacaagatggggacgagactggttcctcgttccaacctagcggtatggaactggtacctgtcactgctgctgacgatccagcctctcagttcgtcataaatcacccgcctgccaaggactttaccattcccgccgtggcgtcttctatccgctcatggattgctaactgctgtataacgcacgacgagtgtcccggacagatacagcgcgagctccccacgcgggtcatcgacgtcggtatctctaatagtagggacagaaacactgtacgcctttacacgtcgaaaccaggcgagaaggcatattatgcatgcttaagctattgctggggcggaccgcaggctgttgtaacgacgagacaaacattcgatactctaaccaggggaatctcggtaggtacacttggtctcacgattcaaaacgccatcgaggtgacgaggtcacttgggcttatgtacatctgggtggacgccatttgcatcgtgcaagatgacgacaatgacagaacaactgagattcagaagatggccagcatttaccagaagtcgacggtaaccattgcagcctcgacggcagccagttcgacagacggttttctctggtcgcatttcagaggagtagaccctggtcaggcaagatatcggtttgaaatcgatttacccgatggccgcataggagatgttgtcttgcatcacggctggctttctttctatcgcctggatctcgatccattggacacaaggggttgggcgttgcaagagctcctcctctcaccccgtatcattaactatacaaaaggtctgatcattctagactgtcgccaagaccgaagcaggcagctctggaagactggtattaagtacatgctgggaaccgttgagcgacgtcaccttatccgcccaacgaggggcccgtcgaaaaagttaatcgaattaaattgggaaaagcttgtcgaaatgttcaccaatcgccatttaacagacaacagcgaccgtctcaatgccatttatggcatcgctacagatttcgcatccaaagcacccctcaagggttatgccttcgggatgcaggagaccagatttgcctcacagctggggtggtatgttaagaaacagaaccggagacacaaggcaactagatcatctagagcgccgacgtggtcctgggcaagcgtggatgatcctatttccttccccttcttcgtatcaagcaattatcatgagacatcaaccgtcatcctgttatcgaaattgactcccgaacaacctaccctaagggtacgaagtcagctcctactcgactggaacgcggaagaccgccacgatcacgacacttactttgacattgatgaggatattacaagcattgacggattagcacttcttcttctcaccaaacgtaccggtggacagggagactctggggattggttgctgttagccaaggtagagagcgacttggccttgcatgacccttgctatcgaagaatcggtaccatcatgaatagtgacacgtctctctacagtcgtgctattgagcagactgttgttctggtttga

SEQ ID NO: 23951 - protein, 634 aa, Muscodor strobelii
  misc_feature: SGI Peptide ID NO. 568158
  misc_feature (218)..(369): Pfam Id: PF06985 Pfam Desc: Heterokaryon incompatibility protein (HET)
  misc_feature (218)..(304): Pfam Id: PF06985 Pfam Desc: Heterokaryon incompatibility protein (HET)
  misc_feature (129)..(613): NCBI GI: 256723935 Blast Desc: NECHADRAFT_78444 [Nectria haematococca mpVI 77-13-4]
  misc_feature (117)..(508): NCBI GI: 256720853 Blast Desc: NECHADRAFT_85575 [Nectria haematococca mpVI 77-13-4]
  misc_feature (165)..(514): NCBI GI: 256728256 Blast Desc: NECHADRAFT_87861 [Nectria haematococca mpVI 77-13-4]
  misc_feature (130)..(513): NCBI GI: 168041122 Blast Desc: [Physcomitrella patens subsp. patens] gi|162675588|gb|EDQ62081.1| [Physcomitrella patens subsp. patens]
  misc_feature (136)..(529): NCBI GI: 256723310 Blast Desc: NECHADRAFT_86482 [Nectria haematococca mpVI 77-13-4]
  misc_feature (159)..(547): NCBI GI: 256732396 Blast Desc: NECHADRAFT_80919 [Nectria haematococca mpVI 77-13-4]
  misc_feature (166)..(519): NCBI GI: 256722445 Blast Desc: NECHADRAFT_77212 [Nectria haematococca mpVI 77-13-4]
  misc_feature (161)..(633): NCBI GI: 116195248 Blast Desc: CHGG_04222 [Chaetomium globosum CBS 148.51] gi|88180135|gb|EAQ87603.1| CHGG_04222 [Chaetomium globosum CBS 148.51]
  misc_feature (165)..(547): NCBI GI: 154316024 Blast Desc: BC1G_04584 [Botryotinia fuckeliana B05.10] gi|150846980|gb|EDN22173.1| BC1G_04584 [Botryotinia fuckeliana B05.10]
  misc_feature (141)..(513): NCBI GI: 256728052 Blast Desc: NECHADRAFT_23862 [Nectria haematococca mpVI 77-13-4]
MSSETTDLTRASPGPSPASELCDNCRALMTVDGLWEAQSSAGYYHSYVTFKPPDDNEDCEFCFLMKYREARVQLDTSITWLHIFRTCADEDDDTQSHSNPTTYDILPFSYISHGFQQDGDETGSSFQPSGMELVPVTAADDPASQFVINHPPAKDFTIPAVASSIRSWIANCCITHDECPGQIQRELPTRVIDVGISNSRDRNTVRLYTSKPGEKAYYACLSYCWGGPQAVVTTRQTFDTLTRGISVGTLGLTIQNAIEVTRSLGLMYIWVDAICIVQDDDNDRTTEIQKMASIYQKSTVTIAASTAASSTDGFLWSHFRGVDPGQARYRFEIDLPDGRIGDVVLHHGWLSFYRLDLDPLDTRGWALQELLLSPRIINYTKGLIILDCRQDRSRQLWKTGIKYMLGTVERRHLIRPTRGPSKKLIELNWEKLVEMFTNRHLTDNSDRLNAIYGIATDFASKAPLKGYAFGMQETRFASQLGWYVKKQNRRHKATRSSRAPTWSWASVDDPISFPFFVSSNYHETSTVILLSKLTPEQPTLRVRSQLLLDWNAEDRHDHDTYFDIDEDITSIDGLALLLLTKRTGGQGDSGDWLLLAKVESDLALHDPCYRRIGTIMNSDTSLYSRAIEQTVVLV

SEQ ID NO: 23952 - DNA, 3219 bp, Muscodor strobelii
  misc_feature: SGI cDNA ID NO. 568159
  misc_feature: Encodes the peptide sequence at SEQ ID NO 23953
atgccgctccctggggccgtccgccttgggcagaaggggtacgaggtgtactggttgggtcgggcctccaatgacgccgtaggtcgtagttgggctatgagagccactggaggctcagcagaaccgagtacgacggagattttcgttaactctcactgggcactccatatagagggcctcaataagctctacgagtctctggcctctaatgcaaagggtgccgagatttcttacattgttgaaagggcagcatttaaaatcaagtccttgcccggcgaggagcctgaactaatctcagaacttcattctactttgagcgagttggtctcaaacgctgacaaggccgtgggtgttccagtgcctagctcgtaccatgtagttgctaacttgatacccaagagcaacctagttatgccaattgaagactggcttagcaatgttaccatcacggccgatatccgagaagcatatcagagatacacctaccccatctgcatcgcactctatgagatccgagagacctggatgttggacgaagagttgccgcaaaagggcatcacaactgaaacgttcttaccacaacatgcgcagtcagagatcgagcgattgactagcactcagctagttagaagctgtgatggccgaactgtctacatcggggctcgtgccaaagaagaagctattagagcaatgatcaagctctataacatcgcagaatgcttcttggcagcacacaaaaatagacacaacgaaatggccattgttctgcataacgatcgtgatagatcacagattggtgaatacagatacgtgaaggacgggaatgctttcctattgaaaaccttcgtcctcgattcaacgtacggtgataaggagaagtcctacagggagcttttccaacgcgccgtcattgtacgaatggtttccaaagacagtccatgcacgccggtaccatcgctggaagggagaataagtcccgcggtagaacgtcgaaattcgacagagcaatgggagccgttcgtagattggaagtacaaagcaaaggcccgtgtactcccatcggcccagcccctagctactctcaaggcagcagcatctcagccctcgacgtctcagaagctgctcaacatgcagcagtgggtttctggagtccccagcatcaaatcgcaaggtagtcaagctgtgtcgcctcaaatccgacaaacttcgcgatctctatcatctacgactttcaactctgacagaggagtcaagacgggaacgcctcgccaagaatcgtccaagtcgggatctctcaaacaacttgtcgtgcagcaggaatccgttggactagagagtacccatcgacgtgctataaatcaagaggacatccgcgacgagcaaacccaagcagcgcggctgcatacagagctgatggattcaggccgagtgaagcctgagccagtcacacaggggccgcaacactcagaaaggggcaagtcgctgcttcgtgaagagttgatcggcaatcggtccaccgagcaggaatcggtccaaagagagaagaccaggactaccggattgttgcaagaggctatggaagtaaagccagctcatgaacagcgagccaatgacctaccaatattgaccaggaaaccctcaacgatgcgaactgagtccgatccattcagcagcctctggacaacagcagtcacttctcacaccggtgatccatcaagaaaggtatccaataccaggatcgatccacgggtacagactcaagatgagaaacagtcccgatcgtaccacacgacaatgaatcaacaggcgccttctcgccgagacaaaaagcctaagccagtaaagctagatctttcaggcagagcgaagactgaatcagtaacatcacaagcaagccgaacggtatccccttcccgcacgatggcacaagttgcgggcagtggagtaagtcaagcaaatagtcagatctcttcgtcgcgcaatgttgctcaggttgcgagctatggaatgactacaggagatagtcagatctcatcatcacccaccatcgctcaagtcacgagctacggagttatacaggggaataatcccagcgcggcacctggtgtagcctcctattacccagatctggaccctggaatggtgcagcggctcaaaaatcttctcgctcaagtcctgaccccattccagttgagccaaggccaatttgagcttcgagttgagcttggacgccttctgttcctgaatgtcaatccgaagaagatacaattatgggaaggtgacgaagaagagcggcactacgaaatcggacgtatcattgacgactgtagcacaaaatatcggccagcttttacacgcgtcttatctggtctaggcgccgatgccaatttcttctcgcagatccgagatgacgctggcgatattatctggaagcccatacccaacagcagaaagacgttttaccagttccagtgttgtgctaagttcgaacacagcggtggagaatgggctgccttctggattgacgtcgatgctgacgattttacattcaagatcagagacgacaatgcagagcgaaggatctatggtgtacattgtacaaagcgcgcttgggactttcgactggttctcacaggccagcaagacttgacaaatacttgtgaaagctttgccaaaagcctcatcgactcgctgcaagtcagttctcctgaacctggaagactgcccgaattgaagttcacgattattaatgcattcaatgctggtgtctgcgctgttcgactttgtaacgtcgcatcatatttccggaaagtcggagacgagggtctcaaattggacatctcagagatctgggatatgtatactacgaagattgagcgtcctgcctttggagattctgtgtatgtttcacatgaaaaaggcatcgcagccggagatacagcaacgggagacttcccaaagtggtatgaggccaatatccaggccaagacgttttgtaatgcgttcaaggagaacagtcagctggagtttggagagcgagccaagtggactcccgaagatctcatgaatacgaacgccctggacggtcttgtcagagctgcagtcgacatggtccagagaatggatggcgtgggatactggaacaacaatggctttgaggaagtttggcaaaaactcactcgtcctcccaagaatcgcctccagaacaaatattggtag

SEQ ID NO: 23953 - protein, 1072 aa, Muscodor strobelii
  misc_feature: SGI Peptide ID NO. 568159
  misc_feature (699)..(1052): NCBI GI: 256735302 Blast Desc: NECHADRAFT_74988 [Nectria haematococca mpVI 77-13-4]
  misc_feature (652)..(1066): NCBI GI: 116182330 Blast Desc: CHGG_01793 [Chaetomium globosum CBS 148.51] gi|88186090|gb|EAQ93558.1| CHGG_01793 [Chaetomium globosum CBS 148.51]
  misc_feature (784)..(1072): NCBI GI: 145614746 Blast Desc: [Magnaporthe grisea 70-15] gi|145021632|gb|EDK05761.1| [Magnaporthe grisea 70-15]
  misc_feature (716)..(1061): NCBI GI: 171695282 Blast Desc: protein product [Podospora anserina] gi|170947883|emb|CAP60047.1| protein product [Podospora anserina]
  misc_feature (713)..(1051): NCBI GI: 46105997 Blast Desc: FG00403.1 [Gibberella zeae PH-1]
  misc_feature (714)..(1049): NCBI GI: 154308942 Blast Desc: [Botryotinia fuckeliana B05.10] gi|150852625|gb|EDN27817.1| [Botryotinia fuckeliana B05.10]
  misc_feature (714)..(1049): NCBI GI: 156063142 Blast Desc: SS1G_01687 [Sclerotinia sclerotiorum 1980] gi|154697023|gb|EDN96761.1| SS1G_01687 [Sclerotinia sclerotiorum 1980]
  misc_feature (710)..(1071): NCBI GI: 238845126 Blast Desc: conserved [Microsporum canis CBS 113480]
  misc_feature (715)..(1051): NCBI GI: 240111574 Blast Desc: CPC735_074090 [Coccidioides posadasii C735 delta SOWgp]
MPLPGAVRLGQKGYEVYWLGRASNDAVGRSWAMRATGGSAEPSTTEIFVNSHWALHIEGLNKLYESLASNAKGAEISYIVERAAFKIKSLPGEEPELISELHSTLSELVSNADKAVGVPVPSSYHVVANLIPKSNLVMPIEDWLSNVTITADIREAYQRYTYPICIALYEIRETWMLDEELPQKGITTETFLPQHAQSEIERLTSTQLVRSCDGRTVYIGARAKEEAIRAMIKLYNIAECFLAAHKNRHNEMAIVLHNDRDRSQIGEYRYVKDGNAFLLKTFVLDSTYGDKEKSYRELFQRAVIVRMVSKDSPCTPVPSLEGRISPAVERRNSTEQWEPFVDWKYKAKARVLPSAQPLATLKAAASQPSTSQKLLNMQQWVSGVPSIKSQGSQAVSPQIRQTSRSLSSTTFNSDRGVKTGTPRQESSKSGSLKQLVVQQESVGLESTHRRAINQEDIRDEQTQAARLHTELMDSGRVKPEPVTQGPQHSERGKSLLREELIGNRSTEQESVQREKTRTTGLLQEAMEVKPAHEQRANDLPILTRKPSTMRTESDPFSSLWTTAVTSHTGDPSRKVSNTRIDPRVQTQDEKQSRSYHTTMNQQAPSRRDKKPKPVKLDLSGRAKTESVTSQASRTVSPSRTMAQVAGSGVSQANSQISSSRNVAQVASYGMTTGDSQISSSPTIAQVTSYGVIQGNNPSAAPGVASYYPDLDPGMVQRLKNLLAQVLTPFQLSQGQFELRVELGRLLFLNVNPKKIQLWEGDEEERHYEIGRIIDDCSTKYRPAFTRVLSGLGADANFFSQIRDDAGDIIWKPIPNSRKTFYQFQCCAKFEHSGGEWAAFWIDVDADDFTFKIRDDNAERRIYGVHCTKRAWDFRLVLTGQQDLTNTCESFAKSLIDSLQVSSPEPGRLPELKFTIINAFNAGVCAVRLCNVASYFRKVGDEGLKLDISEIWDMYTTKIERPAFGDSVYVSHEKGIAAGDTATGDFPKWYEANIQAKTFCNAFKENSQLEFGERAKWTPEDLMNTNALDGLVRAAVDMVQRMDGVGYWNNNGFEEVWQKLTRPPKNRLQNKYW

SEQ ID NO: 23954 - DNA, 1170 bp, Muscodor strobelii
  misc_feature: SGI cDNA ID NO. 568160
  misc_feature: Encodes the peptide sequence at SEQ ID NO 23955
atgaattcgacactctccagtgctgcattccgtcacaactcgcgaccctcccagaacaccccctccaccatccggacggtcccgagttttgacaactcttctgacacatcatactccgaatcacgatctgcgcgaaacaaccgcctctcgagctccgtcaatagcagtgtctctgctgcttcttttgcttcccactcgccgcaaccgcccagctcctccgccccgagattacatccacagtcttccaactccagcttgagagattcccatcccattgctgctcaaatgtcatcgggtggtggtacccctcggggtaagcaaaatggagtagataattctaattctcttcaagtaccggattcatcacaaagcgatggccgtgacttcgcccgagagggctcgccgcagtgggatggcgccgttggcaaggccggcctcggaaagaccggaagagttatcaataagctagtatccgacaacgaggctctaaaacgagagctcaagatagagcaattaaaggcagacgatttcaagcaggcagcaagactcgttgaagacaagatggagcgcatggtacaggactacgagaagcgattactggaggctaacatcaccgcaactcttcttagtcggaaagagcgccaggtagaagctctgcaggtttccgtggacttggagaaacagcgaaccgccgatgcccaggagaaagagcgaacttggagaggcgagatggagactacacgccgcgatgccaagatccaggttgaggaggccactacacatgctgcgcttaaagagagccagtacaacacaatctcgtcacattggaaggaccagggcgcagaagtcaagcgcgcaatgactactatgagtggacgtatcgaggagttggtcggagagagagccaaggacgatgagaagatcggtactttacgagacctatgcgaccagcaagatggaaacattagggacttacgtcagcagaaagaggatatcgcacggcagttcgaaacctataagcgagagcaggaagcagcattgcgctcgatcaaggagaacgcccgcaagagagaggaggaacaaatgaagacgatcgaggagacgaaggaggtgctgcataagttgaaatgggcgcttaatgtcaagaacaacgtcaccggcgcaaagtga

SEQ ID NO: 23955 - protein, 389 aa, Muscodor strobelii
  misc_feature: SGI Peptide ID NO. 568160
  misc_feature (15)..(389): NCBI GI: 256735303 Blast Desc: NECHADRAFT_74989 [Nectria haematococca mpVI 77-13-4]
  misc_feature (136)..(389): NCBI GI: 46105969 Blast Desc: FG00402.1 [Gibberella zeae PH-1]
  misc_feature (22)..(389): NCBI GI: 116182332 Blast Desc: CHGG_01794 [Chaetomium globosum CBS 148.51] gi|88186091|gb|EAQ93559.1| CHGG_01794 [Chaetomium globosum CBS 148.51]
  misc_feature (22)..(389): NCBI GI: 145614742 Blast Desc: MGG_10821 [Magnaporthe grisea 70-15] gi|145021630|gb|EDK05759.1| MGG_10821 [Magnaporthe grisea 70-15]
  misc_feature (137)..(389): NCBI GI: 85091433 Blast Desc: NCU09127 [Neurospora crassa OR74A] gi|28920290|gb|EAA29663.1| conserved [Neurospora crassa OR74A]
  misc_feature (133)..(388): NCBI GI: 261357604 Blast Desc: conserved [Verticillium albo-atrum VaMs.102]
  misc_feature (22)..(389): NCBI GI: 171695280 Blast Desc: protein product [Podospora anserina] gi|170947882|emb|CAP60046.1| protein product [Podospora anserina]
  misc_feature (13)..(388): NCBI GI: 154308944 Blast Desc: BC1G_08000 [Botryotinia fuckeliana B05.10] gi|150852626|gb|EDN27818.1| BC1G_08000 [Botryotinia fuckeliana B05.10]
  misc_feature (113)..(388): NCBI GI: 156063146 Blast Desc: SS1G_01689 [Sclerotinia sclerotiorum 1980] gi|154697025|gb|EDN96763.1| SS1G_01689 [Sclerotinia sclerotiorum 1980]
  misc_feature (134)..(389): NCBI GI: 239607709 Blast Desc: conserved [Ajellomyces dermatitidis ER-3]
MNSTLSSAAFRHNSRPSQNTPSTIRTVPSFDNSSDTSYSESRSARNNRLSSSVNSSVSAASFASHSPQPPSSSAPRLHPQSSNSSLRDSHPIAAQMSSGGGTPRGKQNGVDNSNSLQVPDSSQSDGRDFAREGSPQWDGAVGKAGLGKTGRVINKLVSDNEALKRELKIEQLKADDFKQAARLVEDKMERMVQDYEKRLLEANITATLLSRKERQVEALQVSVDLEKQRTADAQEKERTWRGEMETTRRDAKIQVEEATTHAALKESQYNTISSHWKDQGAEVKRAMTTMSGRIEELVGERAKDDEKIGTLRDLCDQQDGNIRDLRQQKEDIARQFETYKREQEAALRSIKENARKREEEQMKTIEETKEVLHKLKWALNVKNNVTGAK

SEQ ID NO: 23956 - DNA, 3080 bp, Muscodor strobelii
  misc_feature: SGI EST ID NO. CUFF.56361.0
  misc_feature: Variant of the nucleotide sequence at SEQ ID NO 23954
tgaaattggcgaccatcaacatcaacaatgcaaaccgacgtcgtggttctgcctctgcctcgccctcaccacacagacacacacctctcgagccaaccctggccgtttacaccccaagcccgcctgcccggagaacatggggtctgcctgtcccagcgagttctcccacacgcggcgcatcctgagcactgtcatacacgtatttccgtagaaacaaaagaaaacagagtcttcgttcctccaagacatcatcacatgattacaacactcctacgatcgctatcttgactacatacactgcagacttctactctctattgtctatcttgccttgcgttaccctctacggattcaatctttcaatttcgacttcgccccgtcttacataattgggttcgtcttaccgttcctccattgaaacggcattcaagtactccattttggccccctttgcgagcgatcaacaactttggcgactgcacagtttcgcgatcattcgaagctgtacctcgatatataccacgtagccagaccaacgccgctctctaccaactcatctgttgcgtaaatgccgagtcgattgcagaaaagtcgcccaaaacgtacctctactagttctataccaagtgatcataaccaagagaacaagataccgacgtacccatatgccgtattggaccaagcccccaagtcaaaacctgcacctgcttcgaagggcgtcatgaattcgacactctccagtgctgcattccgtcacaactcgcgaccctcccagaacaccccctccaccatccggacggtcccgagttttgacaactcttctgacacatcatactccgaatcacgatctgcgcgaaacaaccgcctctcgagctccgtcaatagcagtgtctctgctgcttcttttgcttcccactcgccgcaaccgcccagctcctccgccccgagattacatccacagtcttccaactccagcttgagagattcccatcccattgctgctcaaatgtcatcgggtggtggtacccctcggggtaagcaaaatggagtagataattctaattctcttcaagtaccggattcatcacaaagcgatggccgtgacttcgcccgagagggctcgccgcagtgggatggcgccgttggcaaggccggcctcggaaagaccggaagagttatcaataagctagtatccgacaacgaggctctaaaacgagagctcaagatagagcaattaaaggcagacgatttcaagcaggcagcaagactcgttgaagacaagatggagcgcatggtacaggactacgagaagcgattactggaggctaacatcaccgcaactcttcttagtcggaaagagcgccaggtagaagctctgcaggtttccgtggacttggagaaacagcgaaccgccgatgcccaggagaaagagcgaacttggagaggcgagatggagactacacgccgcgatgccaagatccaggttgaggaggccactacacatgctgcgcttaaagagagccagtacaacacaatctcgtcacattggaaggaccagggcgcagaagtcaagcgcgcaatgactactatgagtggacgtatcgaggagttggtcggagagagagccaaggacgatgagaagatcggtactttacgagacctatgcgaccagcaagatggaaacattagggacttacgtcagcagaaagaggatatcgcacggcagttcgaaacctataagcgagagcaggaagcagcattgcgctcgatcaaggagaacgcccgcaagagagaggaggaacaaatgaagacgatcgaggagacgaaggaggtgctgcataagttgaaatgggcgcttaatgtcaagaacaacgtcaccggcgcaaagtgaggatattagatgatggtggatcgcccacgtgatccgtcattccaccaggcaaatatcaacgtcgatggcaacggctccttacattcgcagcttcatgactattcatcacagctctcattactattatagatgggaaacatctttgccgcattaccgaacagatagacccagatcaaccctgggcttacaaagtcgatcaactttttcacctcctctttccctttgctcgaaggctctaaatcatggagcaagccacacaccgcatacacaacacacacgatcggcggatcaggaacggcgtttttgtaaggataaacgggacgaatttaatgacccatgggaggagaaaatacccctgcactttgagaataggttggcatagaccatggagaggaaagaatggcgggagagactggatacatgtttgactatcttggtcgtctgcatgtagcatagatagatagacggactaaaatggcatcatcgtctagatgtctgaaccggcatcatcccctagatgttgatgaggtcgattaaaagcaggaggatggtgataaatatgagagtgattggcatcgattgctcgattcatatctcagattcactgtggataagtaattttctaatatcgtgaagcaagcttggctgagaggggaggagaggaacaatcgtgggggctactactacgcgaaactaaaacacctgaaatgcaaccgtgattgtttcgaacttcgtgcatagctgggcatttggaccccaagcaattgccgacaatggtctgctgttgaagaaacggaaacatcgaccactttcggaaacccctatgtggtatagcaaggagattgggcttatcctgtaatttctgcgctctccctctgaaggagtcgcaccaatgagttcagatgagttggagccgattgaaactttacggtctctggctgtttgaccttggtctttagatagataagtaatgtgtcaatgatctttacatggtcgccagtgctttttgccgatgtagagaaaggcagggaagtgttgtgcgtcattgatccgagaaaaacactgcgagcgatgttggattgggttatggccgtagctgaggtcactcttgtatgtgacgtgccaatgagctacgatggattgaatggtatcgaaacattacggtctggactgggtctataggtgtcag

SEQ ID NO: 23957 - DNA, 2226 bp, Muscodor strobelii
  misc_feature: SGI cDNA ID NO. 568161
  misc_feature: Encodes the peptide sequence at SEQ ID NO 23958
atggcgtccgctgtgctgtctgtacctgaccagatacggcaactggaggacgcccgcaagctggtcttgaaggatgtctcgtattataaacaggtcatccaagctactctgcccatcgttgggccctcagcacagctcgagtttcgccgatggggttctgacttcctcgctgaagcctttgccacgcccgctctcccactccagacgaaggagttgcacttactaatggtcatcgacaccctgaagcagttggtggaggatccgaatcaggatgttcttgttctccgcagtgtcattcaagccgctgccagcatatacccgctcgctatgcgctggacaattaacaactcgtacgactcggtcacttgggaatgtatgactaccatcaagaagaggattagagacatatgggatacatctcctttgaccgtacggatatgctgcatcaagttcgcccagcgcctggtgctggcacacacatcaagcgcccaccccgactcaagacgtggtagcccgcttgacatttcgctcgacatggtgacaccgaaccatgccattctcgaccccgactcactcgaggccgaaggatcggcatatttggatagaatgctgagtgttttagaggacgagagcagtgatcccctacttgtcgatgcgacgttgaacacactgtccatcctagtccgcgcgaggccgaaaacctctgggcgcattgtgtcttgcatcttcaacttcaaccccttgcgactcgccaacagtcatccgctaccgccgaagaccaaagtccttgtcagatcgatggagaagacaactcgcatgctgcttattcatttatcaagacgggatcctaacaaccctcttgccggtcgaatgcagcaatatgtcgaacgccttatgagatcgcgagccgaaatcttcgacgagagccggaaacgccccatggttgagcctgctgccgttgtcgaagccaagcgacaacgtactgcagcagcaacgacgtctgctcaaccacagatcgagatcacacctctaaaacccggcgccaacacacttgccgaggtatttacgttcacttccaacgaaggactgcaaaagttctctgtcagcgatgccattcctgctcctattgccgccaagatcagcgttcggacaattgccaaattggatgaacagatattggaacgggccatcaatggcgtccgcgagcgtttggcagttttgcaccaggccggccagaaggctgcgaaccccgaaactgcaccattggacgtggaggaagacgatgacgactacgagcctgactatcatacagccgaggattctgaacagcttttgaacaagctcgactcatcaccaaccgaagaccgacgtgagctacaaccgtcagcgctgggtgccttggcactcccgagcttcaaacttccggcacctccacaactgaatcccgaacaagcagccaaggtcagtcaggctcttgtagcgcgtgtgttcgacaccgcaaaaatgcttgaagaccccgcgacgaagaagacgaaagcgggtatgaacagactggctgccagttcttatgatcgcgagtcgtggatcaccgtcctctcacgtctggccacacgaacgtcatccggccttgatcatgtcactatcaaagcagaagatagtgcgctttatatgcccaaagtcaacatgagcgatactatacgagagacgctgtataattatatcctcgaggacttccgcaaacgaatcgatgtcgccatttcttggttgagcgaagagtggtacaaggaacaaatacaagctcgatttgcttcatctcctgaccagacacatgatgcgccagccaacttcgagaaatgggccgtccgcctcatcgatgcattcttcccatacctacacgggcaagatcgagttttgacacgtttcctcggagagctgccgcaactcacggccagcatattcgcgagggtgaagacgttatgccgagaccccagtctggttaaccttgcccttactagcttattctacttggtcatgttccgtccgccggtgcgggaaatggcactcgacacaattcaagatatatggactgattacgacgatgcgcggccagtcgctgccaagtatcttcagagatggcgacccggctttgtggaggcccaacagcagaatgccgttggaaatggaacacccatggaggcaaatggcacagcagcaaccgttacttga

SEQ ID NO: 23958 - protein, 741 aa, Muscodor strobelii
  misc_feature: SGI Peptide ID NO. 568161
  misc_feature (4)..(718): NCBI GI: 154308952 Blast Desc: BC1G_08004 [Botryotinia fuckeliana B05.10] gi|150852630|gb|EDN27822.1| BC1G_08004 [Botryotinia fuckeliana B05.10]
  misc_feature (6)..(724): NCBI GI: 116182334 Blast Desc: CHGG_01795 [Chaetomium globosum CBS 148.51] gi|88186092|gb|EAQ93560.1| CHGG_01795 [Chaetomium globosum CBS 148.51]
  misc_feature (1)..(722): NCBI GI: 171695278 Blast Desc: protein product [Podospora anserina] gi|170947881|emb|CAP60045.1| protein product [Podospora anserina]
  misc_feature (3)..(738): NCBI GI: 256735304 Blast Desc: NECHADRAFT_31391 [Nectria haematococca mpVI 77-13-4]
  misc_feature (1)..(720): NCBI GI: 145614738 Blast Desc: MGG_10820 [Magnaporthe grisea 70-15] gi|145021628|gb|EDK05757.1| MGG_10820 [Magnaporthe grisea 70-15]
  misc_feature (1)..(731): NCBI GI: 225561874 Blast Desc: conserved [Ajellomyces capsulatus G186AR]
  misc_feature (1)..(741): NCBI GI: 154283515 Blast Desc: conserved [Ajellomyces capsulatus NAm1] gi|150410733|gb|EDN06121.1| conserved [Ajellomyces capsulatus NAm1]
  misc_feature (1)..(741): NCBI GI: 239607825 Blast Desc: mRNA cleavage and polyadenylation specificity factor complex subunit [Ajellomyces dermatitidis ER-3]
  misc_feature (1)..(721): NCBI GI: 238508427 Blast Desc: mRNA cleavage and polyadenylation specificity factor complex subunit [Aspergillus flavus NRRL3357] gi|220688926|gb|EED45278.1| mRNA cleavage and polyadenylation
  misc_feature (1)..(717): NCBI GI: 226278101 Blast Desc: conserved [Paracoccidioides brasiliensis Pb01]
MASAVLSVPDQIRQLEDARKLVLKDVSYYKQVIQATLPIVGPSAQLEFRRWGSDFLAEAFATPALPLQTKELHLLMVIDTLKQLVEDPNQDVLVLRSVIQAAASIYPLAMRWTINNSYDSVTWECMTTIKKRIRDIWDTSPLTVRICCIKFAQRLVLAHTSSAHPDSRRGSPLDISLDMVTPNHAILDPDSLEAEGSAYLDRMLSVLEDESSDPLLVDATLNTLSILVRARPKTSGRIVSCIFNFNPLRLANSHPLPPKTKVLVRSMEKTTRMLLIHLSRRDPNNPLAGRMQQYVERLMRSRAEIFDESRKRPMVEPAAVVEAKRQRTAAATTSAQPQIEITPLKPGANTLAEVFTFTSNEGLQKFSVSDAIPAPIAAKISVRTIAKLDEQILERAINGVRERLAVLHQAGQKAANPETAPLDVEEDDDDYEPDYHTAEDSEQLLNKLDSSPTEDRRELQPSALGALALPSFKLPAPPQLNPEQAAKVSQALVARVFDTAKMLEDPATKKTKAGMNRLAASSYDRESWITVLSRLATRTSSGLDHVTIKAEDSALYMPKVNMSDTIRETLYNYILEDFRKRIDVAISWLSEEWYKEQIQARFASSPDQTHDAPANFEKWAVRLIDAFFPYLHGQDRVLTRFLGELPQLTASIFARVKTLCRDPSLVNLALTSLFYLVMFRPPVREMALDTIQDIWTDYDDARPVAAKYLQRWRPGFVEAQQQNAVGNGTPMEANGTAATVT

SEQ ID NO: 23959 - DNA, 3206 bp, Muscodor strobelii
  misc_feature: SGI EST ID NO. CUFF.56367.0
  misc_feature: Variant of the nucleotide sequence at SEQ ID NO 23957
agcttcctgagtgtcaagcgcgattctgtaattctcccttcacgcaaacgccgcctccattccttctagtaactgcccattatctcttcaatgtgtgtcgctgcgttctgcgcgcactacaacgctattgtcggcaggaagaccaggaaccgccgaaggtcaacttcgtcacacatctgtgaacagcatcaacaacaacaactgaccataacccccctctttggatgttagctagcagcacgccatacacacctgacgactcaagtcaatggtcaattgcccagattcaacttgaatctttgtctttaaagcgaaccacaccctgtcattgtttccacccgaatcatctgcaccttcccaactctaccatctgccatagtccccccattgtgcaagaacgcctgcctttgcgcttgaccaacacagagtatcatccatagtttgtagatctgtgcggcatcttggccggtctgtattcatcctgactgccgcccaacatggcgtccgctgtgctgtctgtacctgaccagatacggcaactggaggacgcccgcaagctggtcttgaaggatgtctcgtattataaacaggtcatccaagctactctgcccatcgttgggccctcagcacagctcgagtttcgccgatggggttctgacttcctcgctgaagcctttgccacgcccgctctcccactccagacgaaggagttgcacttactaatggtcatcgacaccctgaagcagttggtggaggatccgaatcaggatgttcttgttctccgcagtgtcattcaagccgctgccagcatatacccgctcgctatgcgctggacaattaacaactcgtacgactcggtcacttgggaatgtatgactaccatcaagaagaggattagagacatatgggatacatctcctttgaccgtacggatatgctgcatcaagttcgcccagcgcctggtgctggcacacacatcaagcgcccaccccgactcaagacgtggtagcccgcttgacatttcgctcgacatggtgacaccgaaccatgccattctcgaccccgactcactcgaggccgaaggatcggcatatttggatagaatgctgagtgttttagaggacgagagcagtgatcccctacttgtcgatgcgacgttgaacacactgtccatcctagtccgcgcgaggccgaaaacctctgggcgcattgtgtcttgcatcttcaacttcaaccccttgcgactcgccaacagtcatccgctaccgccgaagaccaaagtccttgtcagatcgatggagaagacaactcgcatgctgcttattcatttatcaagacgggatcctaacaaccctcttgccggtcgaatgcagcaatatgtcgaacgccttatgagatcgcgagccgaaatcttcgacgagagccggaaacgccccatggttgagcctgctgccgttgtcgaagccaagcgacaacgtactgcagcagcaacgacgtctgctcaaccacagatcgagatcacacctctaaaacccggcgccaacacacttgccgaggtatttacgttcacttccaacgaaggactgcaaaagttctctgtcagcgatgccattcctgctcctattgccgccaagatcagcgttcggacaattgccaaattggatgaacagatattggaacgggccatcaatggcgtccgcgagcgtttggcagttttgcaccaggccggccagaaggctgcgaaccccgaaactgcaccattggacgtggaggaagacgatgacgactacgagcctgactatcatacagccgaggattctgaacagcttttgaacaagctcgactcatcaccaaccgaagaccgacgtgagctacaaccgtcagcgctgggtgccttggcactcccgagcttcaaacttccggcacctccacaactgaatcccgaacaagcagccaaggtcagtcaggctcttgtagcgcgtgtgttcgacaccgcaaaaatgcttgaagaccccgcgacgaagaagacgaaagcgggtatgaacagactggctgccagttcttatgatcgcgagtcgtggatcaccgtcctctcacgtctggccacacgaacgtcatccggccttgatcatgtcactatcaaagcagaagatagtgcgctttatatgcccaaagtcaacatgagcgatactatacgagagacgctgtataattatatcctcgaggacttccgcaaacgaatcgatgtcgccatttcttggttgagcgaagagtggtacaaggaacaaatacaagctcgatttgcttcatctcctgaccagacacatgatgcgccagccaacttcgagaaatgggccgtccgcctcatcgatgcattcttcccatacctacacgggcaagatcgagttttgacacgtttcctcggagagctgccgcaactcacggccagcatattcgcgagggtgaagacgttatgccgagaccccagtctggttaaccttgcccttactagcttattctacttggtcatgttccgtccgccggtgcgggaaatggcactcgacacaattcaagatatatggactgattacgacgatgcgcggccagtcgctgccaagtatcttcagagatggcgacccggctttgtggaggcccaacagcagaatgccgttggaaatggaacacccatggaggcaaatggcacagcagcaaccgttacttgatacctcaagattcgacgccggtgccctaggctcactgacattctctgtattatatggctttgcattggctgaagtagattatgcttgcccccagttgagatgatattgctcagaggtgtgcttcacatttgacagcggctatttggacgaggcgtttaggatagggatctgtctgtacgatataccacttcgcacgggggaatgcgcaaaatgcgttcatatttgatggacgcgacgaattggtcgggatagccacgtttagatgatatgcatagggacatggcaaggcctcactcatatttgcatgtaaggtcgacctgcacatggttccaggtatactgcacaattcagatagtctacaagatgagagcgtgtgtttcccgctggaaataactacgcatattaagataaggaatacccgcgtctctttagtgatgacggtaaaccctacattctgtttgtttactgatgtcttgttgtttc

SEQ ID NO: 23960 - DNA, 213 bp, Muscodor strobelii
  misc_feature: SGI cDNA ID NO. 568162
  misc_feature: Encodes the peptide sequence at SEQ ID NO 23961
atgcctcaaggattcggaaactcatcctactacgcctcctcccgccagtcgcctgccttgatccgcgctcggaagccctacatcttcaagaatgcagtggttggcgccatcaccgccggtttcgccataggagtttatgtatacacaattcgcgctattggtcaggatgaattcgacgatgtcaaggtccccgatgctccggtcaagaaatag

SEQ ID NO: 23961 - protein, 70 aa, Muscodor strobelii
  misc_feature: SGI Peptide ID NO. 568162
  misc_feature (1)..(70): NCBI GI: 145253286 Blast Desc: An16g08580 [Aspergillus niger] gi|134083718|emb|CAK42957.1| protein product [Aspergillus niger]
  misc_feature (1)..(67): NCBI GI: 259486769 Blast Desc: TPA: conserved [Aspergillus nidulans FGSC A4]
  misc_feature (1)..(69): NCBI GI: 119484174 Blast Desc: NFIA_097160 [Neosartorya fischeri NRRL 181] gi|119410146|gb|EAW20093.1| conserved [Neosartorya fischeri NRRL 181]
  misc_feature (4)..(67): NCBI GI: 145614736 Blast Desc: MGG_10819 [Magnaporthe grisea 70-15] gi|145021627|gb|EDK05756.1| MGG_10819 [Magnaporthe grisea 70-15]
  misc_feature (1)..(69): NCBI GI: 121719701 Blast Desc: conserved [Aspergillus clavatus NRRL 1] gi|119404761|gb|EAW15123.1| conserved [Aspergillus clavatus NRRL 1]
  misc_feature (4)..(69): NCBI GI: 171695276 Blast Desc: protein product [Podospora anserina] gi|170947880|emb|CAP60044.1| protein product [Podospora anserina]
  misc_feature (1)..(70): NCBI GI: 154308954 Blast Desc: BC1G_08005 [Botryotinia fuckeliana B05.10] gi|150852631|gb|EDN27823.1| BC1G_08005 [Botryotinia fuckeliana B05.10]
  misc_feature (1)..(69): NCBI GI: 238508425 Blast Desc: conserved [Aspergillus flavus NRRL3357] gi|220688925|gb|EED45277.1| conserved [Aspergillus flavus NRRL3357]
  misc_feature (7)..(70): NCBI GI: 156063152 Blast Desc: [Sclerotinia sclerotiorum 1980] gi|154697028|gb|EDN96766.1| [Sclerotinia sclerotiorum 1980]
  misc_feature (6)..(67): NCBI GI: 261357608 Blast Desc: conserved [Verticillium albo-atrum VaMs.102]
MPQGFGNSSYYASSRQSPALIRARKPYIFKNAVVGAITAGFAIGVYVYTIRAIGQDEFDDVKVPDAPVKK

SEQ ID NO: 23962 - DNA, 3512 bp, Muscodor strobelii
  misc_feature: SGI EST ID NO. CUFF.56623.0
  misc_feature: Variant of the nucleotide sequence at SEQ ID NO 23960
ccaagccttaccaggtaggtagctctctagtggcgcaaagagcatcaattcatgatatgatatcgaaccaccttgtcgtcggccttctatccgccgactagaacctgccatcctcaactccaaattcacctgtcgcataaggcccacgcgggcacagatccagtcaagatgcctcaaggattcggaaactcatcctactacgcctcctcccgccagtcgcctgccttgatccgcgctcggaagccctacatcttcaagaatgcagtggttggcgccatcaccgccggtttcgccataggagtttatgtatacacaattcgcgctattggtcaggatgaattcgacgatgtcaaggtccccgatgctccggtcaagaaatagatagatcacgcctaggccgagaaagggggagcgaggggatatagtgttggacacggagatgcatcttgcggcgtattaggagcattagggtcttgtctattatcattccacatactgactgtacaataagtgaatactgtacatctaacatttaagcacaagaatagcaaagtgtggactccgattcgaattcaatccatttattcgaacctttggcttccaaaggccgttgccctacaattgtagtcgtggtatcttccaacaaaagcctacgatttacaacagtgagaacagccccttcctcttccccttctccatcatgccccaagcaaatgtcttgacgcctcgctataaataagagaacgcctatagacccttatttaattgttggtagtagtagaattatcctccatggaagcaagcaagcaacgccatgcaacgcctaaatgcccgtctgtagaatgggtccagacgatctcgtaacgcccgatgcaaaaagtgataatgtacgtggtatcatccctgtgagcccatttcgcagtctatacaaatgcaaaacgcccgccgtcaaagtcggattcatcaaatcatcagtgtatgtccctcgcgatcagctcggaggcaggaaagaggccgcgccctcgccatcttgcaagttggctgtaatcttcccgcctctcttagtctgttgtagaagactcgcagctcttttgacgtctggcgacgtggatatcggcctgtggacatgcttggatgatttgccgtggccgttgaatggatgatcattgaagggttgagagcctgacgatatagaaaatgggttcggctgatgcgaggtgcgccgcggcgctgctgatgtgcttgataacaatggcgagtcttgctgcccggaatgctgtctctgcagcagatgtgcattagacgggtggtgagggttagcccacggtgtctgtgcaagaaactgctcgccagctggtccaattgggtccacgaggggtacgccgccgtaatccgcaaagctcggtctttgaagtgcctgctcatgctcttgatccagccgggatggttgtcgattcctctgattgcctcacattagtaaatcgtcctagcagataatagaccgcaggttgtgcttgatcacttacatccatagcgacgaagtcatcctccatttcctgatccgtagctccgagcatatctggagctgccggcatgccttcgtacttagcgacacctgatagaatcgagacttctttgttgtaagcgagggcattgcggatcctctgagcttgtgtcttgggaaatcggatgccaaaatcgggcacgacattggcatgtttccgtcgttcttgttggatcgcgtgccaatgctggccaagctcagccaagatcctttccctggactctctcactgcctggaaatattgagagtgtatctgagcacgtcttgcgactgcccaccgctccgacgtctcgagactgagcttgagctccatgtcagccacgcgaatcctttcgtccctccgagcgtcaatgcattgcatcatggcaaggtattccgggtgggtggggatgtcagctttcagcatttcttcttctttgttcaactgctcgagtctctcttcgtgcattctgtaggttccgtcagcgattgggaggaagcacgagtgcaggggtcgagggacgaacctgtcgcggaacatggagaaacgcttttctatatcttggagttggtcgaaagcggccttttttctttccactgtcgcggtagctgtgttagcgttgttcttccaatgtgttagacagagacatcgcatacgttcttcttcgttcttatgtattgcttctgcctcgccgtccgcctccccttccatgtgctcatcttcgcctgtatgatgctcttcctcttctggcgcggcaccctctactccatctatttgaggtttgtcggactcggtcgagtcttcggtgtccttgagcttcctggagctacttcgcgtctgtttcttagggctctttacctcctcggccggcggctcgggagctggctcttcggcttcggcttcgtcgtcgaccccggcggtcggaacagcttcgtcggcggaatgctccccgctgttcgtggtgagcgtagggtcctcctcatcggccattgcggtgtcgccgtctacggtgggttgattaggtgtggggacagattcggtgcgcttccgcgagggctggtcggtgtcaggggcctcagctggcacagaggacctctttcgcttgcgactttcggcctcctggttcgcagcttcggcgagaatgtcgagtgtgggcgattggagcttcggcatgggttctgggactggcgcaggcgggctggaggccatagagacgtcctcatcggagaggggtgtgtcggggtcgtcattgctgtccgagggcggcttgtcctggtgtcgcagcttgctcggagtgtgctcgaagaccgcggtgtcagcggcgtcgttaaggacgacgtctttgtggcgggtgggttgttggggtgtgtcgtagaggcgctccgtctcggcctcggtgtcggcggcgtcagaatggtcatcggcgatgctcatgtcgtcattgtcgtggtgggtagagttctgactggtccgcagctcatccgggtcgtcgtctttgtcttcgacgtcgctcaagggactggagccatcgtcatcggacaacggctcgatctgcgggggagggatggagagcgccggaggcgccgtgtcgccggtggccattgttggaaccaaaatatgtgtacgtatgtgatttaggtagtgagagtagactcaagaggcggcgaccgaagactgacggtcgcggagctgttgttgtggtcaaagtgttgagggtaataggttgggatttggagttttcagaacaagtcgatgtgactggaaacaaggactctcgacggtaataaacatgtaaaggggagttcgtgcaaaggaatacgagggtgcagaatgcaggagaacgagcggctgaacaagtttattgtcttcgtgatcaaggagaagcagtggtcgtgggcgaggtgtgggaaaagagaagcagaccagagcagcagaagagggatcacgctgcgctgcgctcgcaaccgg

SEQ ID NO: 23963 - DNA, 1971 bp, Muscodor strobelii
  misc_feature: SGI cDNA ID NO. 568163
  misc_feature: Reduced expression when VOC is produced
  misc_feature: Encodes the peptide sequence at SEQ ID NO 23964
atggccaccggcgacacggcgcctccggcgctctccatccctcccccgcagatcgagccgttgtccgatgacgatggctccagtcccttgagcgacgtcgaagacaaagacgacgacccggatgagctgcggaccagtcagaactctacccaccacgacaatgacgacatgagcatcgccgatgaccattctgacgccgccgacaccgaggccgagacggagcgcctctacgacacaccccaacaacccacccgccacaaagacgtcgtccttaacgacgccgctgacaccgcggtcttcgagcacactccgagcaagctgcgacaccaggacaagccgccctcggacagcaatgacgaccccgacacacccctctccgatgaggacgtctctatggcctccagcccgcctgcgccagtcccagaacccatgccgaagctccaatcgcccacactcgacattctcgccgaagctgcgaaccaggaggccgaaagtcgcaagcgaaagaggtcctctgtgccagctgaggcccctgacaccgaccagccctcgcggaagcgcaccgaatctgtccccacacctaatcaacccaccgtagacggcgacaccgcaatggccgatgaggaggaccctacgctcaccacgaacagcggggagcattccgccgacgaagctgttccgaccgccggggtcgacgacgaagccgaagccgaagagccagctcccgagccgccggccgaggaggtaaagagccctaagaaacagacgcgaagtagctccaggaagctcaaggacaccgaagactcgaccgagtccgacaaacctcaaatagatggagtagagggtgccgcgccagaagaggaagagcatcatacaggcgaagatgagcacatggaaggggaggcggacggcgaggcagaagcaatacataagaacgaagaagaactggaaagaaaaaaggccgctttcgaccaactccaagatatagaaaagcgtttctccatgttccgcgacagaatgcacgaagagagactcgagcagttgaacaaagaagaagaaatgctgaaagctgacatccccacccacccggaataccttgccatgatgcaatgcattgacgctcggagggacgaaaggattcgcgtggctgacatggagctcaagctcagtctcgagacgtcggagcggtgggcagtcgcaagacgtgctcagatacactctcaatatttccaggcagtgagagagtccagggaaaggatcttggctgagcttggccagcattggcacgcgatccaacaagaacgacggaaacatgccaatgtcgtgcccgattttggcatccgatttcccaagacacaagctcagaggatccgcaatgccctcgcttacaacaaagaagtctcgattctatcaggtgtcgctaagtacgaaggcatgccggcagctccagatatgctcggagctacggatcaggaaatggaggatgacttcgtcgctatggataggaatcgacaaccatcccggctggatcaagagcatgagcaggcacttcaaagaccgagctttgcggattacggcggcgtacccctcgtggacccaattggaccagctggcgagcagtttcttgcacagacaccgtgggctaaccctcaccacccgtctaatgcacatctgctgcagagacagcattccgggcagcaagactcgccattgttatcaagcacatcagcagcgccgcggcgcacctcgcatcagccgaacccattttctatatcgtcaggctctcaacccttcaatgatcatccattcaacggccacggcaaatcatccaagcatgtccacaggccgatatccacgtcgccagacgtcaaaagagctgcgagtcttctacaacagactaagagaggcgggaagattacagccaacttgcaagatggcgagggcgcggcctctttcctgcctccgagctga

SEQ ID NO: 23964 - protein, 656 aa, Muscodor strobelii
  misc_feature: SGI Peptide ID NO. 568163
  misc_feature (331)..(374): Pfam Id: PF08598 Pfam Desc: Sds3-like
  misc_feature (1)..(637): NCBI GI: 85091439 Blast Desc: NCU09130 [Neurospora crassa OR74A] gi|28920293|gb|EAA29666.1| [Neurospora crassa OR74A]
  misc_feature (30)..(599): NCBI GI: 116182338 Blast Desc: CHGG_01797 [Chaetomium globosum CBS 148.51] gi|88186094|gb|EAQ93562.1| CHGG_01797 [Chaetomium globosum CBS 148.51]
  misc_feature (1)..(610): NCBI GI: 171695274 Blast Desc: protein product [Podospora anserina] gi|170947879|emb|CAP60043.1| protein product [Podospora anserina]
  misc_feature (1)..(554): NCBI GI: 261357611 Blast Desc: conserved [Verticillium albo-atrum VaMs.102]
  misc_feature (56)..(557): NCBI GI: 39977477 Blast Desc: MGG_11064 [Magnaporthe grisea 70-15] gi|145021626|gb|EDK05755.1| MGG_11064 [Magnaporthe grisea 70-15]
  misc_feature (23)..(620): NCBI GI: 156063154 Blast Desc: SS1G_01693 [Sclerotinia sclerotiorum 1980] gi|154697029|gb|EDN96767.1| SS1G_01693 [Sclerotinia sclerotiorum 1980]
  misc_feature (1)..(501): NCBI GI: 256735305 Blast Desc: NECHADRAFT_90180 [Nectria haematococca mpVI 77-13-4]
  misc_feature (1)..(509): NCBI GI: 46105896 Blast Desc: FG00399.1 [Gibberella zeae PH-1]
  misc_feature (5)..(500): NCBI GI: 154308956 Blast Desc: BC1G_08006 [Botryotinia fuckeliana B05.10] gi|150852632|gb|EDN27824.1| BC1G_08006 [Botryotinia fuckeliana B05.10]
  misc_feature (24)..(555): NCBI GI: 189204101 Blast Desc: conserved [Pyrenophora tritici-repentis Pt-1C-BFP] gi|187985485|gb|EDU50973.1| conserved [Pyrenophora tritici-repentis Pt-1C-BFP]
  misc_feature: Useful for introducing or modulating the production of volatile compounds
MATGDTAPPALSIPPPQIEPLSDDDGSSPLSDVEDKDDDPDELRTSQNSTHHDNDDMSIADDHSDAADTEAETERLYDTPQQPTRHKDVVLNDAADTAVFEHTPSKLRHQDKPPSDSNDDPDTPLSDEDVSMASSPPAPVPEPMPKLQSPTLDILAEAANQEAESRKRKRSSVPAEAPDTDQPSRKRTESVPTPNQPTVDGDTAMADEEDPTLTTNSGEHSADEAVPTAGVDDEAEAEEPAPEPPAEEVKSPKKQTRSSSRKLKDTEDSTESDKPQIDGVEGAAPEEEEHHTGEDEHMEGEADGEAEAIHKNEEELERKKAAFDQLQDIEKRFSMFRDRMHEERLEQLNKEEEMLKADIPTHPEYLAMMQCIDARRDERIRVADMELKLSLETSERWAVARRAQIHSQYFQAVRESRERILAELGQHWHAIQQERRKHANVVPDFGIRFPKTQAQRIRNALAYNKEVSILSGVAKYEGMPAAPDMLGATDQEMEDDFVAMDRNRQPSRLDQEHEQALQRPSFADYGGVPLVDPIGPAGEQFLAQTPWANPHHPSNAHLLQRQHSGQQDSPLLSSTSAAPRRTSHQPNPFSISSGSQPFNDHPFNGHGKSSKHVHRPISTSPDVKRAASLLQQTKRGGKITANLQDGEGAASFLPPS

SEQ ID NO: 23965 - DNA, 3544 bp, Muscodor strobelii
  misc_feature: SGI EST ID NO. CUFF.56624.1
  misc_feature: Variant of the nucleotide sequence at SEQ ID NO 23963
ccggttgcgagcgcagcgcagcgtgatccctcttctgctgctctggtctgcttctcttttcccacacctcgcccacgaccactgcttctccttgatcacgaagacaataaacttgttcagccgctcgttctcctgcattctgcaccctcgtattcctttgcacgaactcccctttacatgtttattaccgtcgagagtccttgtttccagtcacatcgacttgttctgaaaactccaaatcccaacctattaccctcaacactttgaccacaacaacagctccgcgaccgtcagtcttcggtcgccgcctcttgagtctactctcactacctaaatcacatacgtacacatattttggttccaacaatggccaccggcgacacggcgcctccggcgctctccatccctcccccgcagatcgagccgttgtccgatgacgatggctccagtcccttgagcgacgtcgaagacaaagacgacgacccggatgagctgcggaccagtcagaactctacccaccacgacaatgacgacatgagcatcgccgatgaccattctgacgccgccgacaccgaggccgagacggagcgcctctacgacacaccccaacaacccacccgccacaaagacgtcgtccttaacgacgccgctgacaccgcggtcttcgagcacactccgagcaagctgcgacaccaggacaagccgccctcggacagcaatgacgaccccgacacacccctctccgatgaggacgtctctatggcctccagcccgcctgcgccagtcccagaacccatgccgaagctccaatcgcccacactcgacattctcgccgaagctgcgaaccaggaggccgaaagtcgcaagcgaaagaggtcctctgtgccagctgaggcccctgacaccgaccagccctcgcggaagcgcaccgaatctgtccccacacctaatcaacccaccgtagacggcgacaccgcaatggccgatgaggaggaccctacgctcaccacgaacagcggggagcattccgccgacgaagctgttccgaccgccggggtcgacgacgaagccgaagccgaagagccagctcccgagccgccggccgaggaggtaaagagccctaagaaacagacgcgaagtagctccaggaagctcaaggacaccgaagactcgaccgagtccgacaaacctcaaatagatggagtagagggtgccgcgccagaagaggaagagcatcatacaggcgaagatgagcacatggaaggggaggcggacggcgaggcagaagcaatacataagaacgaagaagaactggaaagaaaaaaggccgctttcgaccaactccaagatatagaaaagcgtttctccatgttccgcgacagaatgcacgaagagagactcgagcagttgaacaaagaagaagaaatgctgaaagctgacatccccacccacccggaataccttgccatgatgcaatgcattgacgctcggagggacgaaaggattcgcgtggctgacatggagctcaagctcagtctcgagacgtcggagcggtgggcagtcgcaagacgtgctcagatacactctcaatatttccaggcagtgagagagtccagggaaaggatcttggctgagcttggccagcattggcacgcgatccaacaagaacgacggaaacatgccaatgtcgtgcccgattttggcatccgatttcccaagacacaagctcagaggatccgcaatgccctcgcttacaacaaagaagtctcgattctatcaggtgtcgctaagtacgaaggcatgccggcagctccagatatgctcggagctacggatcaggaaatggaggatgacttcgtcgctatggataggaatcgacaaccatcccggctggatcaagagcatgagcaggcacttcaaagaccgagctttgcggattacggcggcgtacccctcgtggacccaattggaccagctggcgagcagtttcttgcacagacaccgtgggctaaccctcaccacccgtctaatgcacatctgctgcagagacagcattccgggcagcaagactcgccattgttatcaagcacatcagcagcgccgcggcgcacctcgcatcagccgaacccattttctatatcgtcaggctctcaacccttcaatgatcatccattcaacggccacggcaaatcatccaagcatgtccacaggccgatatccacgtcgccagacgtcaaaagagctgcgagtcttctacaacagactaagagaggcgggaagattacagccaacttgcaagatggcgagggcgcggcctctttcctgcctccgagctgatcgcgagggacatacactgatgatttgatgaatccgactttgacggcgggcgttttgcatttgtatagactgcgaaatgggctcacagggatgataccacgtacattatcactttttgcatcgggcgttacgagatcgtctggacccattctacagacgggcatttaggcgttgcatggcgttgcttgcttgcttccatggaggataattctactactaccaacaattaaataagggtctataggcgttctcttatttatagcgaggcgtcaagacatttgcttggggcatgatggagaaggggaagaggaaggggctgttctcactgttgtaaatcgtaggcttttgttggaagataccacgactacaattgtagggcaacggcctttggaagccaaaggttcgaataaatggattgaattcgaatcggagtccacactttgctattcttgtgcttaaatgttagatgtacagtattcacttattgtacagtcagtatgtggaatgataatagacaagaccctaatgctcctaatacgccgcaagatgcatctccgtgtccaacactatatcccctcgctccccctttctcggcctaggcgtgatctatctatttcttgaccggagcatcggggaccttgacatcgtcgaattcatcctgaccaatagcgcgaattgtgtatacatctacaattccagacacagtcagccaagttctgatatgtacgtgctgagctcacacatccggggtatgtcgcaattatcacaccgacatatggcatggaggagtgagatgtggctgcgcatatgcaggagatctagcgcagggtagacatacaaactcctatggcgaaaccggcggtgatggcgccaaccactgcattcttgaagatgtagggcttccgagcgcggatcaaggcaggcgactggcgggaggaggcgtagtaggatgagtttccgaatctgcaggtttatgatggcggttagtcgcttgactaggacaggatggagatgggaaagagaccgacccttgaggcatcttgactggatctgtgcccgcgtgggccttatgcgacaggtgaatttggagttgaggatggcaggttctagtcggcggatagaaggccgacgacaaggtggttcgatatcatatcatgaattgatgctctttgcgccactagagagctacctacctggtaaggcttgg

SEQ ID NO: 23966 - DNA, 1752 bp, Muscodor strobelii
  misc_feature: SGI cDNA ID NO. 568164
  misc_feature: Reduced expression when VOC is produced
  misc_feature: Encodes the peptide sequence at SEQ ID NO 23967
atgctcaggtcagctggggccatggcttgcccagcacgaaataggatggctaaaggaaaaggcggcctggcagcctccgccaaagctgtagaccccaccctggacgctctcttcgccagcagttctggaccagtcaaggctcctaccaaggaacgctatacggctctcgtgcccctgaaggaaaggaaacaggcagcacaaccggaagttacgacaaaagaagatggctccgatcccagtgaacccgaaaacgatgacgatgagaacgcggaagaagacgacgaggaattgagcgaactagacagcgatgaacaaattgaggacgagtctgatgccgagtctgatgccgaagagagcaatgaatctgagacggcagtggcagcacccaaaccgaaggagcgcaagagaaagcgaaaagacgagcacgacgatctcgaagataaatatatgcgaaagctagccgaagaggaagagagggagctgcgacaggagaagcgccgcaaaggagaagacggagagactgtcgagaacccagtgcacgagacggtagcaaaggcaaccgacgaagatgacgaagccgaggagacagttccagtccatgagtctctccagaagccagaggaacacgtcgacatcgaactagacaaagcgaaccgcacactattcctcggcaatgtctctacggaagctatttcatcttcaaaagccagaaagacacttataacccacctcgaatcatgcctctccgaactcgacgcggcgacgggtcctcacaagatagaatccatccgattccgctccaccgcattctccaccggctccatgccaaaacgcgcagccttcataaccaaatccctaatgtccaccaccacaaaatccaccaacgcctacgccgtcttcaccacgcccctcgcctcccgcacggcgctcaaggctctcaacggcacagtcgtactcgaccggcacatgcgcgtagacagcgtcgcccaccccgcagccatagcccacaggcgctgcgtattcgtagggaacctcggttttgtggatgacgagacagtagtcaacacgaacgcagagggcgaaacgacgacgaaaaaacgccacaaggtgcccagcgacacggaagaaggtctctggcgcatcttcggcgagcacgcggggaaagtggagagcgtccgcgtgccgagagatgagaagacgagaattggaaagggatttgcgtatgtgcagttctacgacgcgaatgatgtcgagtccgcgcttcttctcaacgagaagaagttcccgcccatgcttccgagacctctgcgtgtatcccgtgcgaaagacccgcggaagacgtctaatgcgattgagcgctcggcgaagggacggagtgatggggctgagaagtcgaagagcacgaagtataaggttaagattacgcctgagcagcagtcgcaagctggacgagctgggcgattgtttggtagggctgcggctgcgaagcagaggaaggggtttaagaatgggagggagcccagggttagaagagagatgggtgagagtggtagtgctaaggatgggaacgcgattaaaccgccggagcagtttatcttcgagggcaggagagcgagctctaaggatgggaagccgaaggatttgaagtttggtaagacgaaggggaagaagggtgcgattagggggaagacgaagagtcgtggggcaagacgcgctgcggagtggaggaagagctctgctgctaaggcgtaa

SEQ ID NO: 23967 - protein, 583 aa, Muscodor strobelii
  misc_feature: SGI Peptide ID NO. 568164
  misc_feature (371)..(435): Pfam Id: PF00076 Pfam Desc: RNA recognition motif. (a.k.a. RRM, RBD, or RNP domain)
  misc_feature (374)..(428): Pfam Id: PF00076 Pfam Desc: RNA recognition motif. (a.k.a. RRM, RBD, or RNP domain)
  misc_feature (16)..(577): NCBI GI: 46105869 Blast Desc: FG00398.1 [Gibberella zeae PH-1] gi|83288330|sp|Q4IQW0.1|NOP12_GIBZE RecName: Full=Nucleolar protein 12
  misc_feature (16)..(577): NCBI GI: 261357610 Blast Desc: nucleolar protein [Verticillium albo-atrum VaMs.102]
  misc_feature (140)..(579): NCBI GI: 256734575 Blast Desc: NECHADRAFT_74992 [Nectria haematococca mpVI 77-13-4]
  misc_feature (29)..(576): NCBI GI: 39977475 Blast Desc: MGG_11063 [Magnaporthe grisea 70-15] gi|145021625|gb|EDK05754.1| MGG_11063 [Magnaporthe grisea 70-15]
  misc_feature (113)..(582): NCBI GI: 171695272 Blast Desc: protein product [Podospora anserina] gi|170947878|emb|CAP60042.1| protein product [Podospora anserina]
  misc_feature (16)..(576): NCBI GI: 85091441 Blast Desc: nucleolar protein 12 [Neurospora crassa OR74A] gi|74696324|sp|Q7S2L7.1|NOP12_NEUCR RecName: Full=Nucleolar protein 12 gi|28920294|gb|EAA29667.1| nucleolar protein 12 crassa
  misc_feature (42)..(548): NCBI GI: 116182340 Blast Desc: CHGG_01798 [Chaetomium globosum CBS 148.51] gi|88186095|gb|EAQ93563.1| CHGG_01798 [Chaetomium globosum CBS 148.51]
  misc_feature (28)..(577): NCBI GI: 154308958 Blast Desc: BC1G_08007 [Botryotinia fuckeliana B05.10] gi|150852633|gb|EDN27825.1| BC1G_08007 [Botryotinia fuckeliana B05.10]
  misc_feature (27)..(576): NCBI GI: 119195671 Blast Desc: CIMG_02210 [Coccidioides immitis RS]
  misc_feature (27)..(576): NCBI GI: 240110456 Blast Desc: RNA recognition motif containing protein [Coccidioides posadasii C735 delta SOWgp]
  misc_feature: Useful for introducing or modulating the production of volatile compounds
MLRSAGAMACPARNRMAKGKGGLAASAKAVDPTLDALFASSSGPVKAPTKERYTALVPLKERKQAAQPEVTTKEDGSDPSEPENDDDENAEEDDEELSELDSDEQIEDESDAESDAEESNESETAVAAPKPKERKRKRKDEHDDLEDKYMRKLAEEEERELRQEKRRKGEDGETVENPVHETVAKATDEDDEAEETVPVHESLQKPEEHVDIELDKANRTLFLGNVSTEAISSSKARKTLITHLESCLSELDAATGPHKIESIRFRSTAFSTGSMPKRAAFITKSLMSTTTKSTNAYAVFTTPLASRTALKALNGTVVLDRHMRVDSVAHPAAIAHRRCVFVGNLGFVDDETVVNTNAEGETTTKKRHKVPSDTEEGLWRIFGEHAGKVESVRVPRDEKTRIGKGFAYVQFYDANDVESALLLNEKKFPPMLPRPLRVSRAKDPRKTSNAIERSAKGRSDGAEKSKSTKYKVKITPEQQSQAGRAGRLFGRAAAAKQRKGFKNGREPRVRREMGESGSAKDGNAIKPPEQFIFEGRRASSKDGKPKDLKFGKTKGKKGAIRGKTKSRGARRAAEWRKSSAAKA

SEQ ID NO: 23968 - DNA, 2045 bp, Muscodor strobelii
  misc_feature: SGI EST ID NO. CUFF.56750.0
  misc_feature: Variant of the nucleotide sequence at SEQ ID NO 23966
ctgcaacagacggttaatgccactatcgtcgcaacaaacaccaatttctcgtgcaattgccccgcctcaggcttgcccagcacgaaataggatggctaaaggaaaaggcggcctggcagcctccgccaaagctgtagaccccaccctggacgctctcttcgccagcagttctggaccagtcaaggctcctaccaaggaacgctatacggctctcgtgcccctgaaggaaaggaaacaggcagcacaaccggaagttacgacaaaagaagatggctccgatcccagtgaacccgaaaacgatgacgatgagaacgcggaagaagacgacgaggaattgagcgaactagacagcgatgaacaaattgaggacgagtctgatgccgagtctgatgccgaagagagcaatgaatctgagacggcagtggcagcacccaaaccgaaggagcgcaagagaaagcgaaaagacgagcacgacgatctcgaagataaatatatgcgaaagctagccgaagaggaagagagggagctgcgacaggagaagcgccgcaaaggagaagacggagagactgtcgagaacccagtgcacgagacggtagcaaaggcaaccgacgaagatgacgaagccgaggagacagttccagtccatgagtctctccagaagccagaggaacacgtcgacatcgaactagacaaagcgaaccgcacactattcctcggcaatgtctctacggaagctatttcatcttcaaaagccagaaagacacttataacccacctcgaatcatgcctctccgaactcgacgcggcgacgggtcctcacaagatagaatccatccgattccgctccaccgcattctccaccggctccatgccaaaacgcgcagccttcataaccaaatccctaatgtccaccaccacaaaatccaccaacgcctacgccgtcttcaccacgcccctcgcctcccgcacggcgctcaaggctctcaacggcacagtcgtactcgaccggcacatgcgcgtagacagcgtcgcccaccccgcagccatagcccacaggcgctgcgtattcgtagggaacctcggttttgtggatgacgagacagtagtcaacacgaacgcagagggcgaaacgacgacgaaaaaacgccacaaggtgcccagcgacacggaagaaggtctctggcgcatcttcggcgagcacgcggggaaagtggagagcgtccgcgtgccgagagatgagaagacgagaattggaaagggatttgcgtatgtgcagttctacgacgcgaatgatgtcgagtccgcgcttcttctcaacgagaagaagttcccgcccatgcttccgagacctctgcgtgtatcccgtgcgaaagacccgcggaagacgtctaatgcgattgagcgctcggcgaagggacggagtgatggggctgagaagtcgaagagcacgaagtataaggttaagattacgcctgagcagcagtcgcaagctggacgagctgggcgattgtttggtagggctgcggctgcgaagcagaggaaggggtttaagaatgggagggagcccagggttagaagagagatgggtgagagtggtagtgctaaggatgggaacgcgattaaaccgccggagcagtttatcttcgagggcaggagagcgagctctaaggatgggaagccgaaggatttgaagtttggtaagacgaaggggaagaagggtgcgattagggggaagacgaagagtcgtggggcaagacgcgctgcggagtggaggaagagctctgctgctaaggcgtaatgggatgagtatagatgtttgttatgggctggtatggggctattacatgttatctcagataccttgccttgacaatgcggtagagcctagagcataaaatgatgttattcgctatagcacccattaacatgcgacgcctgctaaaggtgtcggtgcgcaacaggtcttccattattcaatgctagcccgaagatttcccagccaataaaaatcccattgtagtcagcttcataggtgccaataatta

SEQ ID NO: 23969 - DNA, 1443 bp, Muscodor strobelii
  misc_feature: SGI cDNA ID NO. 568165
  misc_feature: Encodes the peptide sequence at SEQ ID NO 23970
atgagacactcggacatcacgacgaccctcgcgctgctcgcaacggcgctgagtagcgtgcaggctattccccggggatttgggaatatcaatgtgcaacagctcacatccgccaacaacttgaaagtaaatggaaatgcgaaccaagctcaggtcgatgcgtctgggactttagacccagcacaagcagggaagaatagttcagtgaataataagggcggcgaggaatcgcaacaaaatgccggcgatgccgcaggactcgctgctttgcccgctggtcaaataacgactggtgcgctgcaaccgcttcctggggctgcgactgagggcttgggacagagtcaggagactacctctgtggagagcgttgtttctgctaccgagagcctcgcaatagcaacagaatcagcagcccaatctctcgagatcctaacgacctctgctgcggaactgacagtatcaacgagtgttgcttcagtaccactcctaggaacagtcgaagctacagcctctgctaccgaagtagcgtccgctacttcaatcgctcaactagagacactgagcgttatttcttctgccgtagaatcatccgcagctggagtagaaactctgtccgcctctgcagtcgagacttcggccgtaggcggtctaataacgctcaacgccccctcatccgcagctgcgacgtccatcgcggggctggagaccatcggagcttcaagtgtcgaatctgccgcagagtcagcagtcagcagtctagaggtactcagctccgtagaagcaaccagtacgctcgcgtcagaactcgcatctataacctctgctatcgaatcatcgagtcttgtggctctcccgggtgtactcacgagctctgcactcgaatctctacccgatacactggccaccgcatccgcgaccgcatcagaagtcgcctcgggcgccgtacttaccgagtccgcatctggtctcgcctcagagtccggaagtctacaagcactccccaccgaaggctcagccgccgcaaccggcagtcttcagcctctcccctccgcaacaggatcctcttcctctgagtccggatccgcgtccgactcatcgtcagaatcaaactccctccagcccctcccctccgcaacagattcctcctcctcctcgtcggagtcgaattccctccagcctttaccaggccaagcaacatcctccgcgtctctcgattccctcccatccgctgtctcaggactgacgagtttcagctcgctagtggctagcgccacgagtgctctgggcgaagtagcgagttcgggagctgctgtgctgggtggcgggaattctacgacgcttattggtggggggacgaatgctggaatgactgtgaaggaggatttggttagagtgggtgttgtgatggttgcgggtttgtttggtattgggcttgtgctgtga

SEQ ID NO: 23970 - protein, 480 aa, Muscodor strobelii
  misc_feature: SGI Peptide ID NO. 568165
MRHSDITTTLALLATALSSVQAIPRGFGNINVQQLTSANNLKVNGNANQAQVDASGTLDPAQAGKNSSVNNKGGEESQQNAGDAAGLAALPAGQITTGALQPLPGAATEGLGQSQETTSVESVVSATESLAIATESAAQSLEILTTSAAELTVSTSVASVPLLGTVEATASATEVASATSIAQLETLSVISSAVESSAAGVETLSASAVETSAVGGLITLNAPSSAAATSIAGLETIGASSVESAAESAVSSLEVLSSVEATSTLASELASITSAIESSSLVALPGVLTSSALESLPDTLATASATASEVASGAVLTESASGLASESGSLQALPTEGSAAATGSLQPLPSATGSSSSESGSASDSSSESNSLQPLPSATDSSSSSSESNSLQPLPGQATSSASLDSLPSAVSGLTSFSSLVASATSALGEVASSGAAVLGGGNSTTLIGGGTNAGMTVKEDLVRVGVVMVAGLFGIGLVL

SEQ ID NO: 23971 - DNA, 2112 bp, Muscodor strobelii
  misc_feature: SGI cDNA ID NO. 568166
  misc_feature: Encodes the peptide sequence at SEQ ID NO 23972
atgtcggcaccaagcgatcccagccagaatgtcagcagggacttgctgcctcatgcgcatctgctttcaacctttcggtacaccaccaaagcccagatccagcccaatgaagtcacctcatggttgatgcaggcgcccaagatcgcccgcgacacggcccccttctactggacttatctcgacaagccgccgccgggaaccatctatctaacatggcagcctctccagcttatgggcatcaacttctcgacggatggcttcatttggcctcaacaggagcaatacgtccaacaggaagtcggcaatggcattattctggagatgcactaccacagagctggatacgctccaggcgaaccgttcgccagtcactcgcgacgtcgtttccgtctcatccctcccaatgcacaaaaccccaatgcgcctcaggtcgaccccagtctttggatcgtccactacggccctatcgacaacaacgagcgcatcccctcgcaagtgatcgtgccccatccgcagacaccctctatcatggagacccgcaactacctgcatcgttgtggccagatcgtccgcaaggaattcatcctcagcgaccgagtcaattggccccatgtaggatggccacgagaaccacccagacagcccatgtatcctggcaatcgcggcatgcctcaggccatggcatacccaccacatgcgcaagccgtcgggccgccctctaagcgtccacgaaccagccagcccgcgcatggtcaggtcaaccctatggccggcatgggccagggtgactttgaagacgacgaggatacttctcgcggcgatctctttgacctgctcacgcctcgtgatgtttgtatcagtcgatataagcagaaccatgagtggatggaggagattctctcgtctgcatatagaatgggccagattggctttgcagatcttggtctaggcttgaagggcgagctctcaggtcttaccgagggtatcttcgatgcacagggctctaatgctgtaacccaagcaccaacgaagcctgctaccactcgtctcgaccccgagcaggctgaacttttccgcaagcgggtgaacgccaggattgactcaaccaactcggagatcgagaaaatgaaagcagagcatgccaagcagatggctaggtttaaaaagaactcattaattacggcggcagagcgggagttgcgcacagctgtggatggctccgggggagacaatctgaaccttgacggtcatcatgcagacgagactgacgaggcttccaatcgctggccctcaaagcatcatcgcaaagtggatgatattgtttctcaagtagaggcacacctgaaccgccatgccgaggtgattcacgacttacggagaattcatgacggcggatatcaggagcctgctgccgaacctgtaggtcaaccaaatatgcaggcttccatggcaggtggccaggttcccagtgcccatgggagcaacaccatgtctcgccagccatcccatgccggttcccagcagagtggattcatgatgggtgattccgacatcgatatgggtggaacagctgctggcttgcttgatcagatgcatactggtggttcgtccacttcgacgcctcagccgcccatgtctgctggtccctctaactccgggacgccggccaatcttggcgtcccatcacctcatccgcctccaccgcaacccggaatgatgtccaagcaagctggcgacgtcaagatggatggtacggatgtcacgccccagactgctcctgatcagggcgctggtactgacgattgggttgtagtgcccaaaggcggcgtatctccagacgccaatgccgattcgcattcctcagcgggactcccaaaacctatggaatcttcaagacaggcttccgctgccgggacaccagggtttggtggcgaccataacgacttcagctctttagaagatctgaactcggccggtgatgccctcgccggatttggtggcacacctggtgggatgagcgacctaaacatggaagattcggctttcggtgacgcattccacggtgttgatactcagggtggagccgacacacctgctgacagcaattcgtag

SEQ ID NO: 23972 - protein, 703 aa, Muscodor strobelii
  misc_feature: SGI Peptide ID NO. 568166
  misc_feature (1)..(701): Pfam Id: PF08549 Pfam Desc: Fungal domain of function (DUF1750)
  misc_feature (6)..(700): NCBI GI: 46108460 Blast Desc: FG01112.1 [Gibberella zeae PH-1]
  misc_feature (6)..(693): NCBI GI: 256735125 Blast Desc: [Nectria haematococca mpVI 77-13-4]
  misc_feature (6)..(696): NCBI GI: 85115943 Blast Desc: NCU03101 [Neurospora crassa OR74A] gi|28926759|gb|EAA35724.1| [Neurospora crassa OR74A]
  misc_feature (6)..(693): NCBI GI: 116180432 Blast Desc: CHGG_00844 [Chaetomium globosum CBS 148.51] gi|88185141|gb|EAQ92609.1| CHGG_00844 [Chaetomium globosum CBS 148.51]
  misc_feature (6)..(703): NCBI GI: 261356337 Blast Desc: conserved [Verticillium albo-atrum VaMs.102]
  misc_feature (7)..(689): NCBI GI: 145611726 Blast Desc: MGG_00174 [Magnaporthe grisea 70-15] gi|145018975|gb|EDK03254.1| MGG_00174 [Magnaporthe grisea 70-15]
  misc_feature (1)..(689): NCBI GI: 156045371 Blast Desc: SS1G_09874 [Sclerotinia sclerotiorum 1980] gi|154694269|gb|EDN94007.1| SS1G_09874 [Sclerotinia sclerotiorum 1980]
  misc_feature (1)..(690): NCBI GI: 154318720 Blast Desc: BC1G_02749 [Botryotinia fuckeliana B05.10] gi|150857879|gb|EDN33071.1| BC1G_02749 [Botryotinia fuckeliana B05.10]
  misc_feature (16)..(486): NCBI GI: 171687801 Blast Desc: protein product [Podospora anserina] gi|170943862|emb|CAP69514.1| protein product [Podospora anserina]
  misc_feature (6)..(694): NCBI GI: 212533199 Blast Desc: conserved [Penicillium marneffei ATCC 18224] gi|210072120|gb|EEA26209.1| conserved [Penicillium marneffei ATCC 18224]
MSAPSDPSQNVSRDLLPHAHLLSTFRYTTKAQIQPNEVTSWLMQAPKIARDTAPFYWTYLDKPPPGTIYLTWQPLQLMGINFSTDGFIWPQQEQYVQQEVGNGIILEMHYHRAGYAPGEPFASHSRRRFRLIPPNAQNPNAPQVDPSLWIVHYGPIDNNERIPSQVIVPHPQTPSIMETRNYLHRCGQIVRKEFILSDRVNWPHVGWPREPPRQPMYPGNRGMPQAMAYPPHAQAVGPPSKRPRTSQPAHGQVNPMAGMGQGDFEDDEDTSRGDLFDLLTPRDVCISRYKQNHEWMEEILSSAYRMGQIGFADLGLGLKGELSGLTEGIFDAQGSNAVTQAPTKPATTRLDPEQAELFRKRVNARIDSTNSEIEKMKAEHAKQMARFKKNSLITAAERELRTAVDGSGGDNLNLDGHHADETDEASNRWPSKHHRKVDDIVSQVEAHLNRHAEVIHDLRRIHDGGYQEPAAEPVGQPNMQASMAGGQVPSAHGSNTMSRQPSHAGSQQSGFMMGDSDIDMGGTAAGLLDQMHTGGSSTSTPQPPMSAGPSNSGTPANLGVPSPHPPPPQPGMMSKQAGDVKMDGTDVTPQTAPDQGAGTDDWVVVPKGGVSPDANADSHSSAGLPKPMESSRQASAAGTPGFGGDHNDFSSLEDLNSAGDALAGFGGTPGGMSDLNMEDSAFGDAFHGVDTQGGADTPADSNS

SEQ ID NO: 23973 - DNA, 3064 bp, Muscodor strobelii
  misc_feature: SGI EST ID NO. CUFF.56463.2
  misc_feature: Variant of the nucleotide sequence at SEQ ID NO 23971
tccagactgagctgaatttcagagcttagacctacaatgttcgtcgcgtaggtagtttccctcattaccgacgtgcagccttgccaactaggtccatcactttagaaacggcgcatcatacgtataccttatcaaaactgaagtgcctagggcggctccaatctaactctcgaaatcttctcatctctaatcgctgaggggtttgcataattctcggagtcgacttcaaactcaattgaccgcgacgggtggttggtttcactggcgacgacatcgcgacgacaccgcgacaactgcgcgcgacctccatcatcatgtcggcaccaagcgatcccagccagaatgtcagcagggacttgctgcctcatgcgcatctgctttcaacctttcggtacaccaccaaagcccagatccagcccaatgaagtcacctcatggttgatgcaggcgcccaagatcgcccgcgacacggcccccttctactggacttatctcgacaagccgccgccgggaaccatctatctaacatggcagcctctccagcttatgggcatcaacttctcgacggatggcttcatttggcctcaacaggagcaatacgtccaacaggaagtcggcaatggcattattctggagatgcactaccacagagctggatacgctccaggcgaaccgttcgccagtcactcgcgacgtcgtttccgtctcatccctcccaatgcacaaaaccccaatgcgcctcaggtcgaccccagtctttggatcgtccactacggccctatcgacaacaacgagcgcatcccctcgcaagtgatcgtgccccatccgcagacaccctctatcatggagacccgcaactacctgcatcgttgtggccagatcgtccgcaaggaattcatcctcagcgaccgagtcaattggccccatgtaggatggccacgagaaccacccagacagcccatgtatcctggcaatcgcggcatgcctcaggccatggcatacccaccacatgcgcaagccgtcgggccgccctctaagcgtccacgaaccagccagcccgcgcatggtcaggtcaaccctatggccggcatgggccagggtgactttgaagacgacgaggatacttctcgcggcgatctctttgacctgctcacgcctcgtgatgtttgtatcagtcgatataagcagaaccatgagtggatggaggagattctctcgtctgcatatagaatgggccagattggctttgcagatcttggtctaggcttgaagggcgagctctcaggtcttaccgagggtatcttcgatgcacagggctctaatgctgtaacccaagcaccaacgaagcctgctaccactcgtctcgaccccgagcaggctgaacttttccgcaagcgggtgaacgccaggattgactcaaccaactcggagatcgagaaaatgaaagcagagcatgccaagcagatggctaggtttaaaaagaactcattaattacggcggcagagcgggagttgcgcacagctgtggatggctccgggggagacaatctgaaccttgacggtcatcatgcagacgagactgacgaggcttccaatcgctggccctcaaagcatcatcgcaaagtggatgatattgtttctcaagtagaggcacacctgaaccgccatgccgaggtgattcacgacttacggagaattcatgacggcggatatcaggagcctgctgccgaacctgtaggtcaaccaaatatgcaggcttccatggcaggtggccaggttcccagtgcccatgggagcaacaccatgtctcgccagccatcccatgccggttcccagcagagtggattcatgatgggtgattccgacatcgatatgggtggaacagctgctggcttgcttgatcagatgcatactggtggttcgtccacttcgacgcctcagccgcccatgtctgctggtccctctaactccgggacgccggccaatcttggcgtcccatcacctcatccgcctccaccgcaacccggaatgatgtccaagcaagctggcgacgtcaagatggatgtgcccaaaggcggcgtatctccagacgccaatgccgattcgcattcctcagcgggactcccaaaacctatggaatcttcaagacaggcttccgctgccgggacaccagggtttggtggcgaccataacgacttcagctctttagaagatctgaactcggccggtgatgccctcgccggatttggtggcacacctggtgggatgagcgacctaaacatggaagattcggctttcggtgacgcattccacggtgttgatactcagggtggagccgacacacctgctgacagcaattcgtagtatgtgttgtcagattttgtggagcgccggctgttttgacgaagggttgttccgtcaactgactacgaagcagatgctctagattcagtctagtcacgctctggcccatttgacgcggacgggaaacaggtggtgttcattgatttcacccgtgcggtatcctagatactataacggtatgacgatagcaaggagctatctatgtgatttagtcactgatgcctattagacatctagcctcacgaagcgatttcataggtctagaactgcggctgcacatcgcaatactgcgggtgccgtcactgtaatggacacagcgctgcgcatttgtattttacggtgcaaaggggaaaagagagaatggtattttacaggaagatgtatgatgcgtttctggtaggatggtttttaaggctaatgtcttacggatgagagacagcgttgtgcatcgattgatgccttgagattcctagaatgtacgacctgtgctttagactactactcacgccagggttactcggtagagagtaagatgagtgtgtttactacacgaacagcggactcgatctcgtcatcaaatgcactaaatgatggttctgaagattatttagtagttacaacgccacattgtagcaatactgcagtgttttgtatttgattcgaagatacagactttaaaaacaagaagaaataggttccta

SEQ ID NO: 23974 - DNA, 1479 bp, Muscodor strobelii
  misc_feature: SGI cDNA ID NO. 568167
  misc_feature: Encodes the peptide sequence at SEQ ID NO 23975
atgtctggcgcagtcgctgatctcggcctcatcggcctggctgtcatgggtcagaacttgattctgaacatggctgaccacggcttcaccatctgcgctttcaaccgaaccgtctccaaggtcgaccgcttcttggccaatgaggcaaagggcaagtctatcgttggtgcccactccacagaagaattcgtctccaagctcaagagtcctcgccgcatcatgctgcttgtccaggccggcaaggctgtcgacgattggattgagactctccttcctctgctcgagaagggtgatatcattatcgatggtggtaactcccacttccccgactctaaccgccgcaccacgtacttgtcttccaagggcatccgattcgtcggctctggtgtttccggtggtgaggagggtgcccgctacggtccctctatcatgcccggtggtaacgaggaggcttggccttatatcaaggacattttccagagcatctctgccaagagctccggtgaagcctgctgtgagtgggttggtgacgagggtgctggccactacgtcaagatggtccacaacggtatcgagtacggtgacatgcagcttatttgcgaagcgtacgacatcatgaagcgtggtttgggtctttccaacaaggagatcggtgacatcttggccaaatggaacaagggcgtcctagactccttcctgatcgagatcacgcgtgacatcatgtacttcaacgacgatgatggcactcctctcgtcgagaagatcttggacaaggctggccagaagggtactggcaagtggactgccgtcaacgccttcgaccttggtatgcccgtcactctgatcgctgaggccgtcttcgctcgatgcctgtcttccatcaaggaggagcgcgtcgaggcttccgagaagctcaagtacgtcggcaccagccaaaagttcgagggcaataaggagcagttcctcgacaacctcgagcaggctctctacgcctccaagatcgtctcgtacgcccagggtttcatgttgatgcaggaggccgccaaggagttcaactggaagctcaacaagccctcgatcgccctgatgtggagaggtggctgcattatccgatccgtcttcttgaaggacatcacctcggcttaccgcaagaaccccgacctcaagaacttgctgttcgatgacttcttcaacgaggccatccacaaggcccagcccggctggagagacgttgtctccaaggccgtgctgctcggcatccccacccccgctttcgccaccgccctcacgtggttcgacggctaccgtgccaagaacctgcctgccaacctcctgcaggcccagcgcgactacttcggcgcgcacactttcagaatcaagcccgagaatgccaacgagaagtaccccgagggccaggatatccacgtcaactggactggtcgtggcggcaacgtctctgcctcaacataccaggcataa

SEQ ID NO: 23975 - protein, 492 aa, Muscodor strobelii
  misc_feature: SGI Peptide ID NO. 568167
  misc_feature (181)..(479): Pfam Id: PF00393 Pfam Desc: 6-phosphogluconate dehydrogenase, C-terminal domain
  misc_feature (5)..(177): Pfam Id: PF03446 Pfam Desc: NAD binding domain of 6-phosphogluconate dehydrogenase
  misc_feature (3)..(492): NCBI GI: 171687803 Blast Desc: protein product [Podospora anserina] gi|170943863|emb|CAP69515.1| protein product [Podospora anserina]
  misc_feature (6)..(492): NCBI GI: 85115938 Blast Desc: 6-phosphogluconate dehydrogenase [Neurospora crassa OR74A] gi|28926758|gb|EAA35723.1| 6-phosphogluconate dehydrogenase [Neurospora crassa OR74A]
  misc_feature (1)..(492): NCBI GI: 226532205 Blast Desc: LOC100274495 [Zea mays] gi|194708216|gb|ACF88192.1| [Zea mays]
  misc_feature (6)..(492): NCBI GI: 256735126 Blast Desc: [Nectria haematococca mpVI 77-13-4]
  misc_feature (6)..(492): NCBI GI: 46108458 Blast Desc: FG01111.1 [Gibberella zeae PH-1]
  misc_feature (1)..(492): NCBI GI: 156045363 Blast Desc: SS1G_09870 [Sclerotinia sclerotiorum 1980] gi|154694265|gb|EDN94003.1| SS1G_09870 [Sclerotinia sclerotiorum 1980]
  misc_feature (1)..(492): NCBI GI: 116180430 Blast Desc: CHGG_00843 [Chaetomium globosum CBS 148.51] gi|88185140|gb|EAQ92608.1| CHGG_00843 [Chaetomium globosum CBS 148.51]
  misc_feature (4)..(492): NCBI GI: 154318710 Blast Desc: 6-phosphogluconate dehydrogenase [Botryotinia fuckeliana B05.10] gi|150857874|gb|EDN33066.1| 6-phosphogluconate dehydrogenase [Botryotinia fuckeliana B05.10]
  misc_feature (4)..(492): NCBI GI: 238846145 Blast Desc: 6-phosphogluconate dehydrogenase [Microsporum canis CBS 113480]
  misc_feature (4)..(491): NCBI GI: 240105666 Blast Desc: 6-phosphogluconate dehydrogenase, [Coccidioides posadasii C735 delta SOWgp]
  misc_feature (6)..(492): SWISSPROT Homolog: EC 1.1.1.44 Phosphogluconate dehydrogenase (decarboxylating)
MSGAVADLGLIGLAVMGQNLILNMADHGFTICAFNRTVSKVDRFLANEAKGKSIVGAHSTEEFVSKLKSPRRIMLLVQAGKAVDDWIETLLPLLEKGDIIIDGGNSHFPDSNRRTTYLSSKGIRFVGSGVSGGEEGARYGPSIMPGGNEEAWPYIKDIFQSISAKSSGEACCEWVGDEGAGHYVKMVHNGIEYGDMQLICEAYDIMKRGLGLSNKEIGDILAKWNKGVLDSFLIEITRDIMYFNDDDGTPLVEKILDKAGQKGTGKWTAVNAFDLGMPVTLIAEAVFARCLSSIKEERVEASEKLKYVGTSQKFEGNKEQFLDNLEQALYASKIVSYAQGFMLMQEAAKEFNWKLNKPSIALMWRGGCIIRSVFLKDITSAYRKNPDLKNLLFDDFFNEAIHKAQPGWRDVVSKAVLLGIPTPAFATALTWFDGYRAKNLPANLLQAQRDYFGAHTFRIKPENANEKYPEGQDIHVNWTGRGGNVSASTYQA

SEQ ID NO: 23976 - DNA, 2072 bp, Muscodor strobelii
  misc_feature: SGI EST ID NO. CUFF.56393.0
  misc_feature: Variant of the nucleotide sequence at SEQ ID NO 23974
tacatgtacctgtctgcacgatcggcgctaccctaccgtctgccattcatgttcccaatgttcccaattttacccctccatcatagaaaagcactctgccccccaataccatcatctttcttactctcccctccataatttcctcacttcaagcctaataccgcataattcgctccctcacttcgccaattcgtctacgatcagttgctccacagtgtctcttgatccagtgaactatctgcagaaaccgcaatcatgtctggcgcagtcgctgatctcggcctcatcggcctggctgtcatgggtcagaacttgattctgaacatggctgaccacggcttcaccatctgcgctttcaaccgaaccgtctccaaggtcgaccgcttcttggccaatgaggcaaagggcaagtctatcgttggtgcccactccacagaagaattcgtctccaagctcaagagtcctcgccgcatcatgctgcttgtccaggccggcaaggctgtcgacgattggattgagactctccttcctctgctcgagaagggtgatatcattatcgatggtggtaactcccacttccccgactctaaccgccgcaccacgtacttgtcttccaagggcatccgattcgtcggctctggtgtttccggtggtgaggagggtgcccgctacggtccctctatcatgcccggtggtaacgaggaggcttggccttatatcaaggacattttccagagcatctctgccaagagctccggtgaagcctgctgtgagtgggttggtgacgagggtgctggccactacgtcaagatggtccacaacggtatcgagtacggtgacatgcagcttatttgcgaagcgtacgacatcatgaagcgtggtttgggtctttccaacaaggagatcggtgacatcttggccaaatggaacaagggcgtcctagactccttcctgatcgagatcacgcgtgacatcatgtacttcaacgacgatgatggcactcctctcgtcgagaagatcttggacaaggctggccagaagggtactggcaagtggactgccgtcaacgccttcgaccttggtatgcccgtcactctgatcgctgaggccgtcttcgctcgatgcctgtcttccatcaaggaggagcgcgtcgaggcttccgagaagctcaagtacgtcggcaccagccaaaagttcgagggcaataaggagcagttcctcgacaacctcgagcaggctctctacgcctccaagatcgtctcgtacgcccagggtttcatgttgatgcaggaggccgccaaggagttcaactggaagctcaacaagccctcgatcgccctgatgtggagaggtggctgcattatccgatccgtcttcttgaaggacatcacctcggcttaccgcaagaaccccgacctcaagaacttgctgttcgatgacttcttcaacgaggccatccacaaggcccagcccggctggagagacgttgtctccaaggccgtgctgctcggcatccccacccccgctttcgccaccgccctcacgtggttcgacggctaccgtgccaagaacctgcctgccaacctcctgcaggcccagcgcgactacttcggcgcgcacactttcagaatcaagcccgagaatgccaacgagaagtaccccgagggccaggatatccacgtcaactggactggtcgtggcggcaacgtctctgcctcaacataccaggcataaaggctgccagcgggatagagaagagagagaaaaagaaagaagagagacaaaacttacagacagaataccacatcatgaccgatatgcatttgaaagggagtaattttttaaatagatggaatgggaactagtgaaatcacactgtacaatgaggtgctgttgcaattcgttgctattgtgactgctaggccgtaaacaaaacgacattgaagcgctaatgcgatgtgacattaaacattacagcgatacgtctgttcaaggaccagcgaagttagcaatatccgattctaagtgtagtgttataagggatttgaagcattgcttcaattgaatgcgaa

SEQ ID NO: 23977 - DNA, 1560 bp, Muscodor strobelii
  misc_feature: SGI cDNA ID NO. 568168
  misc_feature: Encodes the peptide sequence at SEQ ID NO 23978
atggattccatctttacccttcttggtgcgttcgtgattacagcgtacgtctttttctccatactgctacgtgttacacaacatccgaatgagccgccaaccgtcgaaaccgcaattccattcatcagtcagatcttgggtatgttatctggcatgcagaagttctctattacaatgagagacagatacaacctacctatatataccattcgcctacccgcccagcgcatctacatcgtcaactccttgcctctaatcatatcacttcagcgtcaaatcaaaactattgcgttcgcgcctatcgaagcacaagccgcggcaaatgtaatgggtgtcagtccggccggaaatgccattattggcgcaaagaatatgttcgatgaggattcttatctgtcaacattcataccgtcaacccacccagccctttcccctggccccgggctcgatgctctgagtggcgctacagttacacatatatccgactccctgaagcgtttccgtactcaaaatcccatcactgttgagctttactcgtggattcgcgaccagatcttcacggctacgacggagtctatatacgggccgaagaatccattccgcgatcctgctctacaacaagcatggtatcttttcgagcccaaaattgtcgtacatatgctcaaaacatggccctctgtattagcgcgtgagagtctttgggctcgagatcgagtgctcatcccagctctcgagaaatattttgctgagaatggccatgtgaagggctcgctactggttcaatgccgatacaagcacaatattgatcacgggctgcgtggtcgagatgtagcagcaacagagattggccagatgattgcggcaacaactaatagcgtggcaagtgccttttggtttgcgcatcacatcttctcaacccccgtgattcttgaacaatgcagcaaggaggtagaagagcttgtgcaggtggactctcagcaagtccggattgttgatcttgctgaaatcaagacttcttgccctattcttttctccacctggcaggaaacgcttcgctataatcatattggcgtctccgcaagagttgtcatgaaagataccatgcttgaggacaaatatcttctcaagaaaggtgccactgtcatgagtgtggctcccgtccaacacactgatccatcattatggggcccgacggttagcaactttgaccatcgccggtttctccgtgagcctggtacaaagcggacgaacccggctgcatttcgttcatttggaggcggaacggtgctttgtccagggcgccactttgccagcacgcaggtcatatcattcgtggctatgttgctgcttcagttcgacatacagccgacagtcaaaggtgcaaaatggattaagcctagaaagtcataccctatgaccacttctattcctactccgaaagacaaactgcatgtgcagctgatctctaaagattcgcatgagtggcgcgtagattatactggatcccagaagggatttgcgttggtaaaagaagacgtgagtagtaatgagtttagttag

SEQ ID NO: 23978 - protein, 519 aa, Muscodor strobelii
  misc_feature: SGI Peptide ID NO. 568168
  misc_feature (33)..(485): Pfam Id: PF00067 Pfam Desc: Cytochrome P450
  misc_feature (349)..(485): Pfam Id: PF00067 Pfam Desc: Cytochrome P450
  misc_feature (1)..(504): NCBI GI: 225681045 Blast Desc: conserved [Paracoccidioides brasiliensis Pb03] gi|226292259|gb|EEH47679.1| conserved [Paracoccidioides brasiliensis Pb18]
  misc_feature (1)..(505): NCBI GI: 225558023 Blast Desc: conserved [Ajellomyces capsulatus G186AR]
  misc_feature (1)..(462): NCBI GI: 240273269 Blast Desc: cytochrome P450 oxidoreductase [Ajellomyces capsulatus H143]
  misc_feature (1)..(459): NCBI GI: 154280549 Blast Desc: [Ajellomyces capsulatus NAm1] gi|150411266|gb|EDN06654.1| [Ajellomyces capsulatus NAm1]
  misc_feature (4)..(517): NCBI GI: 156056715 Blast Desc: SS1G_04088 [Sclerotinia sclerotiorum 1980] gi|154701874|gb|EDO01613.1| SS1G_04088 [Sclerotinia sclerotiorum 1980]
  misc_feature (30)..(512): NCBI GI: 169609679 Blast Desc: SNOG_07932 [Phaeosphaeria nodorum SN15] gi|160701894|gb|EAT84208.2| SNOG_07932 [Phaeosphaeria nodorum SN15]
  misc_feature (54)..(514): NCBI GI: 169608169 Blast Desc: SNOG_07153 [Phaeosphaeria nodorum SN15] gi|160701581|gb|EAT85804.2| SNOG_07153 [Phaeosphaeria nodorum SN15]
  misc_feature (29)..(476): NCBI GI: 154303094 Blast Desc: BC1G_09567 [Botryotinia fuckeliana B05.10] gi|150855030|gb|EDN30222.1| BC1G_09567 [Botryotinia fuckeliana B05.10]
  misc_feature (11)..(487): NCBI GI: 145252772 Blast Desc: An16g05910 [Aspergillus niger] gi|134083453|emb|CAK46931.1| protein product [Aspergillus niger]
  misc_feature (70)..(476): NCBI GI: 156058692 Blast Desc: SS1G_03358 [Sclerotinia sclerotiorum 1980] gi|154701145|gb|EDO00884.1| SS1G_03358 [Sclerotinia sclerotiorum 1980]
  misc_feature (23)..(455): SWISSPROT Homolog: EC 1.14.13.100 25-hydroxycholesterol 7-alpha-hydroxylase
MDSIFTLLGAFVITAYVFFSILLRVTQHPNEPPTVETAIPFISQILGMLSGMQKFSITMRDRYNLPIYTIRLPAQRIYIVNSLPLIISLQRQIKTIAFAPIEAQAAANVMGVSPAGNAIIGAKNMFDEDSYLSTFIPSTHPALSPGPGLDALSGATVTHISDSLKRFRTQNPITVELYSWIRDQIFTATTESIYGPKNPFRDPALQQAWYLFEPKIVVHMLKTWPSVLARESLWARDRVLIPALEKYFAENGHVKGSLLVQCRYKHNIDHGLRGRDVAATEIGQMIAATTNSVASAFWFAHHIFSTPVILEQCSKEVEELVQVDSQQVRIVDLAEIKTSCPILFSTWQETLRYNHIGVSARVVMKDTMLEDKYLLKKGATVMSVAPVQHTDPSLWGPTVSNFDHRRFLREPGTKRTNPAAFRSFGGGTVLCPGRHFASTQVISFVAMLLLQFDIQPTVKGAKWIKPRKSYPMTTSIPTPKDKLHVQLISKDSHEWRVDYTGSQKGFALVKEDVSSNEFS

SEQ ID NO: 23979 - DNA, 2085 bp, Muscodor strobelii
  misc_feature: SGI cDNA ID NO. 568169
  misc_feature: Encodes the peptide sequence at SEQ ID NO 23980
atgttgggaatgatggtcagggctgtatcctgcagcttgttcctcgtacaggcttatggcgctctagacaaagcagctctcgggaagaagtatttcgggaatgacgcaccatggtaccaggacagaatccccttcttcgaatctagtgattcttctatcaccgatgtttattattatcgttggcagatcttcagggctcatcagcgtgatctcggatcacaaggatacatcaccactgagttcatcgacgatgtgtcctggcaagcctttcccagtgcctttctcgacgatgcaacccaatttcacttcaacgaagcacgatggtgtcgagatcgccgctttagggtagaccatgcgaagttcatttctacggcatctctagctgaccttcgtcacttttccgacaacatggcaatctctgtatacaatgcatatcttgtcgatggtgtacaatcagacattgtgccgctcctcgacggcatgaagaccgtgttcaacgcttgggccgaccacttcgacagctcaaagggcttatactatatcgagccgctcgccgatgcaacagagtacaccatctctagtattgatgcaagctgtggaaaagatggcttcactggcggcgacagctttcgtcctagtatcaacacgtatcaatatggtaatgcaattgcgattgcaaagatagccatacttgcaggccagacaagtgtagctaatgactacaatgcgagagccgcttcaataaaagccaatgtccaggacttcttatggaattctacgtttgagcattttatcgacaggatatatgctaacacaagctgtgtaacatactggaacttcattcgtggtcgtgaattagtgggatatgcgccttggctacatgacctacctgacgatactgcaacatttgcgcaagcttggagtcatttaatggacactgacaagttgttgggagcgtatggtttacgtactgtcgaacctagctaccagtactacatgcggcagtatcggtatgacgctcccactggccttcgcgaatgccagtggaacggtcctctctggccataccagacttctcaagtgctcgctgcgcttgcaaacgtattggatcattatccagccacgactgccgcgggtgttgttagcccagacacatatatgacccttctcgggctttacgcagacctccactacaataagaaacgcggcgggtatctcaacattgaggaagattacgacgcggcaaccggcgaacctatcgtgggactcgatcgctcttctcactatttccactctagcttcatcgatctagtcatttccggacttgttggcatccggcccagcgatgacgagaccctgactgtcaatcccttgggaaccaaccttgcgtacttccgattagagggtgtcatctaccatggcaatgagatcgctgtacaatgggacactgatgggtcgagatatggtacgcaaggattagtcatcgaggtcaacggcgaggtggccactacttcctctacactacaacgtacctctgtgccgatcacgcggacctcacctccacaaccacttgagccgatcagcaagtcgatccagttgcagaacttcgcgacttggcctgacgcgcccgcataccccgttggaagtgtatcggtcgcaaatgccgactcaaacaaagtacaagatgcaatcgatggtcggatatggttcttcgcattaccaaccgacacatacacaatatcacacggctggcaaacacctacaggcactggcgactcagtatggtatatgattgattttggaagtgatacagaggtcacaagctctgagctggcatggtttgagggcgacggagttgacgtgcctgtgtcctatagtattgaagcaaatgtctctggaaactgggtatcggtttctgaccctgtgtatccggatttggtggcaaatggcataacatatgcctcatggacatctgtgacaactaaacagctccgcctggtgtttacgccgccgacgggcgttgcctcgcgactagtagagtggaaagttttcagtgatctagtgacaggcgatgttttcgcataa

SEQ ID NO: 23980 - protein, 694 aa, Muscodor strobelii
  misc_feature: SGI Peptide ID NO. 568169
  misc_feature (6)..(688): NCBI GI: 238506701 Blast Desc: conserved [Aspergillus flavus NRRL3357] gi|220689265|gb|EED45616.1| conserved [Aspergillus flavus NRRL3357]
  misc_feature (21)..(667): NCBI GI: 145248267 Blast Desc: An13g02450 [Aspergillus niger] gi|134081133|emb|CAK41643.1| protein product [Aspergillus niger]
  misc_feature (14)..(684): NCBI GI: 189208764 Blast Desc: six-hairpin glycosidase [Pyrenophora tritici-repentis Pt-1C-BFP] gi|187976808|gb|EDU43434.1| six-hairpin glycosidase [Pyrenophora tritici-repentis Pt-1C-BFP]
  misc_feature (4)..(638): NCBI GI: 67902890 Blast Desc: AN8432.2 [Aspergillus nidulans FGSC A4] gi|40747898|gb|EAA67054.1| AN8432.2 [Aspergillus nidulans FGSC A4] gi|259484373|tpe|CBF80537.1| TPA: conserved [Aspergillus FGSC
  misc_feature (31)..(684): NCBI GI: 169598286 Blast Desc: SNOG_01944 [Phaeosphaeria nodorum SN15] gi|160704369|gb|EAT90156.2| SNOG_01944 [Phaeosphaeria nodorum SN15]
  misc_feature (22)..(684): NCBI GI: 167647573 Blast Desc: Caul_3611 [Caulobacter sp. K31] gi|167350003|gb|ABZ72738.1| conserved [Caulobacter sp. K31]
  misc_feature (35)..(680): NCBI GI: 115372614 Blast Desc: carbohydrate binding module (family 6) [Stigmatella aurantiaca DW4/3-1] gi|115370335|gb|EAU69263.1| carbohydrate binding module (family 6) [Stigmatella aurantiaca DW4/3-1]
  misc_feature (6)..(667): NCBI GI: 46126641 Blast Desc: FG07698.1 [Gibberella zeae PH-1]
  misc_feature (35)..(688): NCBI GI: 85067653 Blast Desc: NCU07050 [Neurospora crassa OR74A] gi|28921606|gb|EAA30896.1| conserved [Neurospora crassa OR74A]
  misc_feature (40)..(675): NCBI GI: 149198021 Blast Desc: LNTAR_21530 [Lentisphaera araneosa HTCC2155] gi|149138933|gb|EDM27338.1| LNTAR_21530 [Lentisphaera araneosa HTCC2155]
MLGMMVRAVSCSLFLVQAYGALDKAALGKKYFGNDAPWYQDRIPFFESSDSSITDVYYYRWQIFRAHQRDLGSQGYITTEFIDDVSWQAFPSAFLDDATQFHFNEARWCRDRRFRVDHAKFISTASLADLRHFSDNMAISVYNAYLVDGVQSDIVPLLDGMKTVFNAWADHFDSSKGLYYIEPLADATEYTISSIDASCGKDGFTGGDSFRPSINTYQYGNAIAIAKIAILAGQTSVANDYNARAASIKANVQDFLWNSTFEHFIDRIYANTSCVTYWNFIRGRELVGYAPWLHDLPDDTATFAQAWSHLMDTDKLLGAYGLRTVEPSYQYYMRQYRYDAPTGLRECQWNGPLWPYQTSQVLAALANVLDHYPATTAAGVVSPDTYMTLLGLYADLHYNKKRGGYLNIEEDYDAATGEPIVGLDRSSHYFHSSFIDLVISGLVGIRPSDDETLTVNPLGTNLAYFRLEGVIYHGNEIAVQWDTDGSRYGTQGLVIEVNGEVATTSSTLQRTSVPITRTSPPQPLEPISKSIQLQNFATWPDAPAYPVGSVSVANADSNKVQDAIDGRIWFFALPTDTYTISHGWQTPTGTGDSVWYMIDFGSDTEVTSSELAWFEGDGVDVPVSYSIEANVSGNWVSVSDPVYPDLVANGITYASWTSVTTKQLRLVFTPPTGVASRLVEWKVFSDLVTGDVFA

SEQ ID NO: 23981 - DNA, 1095 bp, Muscodor strobelii
  misc_feature: SGI cDNA ID NO. 568170
  misc_feature: Encodes the peptide sequence at SEQ ID NO 23982
atggtcgggaagccactgagaattgccgtaattgccggcgatgggatcggcgttgaagtcatgccttatggtgtgcgctgcttgaaagcgattgctcaggtctttgacatacaattcgagttcgaggaatttgactttgcaagctgcgactattatatgaagcatggcgacatgttaccgaaagattggaaagagacgctcggcaagttcgacgctctctactttggtgctgttggcatgccaaatttggtcaacgacgaggtgtctctctggggcagtttgctgaagtttcgtcgcgaattcgatcagtacatcaatctgcgaccatgccgattacttcatggtgtaccctcgcctctagcaaaccgcaaacctggagatatcgatttttggattgttcgagagaataccgagggcgaatacagcagcataggaggcaagatcttcgagggaactgaccgcgagacggtcattcaggaaacaatcatgacgcgtgtaggagtggatcgagtgctcaagtatgctttcgagttggcggaaaaggcaccgcgcaagcggctaaccagtgcaacgaagagcaacgggatcagcataacgatgccatggtgggatacgagagttgccgagatggccaagcaattccctaacgtgaatctggataaatatcacattgatatcctgactgcgcattttgtccaacgacccgatcacttcgacgtcgttgttggttctaatttatttggtgatattctttctgaccttgggccagcttgtaccggcacaatcggcatcgctccctcgggcaatatcaatccagaaggcaaatttcccagtctatttgagccagtacacggaagcgcaccggacatcgctggtaagggtattgctaatcccgttggcatgatctgggccggtcagatgctattgaagcactttggccacgaagaggcggcaagtgtgctgttgaaagcgatcgagaatgttctcgcgaggggtggatcagaagtcttgacaaaagatatgggaggaagtggaaacactgagagcttgggcgctgcaattgagaaagaaatttttgcaattgtaggacgttga

SEQ ID NO: 23982 - protein, 364 aa, Muscodor strobelii
  misc_feature: SGI Peptide ID NO. 568170
  misc_feature (7)..(354): Pfam Id: PF00180 Pfam Desc: Isocitrate/isopropylmalate dehydrogenase
  misc_feature (2)..(360): NCBI GI: 46114664 Blast Desc: FG03174.1 [Gibberella zeae PH-1]
  misc_feature (4)..(358): NCBI GI: 92114894 Blast Desc: tartrate dehydrogenase [Chromohalobacter salexigens DSM 3043] gi|91797984|gb|ABE60123.1| Tartrate dehydrogenase [Chromohalobacter salexigens DSM 3043]
  misc_feature (7)..(358): NCBI GI: 251790815 Blast Desc: tartrate dehydrogenase [Dickeya zeae Ech1591] gi|247539436|gb|ACT08057.1| tartrate dehydrogenase [Dickeya zeae Ech1591]
  misc_feature (1)..(354): NCBI GI: 258639589 Blast Desc: tartrate dehydrogenase [Pantoea sp. At-9b] gi|258530976|gb|EEV99378.1| tartrate dehydrogenase [Pantoea sp. At-9b]
  misc_feature (7)..(358): NCBI GI: 271499418 Blast Desc: tartrate dehydrogenase [Dickeya dadantii Ech586] gi|270342973|gb|ACZ75738.1| tartrate dehydrogenase [Dickeya dadantii Ech586]
  misc_feature (1)..(358): NCBI GI: 242240571 Blast Desc: tartrate dehydrogenase [Dickeya dadantii Ech703] gi|242132628|gb|ACS86930.1| tartrate dehydrogenase [Dickeya dadantii Ech703]
  misc_feature (1)..(354): NCBI GI: 90420711 Blast Desc: tartrate dehydrogenase [Aurantimonas manganoxydans SI85-9A1] gi|90335002|gb|EAS48763.1| tartrate dehydrogenase [Aurantimonas manganoxydans SI85-9A1]
  misc_feature (4)..(358): NCBI GI: 113866506 Blast Desc: 3-isopropylmalate dehydrogenase [Ralstonia eutropha H16] gi|113525282|emb|CAJ91627.1| 3-Isopropylmalate dehydrogenase [Ralstonia eutropha H16]
  misc_feature (7)..(358): NCBI GI: 145589211 Blast Desc: tartrate dehydrogenase [Polynucleobacter necessarius subsp. asymbioticus QLW-P1DMWA-1] gi|145047617|gb|ABP34244.1| tartrate dehydrogenase [Polynucleobacter necessarius subsp.
  misc_feature (7)..(358): NCBI GI: 73540168 Blast Desc: tartrate dehydrogenase [Ralstonia eutropha JMP134] gi|72117581|gb|AAZ59844.1| Tartrate dehydrogenase [Ralstonia eutropha JMP134]
  misc_feature (4)..(359): SWISSPROT Homolog: EC 1.1.1.83 D-malate dehydrogenase (decarboxylating)
  misc_feature (4)..(359): SWISSPROT Homolog: EC 4.1.1.73 Tartrate decarboxylase
  misc_feature (4)..(359): SWISSPROT Homolog: EC 1.1.1.93 Tartrate dehydrogenase
MVGKPLRIAVIAGDGIGVEVMPYGVRCLKAIAQVFDIQFEFEEFDFASCDYYMKHGDMLPKDWKETLGKFDALYFGAVGMPNLVNDEVSLWGSLLKFRREFDQYINLRPCRLLHGVPSPLANRKPGDIDFWIVRENTEGEYSSIGGKIFEGTDRETVIQETIMTRVGVDRVLKYAFELAEKAPRKRLTSATKSNGISITMPWWDTRVAEMAKQFPNVNLDKYHIDILTAHFVQRPDHFDVVVGSNLFGDILSDLGPACTGTIGIAPSGNINPEGKFPSLFEPVHGSAPDIAGKGIANPVGMIWAGQMLLKHFGHEEAASVLLKAIENVLARGGSEVLTKDMGGSGNTESLGAAIEKEIFAIVGR

SEQ ID NO: 23983 - DNA, 1527 bp, Muscodor strobelii
  misc_feature: SGI cDNA ID NO. 568171
  misc_feature: Encodes the peptide sequence at SEQ ID NO 23984
atggcattatccaagatagccctttctagcctttcgagtgccttggtcatagtgacactaagcctgatcatctatcgtaccggcgtcttgatttatagagtctggtttcatcctcttcgcaactttcctgggccaaaatatcttgctgctactaagttaccttacctcgtgagggtgaatctcttaggaaattgggtgcacggtgtgacgaagctgcatgccgagtatggccccattgttcgcattgccccaaaccatctcgctgttgatggatctgtcggctggccagacgtctgtgcacatcggactcacgacggcgccgagtgggagaagttgcgctcgttcttctttccaggtgccgataaatctatcgtcgctgcgcctcgtgatgttcatcgtcgacagcgtaggcaactgagtcatgcctttagcgacgccgccatgtatgagcaggagcctatcgtcaactcttatgtgaacaagctcataacgcaacttgctaaaagtgcgagtcatggagagcctctcgacatagtgaaatggctcaacctcacaacattcgacatcatcagcgacctagtttttgctgctcccttcggtagcctcgatagtagcgaatatcatccttgggtgaacaacgtttttgagggcattcgaggtagtgctttgatgcgtttcatggcgtcttatccgattctctggccagcatggaaagtgataatggagactaaagcagcgaagatgttcgcacagcatcagctcttctcggcggagatggcttcggctcgtatggtacttggggaagagccggccggacgtcgagacttcatgacgtacatgatgcgcgacaaccgcaagggtgaaaagggacttgagaagcacgagatcaggatgaactcgggaatattgatcttggcaggcagcgaaaccactgccacagccctttcaggtctcttctactatctctttcagacaaaatccgcgtataaggcgttgacggaagaaatacgtgccacgttcagcgaagagagcgatattacaatccgaagtaccgcaccgcttgtctatctacaagcctgcatcgaagagactctacgaatctatcctcccgcgtcggagacgccgccccgcgtttctccgggtgctaccattggcggccgatgggttccacgtggtaccgtgatctccatctatcagtatgcgacatttcgcaatcctcaacatttcgccgaagcgaattcgttcaggcctgggcgatggctatcgcattctgacccacaatacgatgccatgtttaatcatgataatcatgctatgttcaagccgttcagtgttggaccccgtgattgtatcggcaagaatctggcatatgccgaaatgcgccttatcgtcgctcgaattctgtatcgctttgactacgagctggtcgataaccaagagaaatggaacgatcaacagcaaatcttcacagtgtggaacaaatcgccactgatggtcaagctgaaagctgtttatggggcacactag

SEQ ID NO: 23984 - protein, 508 aa, Muscodor strobelii
  misc_feature: SGI Peptide ID NO. 568171
  misc_feature (53)..(501): Pfam Id: PF00067 Pfam Desc: Cytochrome P450
  misc_feature (122)..(501): Pfam Id: PF00067 Pfam Desc: Cytochrome P450
  misc_feature (6)..(502): NCBI GI: 46109716 Blast Desc: FG01740.1 [Gibberella zeae PH-1]
  misc_feature (23)..(504): NCBI GI: 189211941 Blast Desc: cytochrome P450 3A17 [Pyrenophora tritici-repentis Pt-1C-BFP] gi|187979497|gb|EDU46123.1| cytochrome P450 3A17 [Pyrenophora tritici-repentis Pt-1C-BFP]
  misc_feature (3)..(502): NCBI GI: 39968473 Blast Desc: MGG_02329 [Magnaporthe grisea 70-15] gi|145014094|gb|EDJ98735.1| MGG_02329 [Magnaporthe grisea 70-15]
  misc_feature (29)..(504): NCBI GI: 39975105 Blast Desc: MGG_00301 [Magnaporthe grisea 70-15] gi|145018819|gb|EDK03098.1| MGG_00301 [Magnaporthe grisea 70-15]
  misc_feature (1)..(501): NCBI GI: 145614919 Blast Desc: conserved [Magnaporthe grisea 70-15] gi|149209141|ref|XP_001521945.1| MGCH7_ch7g63 [Magnaporthe grisea 70-15] gi|86196018|gb|EAQ70656.1| MGCH7_ch7g63 [Magnaporthe
  misc_feature (8)..(502): NCBI GI: 39943628 Blast Desc: MGG_03825 [Magnaporthe grisea 70-15] gi|145014513|gb|EDJ99081.1| MGG_03825 [Magnaporthe grisea 70-15]
  misc_feature (6)..(506): NCBI GI: 121716300 Blast Desc: benzoate 4-monooxygenase cytochrome P450 [Aspergillus clavatus NRRL 1] gi|119403916|gb|EAW14333.1| benzoate 4-monooxygenase cytochrome P450 [Aspergillus clavatus NRRL 1]
  misc_feature (13)..(504): NCBI GI: 119481647 Blast Desc: benzoate 4-monooxygenase cytochrome P450 [Neosartorya fischeri NRRL 181] gi|119409006|gb|EAW18955.1| benzoate 4-monooxygenase cytochrome P450 [Neosartorya fischeri NRRL 181]
  misc_feature (16)..(504): NCBI GI: 238497530 Blast Desc: benzoate 4-monooxygenase cytochrome P450, [Aspergillus flavus NRRL3357] gi|220693274|gb|EED49619.1| benzoate 4-monooxygenase cytochrome P450, [Aspergillus flavus NRRL3357]
  misc_feature (22)..(501): NCBI GI: 224969386 Blast Desc: cytochrome P450 ClCP1 [Glomerella lindemuthiana]
  misc_feature (113)..(480): SWISSPROT Homolog: EC 1.14.14.1 Unspecific monooxygenase
MALSKIALSSLSSALVIVTLSLIIYRTGVLIYRVWFHPLRNFPGPKYLAATKLPYLVRVNLLGNWVHGVTKLHAEYGPIVRIAPNHLAVDGSVGWPDVCAHRTHDGAEWEKLRSFFFPGADKSIVAAPRDVHRRQRRQLSHAFSDAAMYEQEPIVNSYVNKLITQLAKSASHGEPLDIVKWLNLTTFDIISDLVFAAPFGSLDSSEYHPWVNNVFEGIRGSALMRFMASYPILWPAWKVIMETKAAKMFAQHQLFSAEMASARMVLGEEPAGRRDFMTYMMRDNRKGEKGLEKHEIRMNSGILILAGSETTATALSGLFYYLFQTKSAYKALTEEIRATFSEESDITIRSTAPLVYLQACIEETLRIYPPASETPPRVSPGATIGGRWVPRGTVISIYQYATFRNPQHFAEANSFRPGRWLSHSDPQYDAMFNHDNHAMFKPFSVGPRDCIGKNLAYAEMRLIVARILYRFDYELVDNQEKWNDQQQIFTVWNKSPLMVKLKAVYGAH

SEQ ID NO: 23985 - DNA, 573 bp, Muscodor strobelii
  misc_feature: SGI EST ID NO. CUFF.56426.0
  misc_feature: Variant of the nucleotide sequence at SEQ ID NO 23983
cgacatttcgcaatcctcaacatttcgccgaagcgaattcgttcaggcctgggcgatggctatcgcattctgacccacaatacgatgccatgtttaatcatgataatcatgctatgttcaagccgttcagtgttggaccccgtgattgtatcggcaagaatctggcatatgccgaaatgcgccttatcgtcgctcgaattctgtatcgctttgactacgagctggtcgataaccaagagaaatggaacgatcaacagcaaatcttcacagtgtggaacaaatcgccactgatggtcaagctgaaagctgtttatggggcacactagtggtataagatttgcatttcgggacgtaattttgcttgaaaaaatggcattaaacacctccgtagcgccccggagtctcacgcctacgtcaatattggtctgtctctctgagtgaaatgtatcattcttaagatacaatcagctcctcctgaatgcagtatggtccccaatcaattgtagatgagatactttatgtttgcaaatgctcgtttttatgcaggcgttaataaagatagaaggccaagag

SEQ ID NO: 23986 - DNA, 2295 bp, Muscodor strobelii
  misc_feature: SGI cDNA ID NO. 568172
  misc_feature: Encodes the peptide sequence at SEQ ID NO 23987
atgtatacctcgcggcgcccgggcgttgtctgcccggatcggatacccgcgactggcctaacagtaatatacgagcccgaaaacccaaaagtcaatattgtattagtccacggcttgcaaggccacccttatcgcacatgggcaaaacctattccctatcatcctcaaacgcctgacaataaaaaagcctttggaaaaatagcgactgtcttccgaagtcgatcaaagtccatacaacccgacattgatcaacaaaatcacaatgcgccgcgtccgtcattaccggacagcagtggaatggctgtcaagtctgatgccgttcacccccagatattgagaaagaacttttattggccaagggatgctctgccagggtattgtcccgaggcccgcatctcggtttggggttacgatacaaacgttgtgaagaggcccggcaagacaacaaacaagagcacgatctactctcatggcaaagatcttttatatgagctagaaaggtctctagatagctcgtgccctctgttgttcgtcgcacattcactgggcggtatcattgtgaaacagatgcttgctgttgcgcttgagtccaatagagaagaattgaagaatgtcgttgaaatgacaggaggcgtggtatttctcggtactcctcatagaggtagcaaagagctggcgagacttggcaaacgtgtgagacgactgttagacattacaggtgtcgacacaagcccgagcatactcgcggctcttgctatggacacgtctgatctggcaagatgtcaagactcgttttctcgtatctggtctcggtgtggagggagcttcgtggttaaaacctttcaagaaggacttggcttcatgcccacgagtatccgcgcactcaaccaaaagatcgttgaagaactttcatcttcgcttggggatgcccgagaagaagctgaaacgttacaagcaaaccacagggatatgtgcagattcacagatgagaacagcccagcagcccgcaaagtgctgcatgccatcaagaacatagtagaagacaagattacagcacatgggaacagcgatggtgatgagcttgaagagaatgatatacgtccctcgcaaataaataaatcgtcatcagatcaacagtcgatagactgggcgtttccacagtttgcggaacaaattggaacagacagacacgagcaaagtcgactggaagaatttctccaatctctcgaatatcatagaatgaatgaacgcaagctcctgatcaaacgacccacgctgggaacctgcgaatggctattacagcatcctgaatttatcaattggtacaatcagcacaacactgcgggtagtaatacctttttatggattaaaggccatccggggtcgggaaaatctgtcatgatgcgagaaatatgtcgcgtacttgaggccaagaaagacgacgctaaaggaatccatgtggcctctttcttctttgatgcgaacggtcctacgatgtcccgtagtgtcaacgaggacattgaaaaatatttgaagctcaagctcgggccgtattgctcggataagaacctcatgctagaagacttgattgttcgcattgctgacaagtcctctgggatttttctatgggttcgattggtggtcgatcttttgttacaagatctggatgcagggatcgcgaatctagaagtactggaagaacgactagcggaagttccaactacgcttcgagagctatactcaaatgtgattcaaagggcttcggaggatagagggttgatgtgtcgagttttccagtgggcaatattcggcgaggaattacttgtgcgcgactggcagcacttgcttccgttccttcaatgccctcccccacattctttgaatggctgccagaagtcaagatggtgggcgagatccgatgaccagattgacaagcagattcgccatctttctatgggcctattagaagtggcaacggatgtcgagaccagaaagaatctccggacagaggacgactgggattcgatggtgggcggcgcaggctccatggatctaggcatgggggaaacaagaatggtgcgtgtgatccacgagacagttcgcgaatattttattaaagatgatggctttacgatattgtgcgaagctttctgcgaaaacatcgaaggaatcgcctatagtaatatgataaatctatgccttgatttcttaggcatgcccgagttcgacactctcgctcacgctcgagccgaatacaagaggaacaaagccggattattcataccgtacgtgtga

SEQ ID NO: 23987 - protein, 764 aa, Muscodor strobelii
  misc_feature: SGI Peptide ID NO. 568172
  misc_feature (12)..(502): NCBI GI: 116197903 Blast Desc: CHGG_07107 [Chaetomium globosum CBS 148.51] gi|88178386|gb|EAQ85854.1| CHGG_07107 [Chaetomium globosum CBS 148.51]
  misc_feature (10)..(502): NCBI GI: 46117406 Blast Desc: FG04545.1 [Gibberella zeae PH-1]
  misc_feature (13)..(502): NCBI GI: 256722577 Blast Desc: NECHADRAFT_96544 [Nectria haematococca mpVI 77-13-4]
  misc_feature (32)..(496): NCBI GI: 116204449 Blast Desc: CHGG_10108 [Chaetomium globosum CBS 148.51] gi|88176236|gb|EAQ83704.1| CHGG_10108 [Chaetomium globosum CBS 148.51]
  misc_feature (32)..(333): NCBI GI: 171685416 Blast Desc: protein product [Podospora anserina] gi|170942669|emb|CAP68321.1| protein product [Podospora anserina]
  misc_feature (15)..(365): NCBI GI: 261358802 Blast Desc: pfs [Verticillium albo-atrum VaMs.102]
  misc_feature (504)..(754): NCBI GI: 116197903 Blast Desc: CHGG_07107 [Chaetomium globosum CBS 148.51] gi|88178386|gb|EAQ85854.1| CHGG_07107 [Chaetomium globosum CBS 148.51]
  misc_feature (32)..(475): NCBI GI: 171678952 Blast Desc: protein product [Podospora anserina] gi|170937547|emb|CAP62204.1| protein product [Podospora anserina]
  misc_feature (449)..(757): NCBI GI: 256722577 Blast Desc: NECHADRAFT_96544 [Nectria haematococca mpVI 77-13-4]
  misc_feature (158)..(503): NCBI GI: 171686926 Blast Desc: protein product [Podospora anserina] gi|170943424|emb|CAP69077.1| protein product [Podospora anserina]
MYTSRRPGVVCPDRIPATGLTVIYEPENPKVNIVLVHGLQGHPYRTWAKPIPYHPQTPDNKKAFGKIATVFRSRSKSIQPDIDQQNHNAPRPSLPDSSGMAVKSDAVHPQILRKNFYWPRDALPGYCPEARISVWGYDTNVVKRPGKTTNKSTIYSHGKDLLYELERSLDSSCPLLFVAHSLGGIIVKQMLAVALESNREELKNVVEMTGGVVFLGTPHRGSKELARLGKRVRRLLDITGVDTSPSILAALAMDTSDLARCQDSFSRIWSRCGGSFVVKTFQEGLGFMPTSIRALNQKIVEELSSSLGDAREEAETLQANHRDMCRFTDENSPAARKVLHAIKNIVEDKITAHGNSDGDELEENDIRPSQINKSSSDQQSIDWAFPQFAEQIGTDRHEQSRLEEFLQSLEYHRMNERKLLIKRPTLGTCEWLLQHPEFINWYNQHNTAGSNTFLWIKGHPGSGKSVMMREICRVLEAKKDDAKGIHVASFFFDANGPTMSRSVNEDIEKYLKLKLGPYCSDKNLMLEDLIVRIADKSSGIFLWVRLVVDLLLQDLDAGIANLEVLEERLAEVPTTLRELYSNVIQRASEDRGLMCRVFQWAIFGEELLVRDWQHLLPFLQCPPPHSLNGCQKSRWWARSDDQIDKQIRHLSMGLLEVATDVETRKNLRTEDDWDSMVGGAGSMDLGMGETRMVRVIHETVREYFIKDDGFTILCEAFCENIEGIAYSNMINLCLDFLGMPEFDTLAHARAEYKRNKAGLFIPYV

SEQ ID NO: 23988 - DNA, 321 bp, Muscodor strobelii
  misc_feature: SGI EST ID NO. CUFF.56451.0
  misc_feature: Variant of the nucleotide sequence at SEQ ID NO 23986
ggatgctctgccagggtattgtcccgaggcccgcatctcggtttggggttacgatacaaacgttgtgaagaggcccggcaagacaacaaacaagagcacgatctactctcatggcaaagatcttttatatgagctagaaaggtctctagatagctcgtgccctctgttgttcgtcgcacattcactgggcggtatcattgtgaaacagatgcttgctgttgcgcttgagtccaatagagaagaattgaagaatgtcgttgaaatgacaggaggcgtggtatttctcggtactcctcatagaggtagcaaagagctggcgag

SEQ ID NO: 23989 - DNA, 1896 bp, Muscodor strobelii
  misc_feature: SGI cDNA ID NO. 568173
  misc_feature: Encodes the peptide sequence at SEQ ID NO 23990
atgtcgcaatgtaggccactcgactggcagagagattgcgttttaatagatggtgacacagagggctcaccactccagccctatggggatatttcaggcactggggtcatcatcgggttcgctggcacgggatatcttgtcttgctcatcgtcgtcgtcaattactttgttgcctatgaccctacgcgggacccgtgggaagaagatgacaatggtgggcgacaatgggtcgccaatccgatcgatatcatggtgcttcgatgggtgcgccgacttcgaccagggactaacgactcattccgtggccgtggctcatatctgcaacaatcttttaacgagggcatcctcgtcttgtgcgatgtacagctattcaccgggctagggatcctcgtatgcggcttcactttggcataccagtgcaggctagacgcctaccactggctcataatcacgtacctcgcctggttctcgactgtcacccatctgtcgggcctgatagtgctccgcggtacccccaagggtcgtcgcccgtatgccaagtacatccgcttctccctcatggccgtcttggtgatcatactactcgtggcgttcataccgaccatgttctttgactgggccagcggcgaggagagctcggtggctgacatcgcgtcggtcgccatttgtttcctggatattagtctgggccgctcactcgtgcgcgactatcttgacaaactgggtcacccctacgctgtgagtggctacggtcgttataccttagagacgtcgcatgcattccagacggcgatcctctctatcgttctgttgctgtccgccttcatcgcccgctccgttagactcttcaagccgctctcggagtccttcaacagcgttactagacggccaatttcgcagctgttgcggcgcatattgaggcgattagatgcgagaaagactgcgtcttctacctccgcgcgtcggtgggatctgatggtcatgcgcccggtactcgcatttttcatcatgcttcgaatgtctgctgacttactaggttccatgttctttgagctcttatggctgctgattattctactctggggaacggtgaagcttctgggggctagatattctgcgcacaaggaacagagttccgcgctgctggacgagtaccaatggacatttggtcagatattaccggtatttcttctcgtagggcccgtatttggaattgcaatcaccgctatcaccgattttgtcatatccaagcaggagaaccggacgattaatactcatgatggaaccatgaagtatcaggctgtcaacggtagagaggttatactaggtcacgatccggccaagaagaatgcgcaggcatcattgcaggatccgatatcctcaaaccacaatatcgagctctcagactggctggaacccggctattacaccaggaccagatggagttttgtggctattaccagcgtatgtctccttttcatcggggtagctctgctcgtatttggtaccaccttcaacctctattcgggcgccgagccacagtggacgccttacgaggtgtgggtgacagaatttggacttgtcttcgtcgtcctgttcggttatcccttaggttctttctggacagtcctgttcggtctgtgcttgagccgttggatcacaacgcagcgcttaggcgccctccgacggctggcatatttctttctgtctgctatcgtttttggactatttttcgggttgctgtttactggagtgttcttcaatcatgagtacaaggcagggttgaacctcacgacaattgagggccgaatcggtgtcactatcctccttcatcttgctattcttgctgtatacgaggttgtgtgcaccgttggagatcaggcgtcggttcgataa

SEQ ID NO: 23990 - protein, 631 aa, Muscodor strobelii
  misc_feature: SGI Peptide ID NO. 568173
  misc_feature (16)..(590): NCBI GI: 256723152 Blast Desc: NECHADRAFT_81220 [Nectria haematococca mpVI 77-13-4]
  misc_feature (36)..(628): NCBI GI: 116206042 Blast Desc: [Chaetomium globosum CBS 148.51] gi|88182911|gb|EAQ90379.1| [Chaetomium globosum CBS 148.51]
  misc_feature (12)..(467): NCBI GI: 256729487 Blast Desc: NECHADRAFT_84111 [Nectria haematococca mpVI 77-13-4]
  misc_feature (46)..(410): NCBI GI: 255946836 Blast Desc: Pc22g01410 [Penicillium chrysogenum Wisconsin 54-1255] gi|211591202|emb|CAP97429.1| Pc22g01410 [Penicillium chrysogenum Wisconsin 54-1255]
  misc_feature (24)..(405): NCBI GI: 255954171 Blast Desc: Pc21g07980 [Penicillium chrysogenum Wisconsin 54-1255] gi|211589549|emb|CAP95695.1| Pc21g07980 [Penicillium chrysogenum Wisconsin 54-1255]
  misc_feature (74)..(409): NCBI GI: 261358880 Blast Desc: [Verticillium albo-atrum VaMs.102]
  misc_feature (25)..(433): NCBI GI: 189210591 Blast Desc: PTRG_11296 [Pyrenophora tritici-repentis Pt-1C-BFP] gi|187977720|gb|EDU44346.1| PTRG_11296 [Pyrenophora tritici-repentis Pt-1C-BFP]
  misc_feature (29)..(345): NCBI GI: 145258429 Blast Desc: An04g06800 [Aspergillus niger] gi|134074648|emb|CAK44681.1| protein product [Aspergillus niger]
  misc_feature (22)..(217): NCBI GI: 167540658 Blast Desc: EfHP1 [Elsinoe fawcettii]
  misc_feature (30)..(214): NCBI GI: 189197633 Blast Desc: conserved [Pyrenophora tritici-repentis Pt-1C-BFP] gi|187981102|gb|EDU47728.1| conserved [Pyrenophora tritici-repentis Pt-1C-BFP]
MSQCRPLDWQRDCVLIDGDTEGSPLQPYGDISGTGVIIGFAGTGYLVLLIVVVNYFVAYDPTRDPWEEDDNGGRQWVANPIDIMVLRWVRRLRPGTNDSFRGRGSYLQQSFNEGILVLCDVQLFTGLGILVCGFTLAYQCRLDAYHWLIITYLAWFSTVTHLSGLIVLRGTPKGRRPYAKYIRFSLMAVLVIILLVAFIPTMFFDWASGEESSVADIASVAICFLDISLGRSLVRDYLDKLGHPYAVSGYGRYTLETSHAFQTAILSIVLLLSAFIARSVRLFKPLSESFNSVTRRPISQLLRRILRRLDARKTASSTSARRWDLMVMRPVLAFFIMLRMSADLLGSMFFELLWLLIILLWGTVKLLGARYSAHKEQSSALLDEYQWTFGQILPVFLLVGPVFGIAITAITDFVISKQENRTINTHDGTMKYQAVNGREVILGHDPAKKNAQASLQDPISSNHNIELSDWLEPGYYTRTRWSFVAITSVCLLFIGVALLVFGTTFNLYSGAEPQWTPYEVWVTEFGLVFVVLFGYPLGSFWTVLFGLCLSRWITTQRLGALRRLAYFFLSAIVFGLFFGLLFTGVFFNHEYKAGLNLTTIEGRIGVTILLHLAILAVYEVVCTVGDQASVR

SEQ ID NO: 23991 - DNA, 2121 bp, Muscodor strobelii
  misc_feature: SGI EST ID NO. CUFF.56457.1
  misc_feature: Variant of the nucleotide sequence at SEQ ID NO 23989
tgcactttcacagactaagttcgctctctgaatatggctctaggtcatcatcgggttcgctggcacgggatatcttgtcttgctcatcgtcgtcgtcaattactttgttgcctatgaccctacgcgggacccgtgggaagaagatgacaatggtgggcgacaatgggtcgccaatccgatcgatatcatggtgcttcgatgggtgcgccgacttcgaccagggactaacgactcattccgtggccgtggctcatatctgcaacaatcttttaacgaggtaatgatagagatactatcccttcactgccatgtcgccataacgttgtctcctaagggatcggctaaatgttaaatttagggcatcctcgtcttgtgcgatgtacagctattcaccgggctagggatcctcgtatgcggcttcactttggcataccagtgcaggctagacgcctaccactggctcataatcacgtacctcgcctggttctcgactgtcacccatctgtcgggcctgatagtgctccgcggtacccccaagggtcgtcgcccgtatgccaagtacatccgcttctccctcatggccgtcttggtgatcatactactcgtggcgttcataccgaccatgttctttgactgggccagcggcgaggagagctcggtggctgacatcgcgtcggtcgccatttgtttcctggatattagtctgggccgctcactcgtgcgcgactatcttgacaaactgggtcacccctacgctgtgagtggctacggtcgttataccttagagacgtcgcatgcattccagacggcgatcctctctatcgttctgttgctgtccgccttcatcgcccgctccgttagactcttcaagccgctctcggagtccttcaacagcgttactagacggccaatttcgcagctgttgcggcgcatattgaggcgattagatgcgagaaagactgcgtcttctacctccgcgcgtcggtgggatctgatggtcatgcgcccggtactcgcatttttcatcatgcttcgaatgtctgctgacttactaggttccatgttctttgagctcttatggctgctgattattctactctggggaacggtgaagcttctgggggctagatattctgcgcacaaggaacagagttccgcgctgctggacgagtaccaatggacatttggtcagatattaccggtatttcttctcgtagggcccgtatttggaattgcaatcaccgctatcaccgattttgtcatatccaagcaggagaaccggacgattaatactcatgatggaaccatgaagtatcaggctgtcaacggtagagaggttatactaggtcacgatccggccaagaagaatgcgcaggcatcattgcaggatccgatatcctcaaaccacaatatcgagctctcagactggctggaacccggctattacaccaggaccagatggagttttgtggctattaccagcgtatgtctccttttcatcggggtagctctgctcgtatttggtaccaccttcaacctctattcgggcgccgagccacagtggacgccttacgaggtgtgggtgacagaatttggacttgtcttcgtcgtcctgttcggttatcccttaggttctttctggacagtcctgttcggtctgtgcttgagccgttggatcacaacgcagcgcttaggcgccctccgacggctggcatatttctttctgtctgctatcgtttttggactatttttcgggttgctgtttactggagtgttcttcaatcatgagtacaaggcagggttgaacctcacgacaattgagggccgaatcggtgtcactatcctccttcatcttgctattcttgctgtatacgaggttgtgtgcaccgttggagatcaggcgtcggttcgataacattgatggtgaggcagggttggggcgcattgcagttaagatagcgaatattggattatgtggttttagcgtagtgccgtggaaatcatcgatatatctgctaggactcacatatgctaacctcattgctcgaaaatagacacaaaccatccgagggaaagcatacggtcaagcagatgataagcaacacattagttatgccgtga

SEQ ID NO: 23992 - DNA, 1827 bp, Muscodor strobelii
  misc_feature: SGI cDNA ID NO. 568174
  misc_feature: Encodes the peptide sequence at SEQ ID NO 23993
atgacgttagaagcgcaggcggccccagcgccagcaccggcgccgctgtcaacaaagcggccagctaacgacagccccgttgtacgaacaccctcgagaatagctacaccgccgccccccgaccgcgagcaattgcagccacgtccgaaccttgataatgtcaatttgaaagttcctcgtcacagcagtcgcctgaccgatagagccagcactggcgctgtcgatgccgactctctaacccgcgctctatcacgagagctatccacagataggagggacagcgcccctagtgctagccccagccggaagcgccaacgggtcaatggcgatagattcattccttcgcggtccggacaagatcttcaagcgagctttagtcttctccacgaggaaggttccccggcaactccttctcggaagaagcgcactccacatggcgagcttcactttcaaaagaccgaggaggccaatcgtacattttcaactctattaagagctgagctgtttgaaaacacaataccacaagctactccccccgcagcatcaccagatggcaacgtgcaaggctcatcacactctacccgtgtccatgacccaaccagatcacatacacccccaaacaacccgccacctactcttccctctagcttcaccccgtctaccccccacaagaacctcttctcatacatgtctccgcgtcaccatcatatagcgggccatcctacacccactaggacaccgcaaagcagacatggcccaaatttggatacccgctcagaaatttacagcttatctccggtgcgctttggcagtcagcagatgcttctcagtccgcgacgacaacctcgagctgtcagcaaagtaccattcaaggttctcgatgcccccgagctggcagatgatttctacttgaacttagtagactggggcagtgccaatgtgctgggtgttgggctgggttcaagtgtttacatgtggaacgcccagacgagtcgcgtaaataagctttgcacgctcgaagacgatacagtcacaagtgtttcttggattcaaaaaggcacccatctggcgataggcacagggaaaggcttggtgcaaatttgggacgccgagagaacgaggcgactcaggacaatgacaggacataccgcgcgcgttggatcattggcatggaacactcatattctgacctcaggttcgcgggaccggttgatataccaccgcgatgtacgtgcccctgatcaatggatgcggaagctcgtaggtcacaagcaagaagtttgtggcctaaaatggaactgcgaggacggtcagctcgcgagtggaggtaacgacaacaagttgatggtctgggacaaactttccgaaacgccgctctggaagttttctgatcataccgctgcggttaaagcgatcgcgtggtcaccccatcaacgtggtcttcttgcctcaggtggaggaacggctgacagaagaatcatctttcacgacaccgtgcggggaacggttatcaacgagatcgatactggcagccaagtctgtaatatttcgtggtccaagaattccaacgaaatcgtctccacgcatggatacagtcagaaccagatcgtcgtctggaaatacccatccatgtcccaggttgtgagtctcacgggacatacgtaccgtgtactatacctggcaatgagtcctgacggacgaaccgttgtgactggagccggcgacgagaccctgcgattctggacggtcttcgggcgacgtcctggccaacgagaggacagcgatagtggcagtggacgactggcggattggggcgtcatacgataa

SEQ ID NO: 23993 - protein, 608 aa, Muscodor strobelii
  misc_feature: SGI Peptide ID NO. 568174
  misc_feature (414)..(452): Pfam Id: PF00400 Pfam Desc: WD domain, G-beta repeat
  misc_feature (544)..(582): Pfam Id: PF00400 Pfam Desc: WD domain, G-beta repeat
  misc_feature (456)..(486): Pfam Id: PF00400 Pfam Desc: WD domain, G-beta repeat
  misc_feature (373)..(409): Pfam Id: PF00400 Pfam Desc: WD domain, G-beta repeat
  misc_feature (18)..(608): NCBI GI: 46110052 Blast Desc: FG01908.1 [Gibberella zeae PH-1]
  misc_feature (55)..(608): NCBI GI: 156051556 Blast Desc: conserved [Sclerotinia sclerotiorum 1980] gi|154704963|gb|EDO04702.1| conserved [Sclerotinia sclerotiorum 1980]
  misc_feature (24)..(608): NCBI GI: 154302024 Blast Desc: BC1G_10249 [Botryotinia fuckeliana B05.10] gi|150855641|gb|EDN30833.1| BC1G_10249 [Botryotinia fuckeliana B05.10]
  misc_feature (32)..(588): NCBI GI: 38566816 Blast Desc: FZR protein (fizzy-related protein) [Neurospora crassa]
  misc_feature (32)..(588): NCBI GI: 85099289 Blast Desc: NCU01269 [Neurospora crassa OR74A] gi|28922268|gb|EAA31511.1| NCU01269 [Neurospora crassa OR74A]
  misc_feature (1)..(608): NCBI GI: 171692193 Blast Desc: protein product [Podospora anserina] gi|170946045|emb|CAP72846.1| protein product [Podospora anserina]
  misc_feature (74)..(608): NCBI GI: 115384918 Blast Desc: ATEG_01641 [Aspergillus terreus NIH2624] gi|114196698|gb|EAU38398.1| ATEG_01641 [Aspergillus terreus NIH2624]
  misc_feature (66)..(608): NCBI GI: 67525015 Blast Desc: AN2965.2 [Aspergillus nidulans FGSC A4] gi|40744360|gb|EAA63536.1| AN2965.2 [Aspergillus nidulans FGSC A4] gi|259486090|tpe|CBF83655.1| TPA: cell cycle regulatory FGSC
  misc_feature (62)..(608): NCBI GI: 71000138 Blast Desc: cell cycle regulatory protein (Srw1) [Aspergillus fumigatus Af293] gi|66852423|gb|EAL92748.1| cell cycle regulatory protein (Srw1), [Aspergillus fumigatus Af293] cell cycle protein
  misc_feature (68)..(608): NCBI GI: 169767800 Blast Desc: [Aspergillus oryzae RIB40] gi|238484709|ref|XP_002373593.1| cell cycle regulatory protein (Srw1), [Aspergillus flavus NRRL3357] gi|83766226|dbj|BAE56369.1|
MTLEAQAAPAPAPAPLSTKRPANDSPVVRTPSRIATPPPPDREQLQPRPNLDNVNLKVPRHSSRLTDRASTGAVDADSLTRALSRELSTDRRDSAPSASPSRKRQRVNGDRFIPSRSGQDLQASFSLLHEEGSPATPSRKKRTPHGELHFQKTEEANRTFSTLLRAELFENTIPQATPPAASPDGNVQGSSHSTRVHDPTRSHTPPNNPPPTLPSSFTPSTPHKNLFSYMSPRHHHIAGHPTPTRTPQSRHGPNLDTRSEIYSLSPVRFGSQQMLLSPRRQPRAVSKVPFKVLDAPELADDFYLNLVDWGSANVLGVGLGSSVYMWNAQTSRVNKLCTLEDDTVTSVSWIQKGTHLAIGTGKGLVQIWDAERTRRLRTMTGHTARVGSLAWNTHILTSGSRDRLIYHRDVRAPDQWMRKLVGHKQEVCGLKWNCEDGQLASGGNDNKLMVWDKLSETPLWKFSDHTAAVKAIAWSPHQRGLLASGGGTADRRIIFHDTVRGTVINEIDTGSQVCNISWSKNSNEIVSTHGYSQNQIVVWKYPSMSQVVSLTGHTYRVLYLAMSPDGRTVVTGAGDETLRFWTVFGRRPGQREDSDSGSGRLADWGVIR

SEQ ID NO: 23994 - DNA, 3150 bp, Muscodor strobelii
  misc_feature: SGI EST ID NO. CUFF.56502.0
  misc_feature: Variant of the nucleotide sequence at SEQ ID NO 23992
gtaggtacacgcgctggcaattgaagcagttgcgctgtagctgcgtggttgagggcgtgggcgagaagggaaagcgctgggtgtctctccctagctcttgcactgttaccggcagcgcgacgggcaagatcccctggcacggtccctgcccgttcccatctcaggtgcaactcgcccccccaagtctccaaactctcgtctccctgtagttgccatccaacccgccgcctctttctaacctcatctccgtccacattcaccatccacctcactgcgcaacgcactctgcccaccatcgacgaccgatgacaacgctctcctctgtctctgcgcaataaagatacagagtcaacatactccaacatccttcgacgacataacatccattcttcttgctgcatactcgagagctcggcggacgaacccgtcgtatttacactttcttagctgcaaccaaacaccgcgcgcaacgccctttgcatacttgctgttacttcaaatcgaccactttcacactcacaatcccgcgacactgctctgtcaactctttactgctacgggaggaacatcacaagagtatgcgataggaaagctggcacaatagagacatcggaggacttgcaggcccaagttgcaggccgacagctttcggcgtcgcatccatccttccaagcaaaacgccctcacacgtatccgcccaacattcttcattcccgaaacgatattcaattcattcgtgaccataactgctgtcctgctccatccccccgctgctcgacatagtttctgtgtcgggtagtcgctctcgagactatcatgacgttagaagcgcaggcggccccagcgccagcaccggcgccgctgtcaacaaagcggccagctaacgacagccccgttgtacgaacaccctcgagaatagctacaccgccgccccccgaccgcgagcaattgcagccacgtccgaaccttgataatgtcaatttgaaagttcctcgtcacagcagtcgcctgaccgatagagccagcactggcgctgtcgatgccgactctctaacccgcgctctatcacgagagctatccacagataggagggacagcgcccctagtgctagccccagccggaagcgccaacgggtcaatggcgatagattcattccttcgcggtccggacaagatcttcaagcgagctttagtcttctccacgaggaaggttccccggcaactccttctcggaagaagcgcactccacatggcgagcttcactttcaaaagaccgaggaggccaatcgtacattttcaactctattaagagctgagctgtttgaaaacacaataccacaagctactccccccgcagcatcaccagatggcaacgtgcaaggctcatcacactctacccgtgtccatgacccaaccagatcacatacacccccaaacaacccgccacctactcttccctctagcttcaccccgtctaccccccacaagaacctcttctcatacatgtctccgcgtcaccatcatatagcgggccatcctacacccactaggacaccgcaaagcagacatggcccaaatttggatacccgctcagaaatttacagcttatctccggtgcgctttggcagtcagcagatgcttctcagtccgcgacgacaacctcgagctgtcagcaaagtaccattcaaggttctcgatgcccccgagctggcagatgatttctacttgaacttagtagactggggcagtgccaatgtgctgggtgttgggctgggttcaagtgtttacatgtggaacgcccagacgagtcgcgtaaataagctttgcacgctcgaagacgatacagtcacaagtgtttcttggattcaaaaaggcacccatctggcgataggcacagggaaaggcttggtgcaaatttgggacgccgagagaacgaggcgactcaggacaatgacaggacataccgcgcgcgttggatcattggcatggaacactcatattctgacctcaggttcgcgggaccggttgatataccaccgcgatgtacgtgcccctgatcaatggatgcggaagctcgtaggtcacaagcaagaagtttgtggcctaaaatggaactgcgaggacggtcagctcgcgagtggaggtaacgacaacaagttgatggtctgggacaaactttccgaaacgccgctctggaagttttctgatcataccgctgcggttaaagcgatcgcgtggtcaccccatcaacgtggtcttcttgcctcaggtggaggaacggctgacagaagaatcatctttcacgacaccgtgcggggaacggttatcaacgagatcgatactggcagccaagtctgtaatatttcgtggtccaagaattccaacgaaatcgtctccacgcatggatacagtcagaaccagatcgtcgtctggaaatacccatccatgtcccaggttgtgagtctcacgggacatacgtaccgtgtactatacctggcaatgagtcctgacggacgaaccgttgtgactggagccggcgacgagaccctgcgattctggacggtcttcgggcgacgtcctggccaacgagaggacagcgatagtggcagtggacgactggcggattggggcgtcatacgataatgagaccacactacaacaactcgactctacgtatcaaattttacgacaatacctcgactcagccattgtgcttatatgacgacaactccaattacagattaatggcatatggaacggaaataccccaagcagttggttggttttgcatggaacgggcgtttgttttatgcaaagcattcatgagcattcatcattctaacgtggctcgacggactggctttatctacaccctgggcatgagcatgtacaaaaaagcaaagcatagcaagctggatttgagagctaccgattcaaggataatgattcgatatgagcttctctatttgctatagatcaaggaacggtagataggtgaatcaggaatcgctgtatattccgtgctaaattctggagatcttcacaagacattgtgaccttactcgattcgctgtgataagctggatgaactgttcttgacgagctgagcggttgctgaggaggcgcaattgcagtgagtgaggatcatac

SEQ ID NO: 23995 - DNA, 1494 bp, Muscodor strobelii
  misc_feature: SGI cDNA ID NO. 568175
  misc_feature: Encodes the peptide sequence at SEQ ID NO 23996
atgacacaacacacagaagaccagtgcagcactgaggaacaagacgacagtaattgggaatttgacccatgggctcacgtaccagtctcgcagcgaggaactcgaacttggttcctagacacttggccaactcgaaaataccagcctcagttcgacgagaatgagcgtatatcagagccaactgaagcatacacaccaggtggatatcatcctattgatctcggcgacattctagatggcaaatacgaggtcttcgataaactcgggttcggcggccagtcaactacatggctatgtctagacatatcccaagatatgccagactggtgcgcagtccagatcctgatggcagattattcgacagaatcgtgctcagaactccaaattatggaccttctgaaagatactgacctggctggatcgtatattcaactcccaacttcaaaattctgggtcgaaggacctaatggtcgtcatctttgcctcgtgatgccggtgctcggcggaccgatcacaactttgcggagccgcgcgaaacagaaggaattgttgcttcaagcagcacatagtctactgtttctccatgaaagaggtatttgccacggagacttcacttacaacaacattctgcagcgtcttcggagctttcatggtgtgagcagggaaaccatgagagagatgttgggcgagccttggctggacgacgtgtacgcttgtaagaaagagtattacaagaatgcacctgatcgatgggttgcaataaacggcatcaaaatcgagccacttgatgagatcgccctgattgacttcggcgtctctttctgcacatctgattctcccaaaagagtatctatcccaccacagttcgtgtcacccgaggcatggttcggcatagaaattggaccaagtctagacatttgggcctttgcttgcttgatcatcaagatgaattaccgtgatgcctgcgagttcagttactggtttgactgtgatgacgaagaatctgtgctgcagaaattcgagcttttacttggtccgatgcctgagccatatcgatcaatcaatcatacttgtatttacgaagacggacagtatgtcgcgaaacagccatcaactgcttccatactccctagcaaaaacaatattgccgaacgggaacatcattcaatcactcccaatgatacggaagatgctaaagatgacacggtcgagttgacaccagtatcgatgacagcatcatatcgagccgagcttaaatctcacttgcttcggagctgtgaattcaatacattcttcgacaaatttgtcgacggagattatgtcgaagactcagaagacccttgtaattacaacgaggactcggctcaacgtcaggaaccagatgaagaaacactcgcattagtggacctcgcgcgaaaaagtctcagatggcgtgtctccgagaggcttgacttggatggaatgatgaagcacgagtactttcgagggcgatag

SEQ ID NO: 23996 - protein, 497 aa, Muscodor strobelii
  misc_feature: SGI Peptide ID NO. 568175
  misc_feature (59)..(495): NCBI GI: 121709688 Blast Desc: protein kinase, [Aspergillus clavatus NRRL 1] gi|119400639|gb|EAW11064.1| protein kinase, [Aspergillus clavatus NRRL 1]
  misc_feature (64)..(357): NCBI GI: 159122901 Blast Desc: protein kinase, [Aspergillus fumigatus A1163]
  misc_feature (64)..(357): NCBI GI: 70982656 Blast Desc: protein kinase [Aspergillus fumigatus Af293] gi|66844480|gb|EAL84818.1| protein kinase, [Aspergillus fumigatus Af293]
  misc_feature (7)..(497): NCBI GI: 116191345 Blast Desc: CHGG_05390 [Chaetomium globosum CBS 148.51] gi|88181303|gb|EAQ88771.1| CHGG_05390 [Chaetomium globosum CBS 148.51]
  misc_feature (47)..(497): NCBI GI: 85109099 Blast Desc: NCU05655 [Neurospora crassa OR74A] gi|28924369|gb|EAA33507.1| [Neurospora crassa OR74A]
  misc_feature (39)..(497): NCBI GI: 85109105 Blast Desc: NCU05658 [Neurospora crassa OR74A] gi|28924372|gb|EAA33510.1| [Neurospora crassa OR74A]
  misc_feature (59)..(353): NCBI GI: 85089807 Blast Desc: NCU10004 [Neurospora crassa OR74A] gi|28919443|gb|EAA28883.1| [Neurospora crassa OR74A]
  misc_feature (59)..(349): NCBI GI: 256721211 Blast Desc: NECHADRAFT_82323 [Nectria haematococca mpVI 77-13-4]
  misc_feature (47)..(353): NCBI GI: 239612245 Blast Desc: protein kinase [Ajellomyces dermatitidis ER-3]
  misc_feature (47)..(353): NCBI GI: 261202416 Blast Desc: protein kinase domain-containing protein [Ajellomyces dermatitidis SLH14081] gi|239590519|gb|EEQ73100.1| protein kinase domain-containing protein [Ajellomyces dermatitidis SLH14081]
MTQHTEDQCSTEEQDDSNWEFDPWAHVPVSQRGTRTWFLDTWPTRKYQPQFDENERISEPTEAYTPGGYHPIDLGDILDGKYEVFDKLGFGGQSTTWLCLDISQDMPDWCAVQILMADYSTESCSELQIMDLLKDTDLAGSYIQLPTSKFWVEGPNGRHLCLVMPVLGGPITTLRSRAKQKELLLQAAHSLLFLHERGICHGDFTYNNILQRLRSFHGVSRETMREMLGEPWLDDVYACKKEYYKNAPDRWVAINGIKIEPLDEIALIDFGVSFCTSDSPKRVSIPPQFVSPEAWFGIEIGPSLDIWAFACLIIKMNYRDACEFSYWFDCDDEESVLQKFELLLGPMPEPYRSINHTCIYEDGQYVAKQPSTASILPSKNNIAEREHHSITPNDTEDAKDDTVELTPVSMTASYRAELKSHLLRSCEFNTFFDKFVDGDYVEDSEDPCNYNEDSAQRQEPDEETLALVDLARKSLRWRVSERLDLDGMMKHEYFRGR

SEQ ID NO: 23997 - DNA, 413 bp, Muscodor strobelii
  misc_feature: SGI EST ID NO. CUFF.56477.0
  misc_feature: Variant of the nucleotide sequence at SEQ ID NO 23995
agcatacacaccaggtggatatcatcctattgatctcggcgacattctagatggcaaatacgaggtcttcgataaactcgggttcggcggccagtcaactacatggctatgtctagacatatcccaagatatgccagactggtgcgcagtccagatcctgatggcagattattcgacagaatcgtgctcagaactccaaattatggaccttctgaaagatactgacctggctggatcgtatattcaactcccaacttcaaaattctgggtcgaaggacctaatggtcgtcatctttgcctcgtgatgccggtgctcggcggaccgatcacaactttgcggagccgcgcgaaacagaaggaattgttgcttcaagcagcacatagtctactgtttctccatgaaagaggtattt

SEQ ID NO: 23998 - DNA, 1383 bp, Muscodor strobelii
  misc_feature: SGI cDNA ID NO. 568176
  misc_feature: Encodes the peptide sequence at SEQ ID NO 23999
atgcaagaatattcataccgaagattggaagctggccagatacgcctgctgaagatctcagcatctaacaccgatgccaacccaatcgaatgcaccacgtcacatcacgacttcaacaaaggacccatcgtatcttacgtcgcattatcatacacatggggcgatgagaaaggaggccaagatatcatcatagacggacagcgtttctacgcgcgaccgaacttgtacgccagtttgaaaaacctcaggcatcacaatttcgcgccgtacatctgggtggacgcgatatgcatcaaccaagacgacgacgacaacgagaagaaacaacagctatcactcatgggcgcaatatactccaaagcagataaagtcataatatgtctccagagccgcaaagaaagcgatgtggaattcttctgcgatacagtcacacactttaaacaggatcacgatccgaacctattcccaacgccgaaccaagacccccagaagatccacaaggccgttctatggttatgcgaaaactcgtatttccgtcgaatgtggatcgtgcaagaaaatatactagcagcgaagcgtgtcctaatcctcggacactggaaaatcccttggtaccccgttgcgcgcatggtggccgaaagcgagatgatcgttcccgatcctcgggatcaggagaagcacagcgagcttcttcgcgaatcgggaatggaacatgtgttgggtcttggaccaagccatactagagctaagaaggaaccgcctgcgcctacgctgtttaatgctctggtgcgatatagacaacagcaatgcttcgatcctagagataaagtctttgggctgctgggcttgccagagatgcagaactcgatgatacaggataagtgtcttccttcgaatcatccgcgagatgcggaggagttgttgttcaatctcttggaatggtttgaggcttcgcctaatttgacggcgactcatcagacgcaacttcagcggtatgctctattgcaggaaactttagggagcattgaagcagacactacacgttgtgtcctgaacgactccaaagatgtaacatcgttgaaagagtgcagatttcgcattgagactaagtccggcggcgatgttaagcttcctattgtcctagctgaagggaattataagggccagatcactaaaatcgcagaactgagcaatgctgagtttaatgaactcgatgacagacaagacattgtggagtttatacagtccaaacgcagatctggagatatgtgctatggcttcggccaagggaaagaggaagacgcgttagcccgtttgcaagaccactacgttaaccatagtacagcacaatccaatctcgatctcgccacgacgaaaaactga

SEQ ID NO: 23999 - protein, 460 aa, Muscodor strobelii
  misc_feature: SGI Peptide ID NO. 568176
  misc_feature (46)..(186): Pfam Id: PF06985 Pfam Desc: Heterokaryon incompatibility protein (HET)
  misc_feature (46)..(126): Pfam Id: PF06985 Pfam Desc: Heterokaryon incompatibility protein (HET)
  misc_feature (3)..(283): NCBI GI: 256728463 Blast Desc: NECHADRAFT_54101 [Nectria haematococca mpVI 77-13-4]
  misc_feature (15)..(293): NCBI GI: 256721196 Blast Desc: NECHADRAFT_82325 [Nectria haematococca mpVI 77-13-4]
  misc_feature (13)..(314): NCBI GI: 169598764 Blast Desc: SNOG_02190 [Phaeosphaeria nodorum SN15] gi|111069282|gb|EAT90402.1| SNOG_02190 [Phaeosphaeria nodorum SN15]
  misc_feature (1)..(307): NCBI GI: 256728445 Blast Desc: NECHADRAFT_54320 [Nectria haematococca mpVI 77-13-4]
  misc_feature (1)..(314): NCBI GI: 256727241 Blast Desc: NECHADRAFT_75911 [Nectria haematococca mpVI 77-13-4]
  misc_feature (1)..(198): NCBI GI: 238483469 Blast Desc: conserved [Aspergillus flavus NRRL3357] gi|220701023|gb|EED57361.1| conserved [Aspergillus flavus NRRL3357]
  misc_feature (1)..(283): NCBI GI: 46138163 Blast Desc: FG10596.1 [Gibberella zeae PH-1]
  misc_feature (1)..(205): NCBI GI: 238496765 Blast Desc: conserved [Aspergillus flavus NRRL3357] gi|220694498|gb|EED50842.1| conserved [Aspergillus flavus NRRL3357]
  misc_feature (1)..(205): NCBI GI: 169774653 Blast Desc: [Aspergillus oryzae RIB40] gi|83769657|dbj|BAE59792.1| protein product [Aspergillus oryzae]
  misc_feature (13)..(283): NCBI GI: 154317033 Blast Desc: BC1G_03934 [Botryotinia fuckeliana B05.10] gi|150845546|gb|EDN20739.1| BC1G_03934 [Botryotinia fuckeliana B05.10]
MQEYSYRRLEAGQIRLLKISASNTDANPIECTTSHHDFNKGPIVSYVALSYTWGDEKGGQDIIIDGQRFYARPNLYASLKNLRHHNFAPYIWVDAICINQDDDDNEKKQQLSLMGAIYSKADKVIICLQSRKESDVEFFCDTVTHFKQDHDPNLFPTPNQDPQKIHKAVLWLCENSYFRRMWIVQENILAAKRVLILGHWKIPWYPVARMVAESEMIVPDPRDQEKHSELLRESGMEHVLGLGPSHTRAKKEPPAPTLFNALVRYRQQQCFDPRDKVFGLLGLPEMQNSMIQDKCLPSNHPRDAEELLFNLLEWFEASPNLTATHQTQLQRYALLQETLGSIEADTTRCVLNDSKDVTSLKECRFRIETKSGGDVKLPIVLAEGNYKGQITKIAELSNAEFNELDDRQDIVEFIQSKRRSGDMCYGFGQGKEEDALARLQDHYVNHSTAQSNLDLATTKN

SEQ ID NO: 24000 - DNA, 1210 bp, Muscodor strobelii
  misc_feature: SGI EST ID NO. CUFF.56480.0
  misc_feature: Variant of the nucleotide sequence at SEQ ID NO 23998
cttcgaatcatccgcgagatgcggaggagttgttgttcaatctcttggaatggtttgaggcttcgcctaatttgacggcgactcatcagacgcaacttcagcggtatgctctattgcaggaaactttagggagcattgaagcagacactacacgttgtgtcctgaacgactccaaagatgtaacatcgttgaaagagtgcagatttcgcattgagactaagtccggcggcgatgttaagcttcctattgtcctagctgaagggaattataagggccagatcactaaaatcgcagaactgagcaatgctgagtttaatgaactcgatgacagacaagacattgtggagtttatacagtccaaacgcagatctggagatatgtgctatggcttcggccaagggaaagaggaagacgcgttagcccgtttgcaagaccactacgttaaccatagtacagcacaatccaatctcgatctcgccacgacgaaaaactgatgaagatcgaatctacagcaggaggatggggcattgctaatatgaacgtacaagtcgatgatcacgtattcacggtcgtcgtcgggcagacgaagaacaacacagcgatttgccactcagtaatcatgagggagtctgaaggaggggtgtgtgcgttcgtgagccatgctatcgatggccgaggggtgcgaaatcacattcccacgaattccacggtggcatcgatgccgccacgtgggggaaaagttgaacgtcgcaatttgaaagtgctcttatctccgctgactgctatgatgattactgcacctggtggcctgcagacattgggacatggctggagaattggtgatactgcgcaataggaagaaacttccgacgtgacggctttatgagtgacgtgtgagcagcagagtgtgacacggttagttcccggcctgaagtctcccgtcgaagttagtgcgagagaatgtacgatggaatgtggcgacgtgacacaggatcacgttgatcagaatatagtgctcgtggcccaacaaagttgccagttcagagttccgttctttgtccaccataacttctcagaatactgtcagcccactgcatcctctagtcctcaatttccgtattcgcccttttacgaagtgacatatttcgagaccctttcgacaatgacacaacacacagaagaccagtgcagcactgaggaacaagacgac

SEQ ID NO: 24001 - DNA, 1137 bp, Muscodor strobelii
  misc_feature: SGI cDNA ID NO. 568177
  misc_feature: Encodes the peptide sequence at SEQ ID NO 24002
atgtgcgtgatcggccccgtcggcggtgagtactgggagacgtttcgggcacctaaatggcatccctcagatgctccttggtcgaaaaatagcacaatgtacctcatgtttgtgacggacatgacgtacgaagactgggaaatggtctctggaaaacatgacctcggcaaaggaaccccatctcaggaatggcagatctacgagctattaccgcaaagatcccttaacgtttcactttgtttccccagttttagctttgaaagaaaatttgtcagtatgaccgcattatcgcctctggtagaaccttctctgaactggtctcccacatctgatatatctgagactgaagaagtgcgaaaatttttggggacaaatacaccccaaaacgatcatctcgagagaagtgtgcttgacatgcagataatagacaatccgcgtgatagcgcagatagtcacaccgtcgtcgaactcaaggcatctgggatcaacattacgacagcaatatttaacgaaaagaccattgagctcgtaatgtactggcatgtgactcaagaccagaaacacaatacctcaattgccatctgtcgattttgcacgcttcctgggatatcagtacactctgcacacggccaactgttgaacgatattgtggtaaaaacaggacgcgcagcaaatgctttgcagagtcatatgaccattgttgcatctttgatctattacgaatacctgagctctctgaaacagcttcaggaggcgcatatggccacgacaacttcagtacgcgtaccaggaccttgcacagatcatgcatgcaagggaatcatttctgtcatagcattaatcttgattcacttgattaacgtggtaatcatcactttctcctacacgagacgggtccgttattcgctttacggaaatatttggcataccatctcgcagctcacgtcaacggagctacgtggaacaatcgaagccaggacaagctccaccgatcgtgagatcaagaagacgttcgatggcaccattttcaaagatgattttgtgaaactcggaaaatcagaactggatggccggatcggaattgtcaaggtcgaccatgatcctcaccatcaagctacccagcgaaaggagcattag

SEQ ID NO: 24002 - protein, 378 aa, Muscodor strobelii
  misc_feature: SGI Peptide ID NO. 568177
  misc_feature (22)..(362): NCBI GI: 145605162 Blast Desc: MGG_02132 [Magnaporthe grisea 70-15] gi|145013020|gb|EDJ97661.1| MGG_02132 [Magnaporthe grisea 70-15]
  misc_feature (101)..(367): NCBI GI: 119474385 Blast Desc: NFIA_005330 [Neosartorya fischeri NRRL 181] gi|119407221|gb|EAW17171.1| conserved [Neosartorya fischeri NRRL 181]
  misc_feature (18)..(353): NCBI GI: 46139113 Blast Desc: FG11071.1 [Gibberella zeae PH-1]
  misc_feature (206)..(337): NCBI GI: 256733978 Blast Desc: NECHADRAFT_77642 [Nectria haematococca mpVI 77-13-4]
  misc_feature (205)..(336): NCBI GI: 256726575 Blast Desc: NECHADRAFT_79667 [Nectria haematococca mpVI 77-13-4]
MCVIGPVGGEYWETFRAPKWHPSDAPWSKNSTMYLMFVTDMTYEDWEMVSGKHDLGKGTPSQEWQIYELLPQRSLNVSLCFPSFSFERKFVSMTALSPLVEPSLNWSPTSDISETEEVRKFLGTNTPQNDHLERSVLDMQIIDNPRDSADSHTVVELKASGINITTAIFNEKTIELVMYWHVTQDQKHNTSIAICRFCTLPGISVHSAHGQLLNDIVVKTGRAANALQSHMTIVASLIYYEYLSSLKQLQEAHMATTTSVRVPGPCTDHACKGIISVIALILIHLINVVIITFSYTRRVRYSLYGNIWHTISQLTSTELRGTIEARTSSTDREIKKTFDGTIFKDDFVKLGKSELDGRIGIVKVDHDPHHQATQRKEH

SEQ ID NO: 24003 - DNA, 149 bp, Muscodor strobelii
  misc_feature: SGI EST ID NO. CUFF.56498.0
  misc_feature: Variant of the nucleotide sequence at SEQ ID NO 24001
caagctccaccgatcgtgagatcaagaagacgttcgatggcaccattttcaaagatgattttgtgaaactcggaaaatcagaactggatggccggatcggaattgtcaaggtcgaccatgatcctcaccatcaagctacccagcgaaag

SEQ ID NO: 24004 - DNA, 1329 bp, Muscodor strobelii
  misc_feature: SGI cDNA ID NO. 568178
  misc_feature: Encodes the peptide sequence at SEQ ID NO 24005
atggcgacgtctcgtacaattcaaatcacaacgcagaatccaggtttgtgggataccaaacaaaatgaggcatcggccaagaaaacgaccgagctgttgcaattggatcttgagaaacaccattgtttcttcaatgaccacagatttcacgaccaattaagcattagccaccagctgttatccctctatggcctcggagcatcagctgaggaaatacagaaggggtatgatgataatgcaggttaccagaggaacatgcatactgtccactccgatcgaatcgaggagctcaaagattggggaaaagcccgagagcgactaggcattgacgaaaactacacggactttttagtgttcttccaaggagaaatcgaccggatggggtgggaggaagtcttgaatgaatatctcttcaagggagacgagagagctgacgaccttctgatgcgaatgtttgacagttttcttcatcctatcattcagctcatgtacggcatagaatggcgacaaccagcaatcgtcgcgatgggtcttgctcaggctgctgttcacaccctgagtatgggcaagttcatcaaaagcgccgaggaggcggcgaaaaagaacaatgccctgatgccaagcattgccgagcttttacaggacgttgcttccgacaaaatactggcgagtgcggcgaagagatcagacggcagtgacgtgcacgacgaggtagcagatgggatactcgttcgagctttcgatgaaaccatcaaagtagccagccgagttcatatcaacccagaagagctcgaagagcgaacagtcgagatgtacaataccgcgatttatgaagcagtcgcagcagcaactcggcctggcaagataccgaaggttgacttttttctgatgcaccacgtcaatctctgcccgatattcttagcaataaatgcgcaggactggatctccgtaacgacaaaggtaagactactagaatacaagattcgattcgacttgcttcagtacgcggcaagagcgtgtcctcaattatcccttgaggcaatcgaatcctatgttccgaagagcgactcttctcaatctgtaacaggtctcctacctcgaattttcgctttagaggatgacggtcacgcttcgaaattggtaagggctatcggcatatgccaaaaagtgagcgagaagtatgaggacaagtcctggatgaagatcaagggcgagacctggaataaagtgcagcatcttgtcgttgatgccgttgaggctcctggtcctcggtggatcctaggcgcaggttacgctgaggcgtgggaggacgttccctctcgtctctag

SEQ ID NO: 24005 - protein, 442 aa, Muscodor strobelii
  misc_feature: SGI Peptide ID NO. 568178
  misc_feature (1)..(441): NCBI GI: 261355706 Blast Desc: HypA [Verticillium albo-atrum VaMs.102]
  misc_feature (1)..(439): NCBI GI: 39972325 Blast Desc: MGG_07464 [Magnaporthe grisea 70-15] gi|145016651|gb|EDK01081.1| MGG_07464 [Magnaporthe grisea 70-15]
  misc_feature (1)..(436): NCBI GI: 256728709 Blast Desc: NECHADRAFT_51051 [Nectria haematococca mpVI 77-13-4]
  misc_feature (2)..(426): NCBI GI: 164426909 Blast Desc: NCU03793 [Neurospora crassa OR74A] gi|16944689|emb|CAD11413.1| [Neurospora crassa] gi|157071525|gb|EAA31946.2| [Neurospora crassa OR74A]
  misc_feature (1)..(439): NCBI GI: 256731304 Blast Desc: NECHADRAFT_105262 [Nectria haematococca mpVI 77-13-4]
  misc_feature (1)..(441): NCBI GI: 169624435 Blast Desc: SNOG_15476 [Phaeosphaeria nodorum SN15] gi|111056021|gb|EAT77141.1| SNOG_15476 [Phaeosphaeria nodorum SN15]
  misc_feature (1)..(439): NCBI GI: 46126001 Blast Desc: FG07378.1 [Gibberella zeae PH-1]
  misc_feature (1)..(441): NCBI GI: 156045713 Blast Desc: SS1G_10051 [Sclerotinia sclerotiorum 1980] gi|154694440|gb|EDN94178.1| SS1G_10051 [Sclerotinia sclerotiorum 1980]
  misc_feature (7)..(439): NCBI GI: 116198179 Blast Desc: CHGG_07245 [Chaetomium globosum CBS 148.51] gi|88178524|gb|EAQ85992.1| CHGG_07245 [Chaetomium globosum CBS 148.51]
  misc_feature (3)..(439): NCBI GI: 261357834 Blast Desc: HypA [Verticillium albo-atrum VaMs.102]
MATSRTIQITTQNPGLWDTKQNEASAKKTTELLQLDLEKHHCFFNDHRFHDQLSISHQLLSLYGLGASAEEIQKGYDDNAGYQRNMHTVHSDRIEELKDWGKARERLGIDENYTDFLVFFQGEIDRMGWEEVLNEYLFKGDERADDLLMRMFDSFLHPIIQLMYGIEWRQPAIVAMGLAQAAVHTLSMGKFIKSAEEAAKKNNALMPSIAELLQDVASDKILASAAKRSDGSDVHDEVADGILVRAFDETIKVASRVHINPEELEERTVEMYNTAIYEAVAAATRPGKIPKVDFFLMHHVNLCPIFLAINAQDWISVTTKVRLLEYKIRFDLLQYAARACPQLSLEAIESYVPKSDSSQSVTGLLPRIFALEDDGHASKLVRAIGICQKVSEKYEDKSWMKIKGETWNKVQHLVVDAVEAPGPRWILGAGYAEAWEDVPSRL

SEQ ID NO: 24006 - DNA, 2732 bp, Muscodor strobelii
  misc_feature: SGI EST ID NO. CUFF.56517.0
  misc_feature: Variant of the nucleotide sequence at SEQ ID NO 24004
cgcgcgtaaaagattacggttctatttatcttttcttctcggaattaattttctcttctctctattattcaggctaatgaatcggcacgaggtacctcatttccaccttggtatgacgcaattcttcgggaatgtcacggaaaagagactcgacgggacagcggacatgaggtgtataagtctatagcatatctttatcagtcctatcctgaaacctttatgctcgcttggtcctataaacataggggtcatcaattgaccctatattcctggtggtgaaggcagtaacagcgaggatggcaatgtggtagtagtagtagctaacgcgctcgggataacatcaacgttttcttccaaatagtctttagacagctatcaattccattcaaacggagataatactagatatgaagcgcgagtgtgagtcacactttatctgaaagccgttaatcaggacccttagtgctgcggacaagcgctcccgctagccacgagggttcgtccgggctcgcgggtccatccggacgttcaaaaagcggcaattgagacgagaggctacaatcaaccgggctagctcgtaggcctagccagtaagaaaagacacagcaagcatcgtacatttgatggtccccgaacaccgagaaaagttattctaccttcgtcatatagacatcgtgattatcaaggatgttggtaattgcatgagtagcgattgcaaacggccaatcagtttgttagatactctcgcgataatcttacgcgacgccgtggtgagcgcggacgaacaggcctgggtatagggctgggcataacgtcacgatgaggttggcggacataacgctggcgcgacaagtagtgtcttaacccgaacctgaattacctaataagtcaaagacgtagtatcgtcttgcgtcgcttcacggcgggtttaaatctcatgctcggccgagattcacggtgcggagatctctgggcatctccgattgttcaattgttcgtataagaacttcgggtgccgacattgtgaaactcaacgagtaatagtagtaacaagtaggcgaattctaggaaaaccaattagcgaaagctgtaaagacttgaccacaatggcgacgtctcgtacaattcaaatcacaacgcagaatccaggtttgtgggataccaaacaaaatgaggcatcggccaagaaaacgaccgagctgttgcaattggatcttgagaaacaccattgtttcttcaatgaccacagatttcacgaccagtaagtgttatctcgggagacccatcttctcttggttgcgatgttgaccccagattaagcattagccaccagctgttatccctctatggcctcggagcatcagctgaggaaatacagaaggggtatgatgataatgcaggttaccagaggaacatgcatactgtccactccgatcgaatcgaggagctcaaagattggggaaaagcccgagagcgactaggcattgacgaaaactacacggactttttagtgttcttccaaggagaaatcgaccggatggggtgggaggaagtcttgaatgaatatctcttcaagggagacgagagagctgacgaccttctgatgcgaatgtttgacagttttcttcatcctatcattcagctcatgtacggcatagaatggcgacaaccagcaatcgtcgcgatgggtcttgctcaggctgctgttcacaccctgagtatgggcaagttcatcaaaagcgccgaggaggcggcgaaaaagaacaatgccctgatgccaagcattgccgagcttttacaggacgttgcttccgacaaaatactggcgagtgcggcgaagagatcagacggcagtgacgtgcacgacgaggtagcagatgggatactcgttcgagctttcgatgaaaccatcaaagtagccagccgagttcatatcaacccagaagagctcgaagagcgaacagtcgagatgtacaataccgcgatttatgaagcagtcgcagcagcaactcggcctggcaagataccgaaggttgacttttttctgatgcaccacgtcaatctctgcccgatattcttagcaataaatgcgcaggactggatctccgtaacgacaaaggtaagactactagaatacaagattcgattcgacttgcttcagtacgcggcaagagcgtgtcctcaattatcccttgaggcaatcgaatcctatgttccgaagagcgactcttctcaatctgtaacaggtctcctacctcgaattttcgctttagaggatgacggtcacgcttcgaaattggtaagggctatcggcatatgccaaaaagtgagcgagaagtatgaggacaagtcctggatgaagatcaagggcgagacctggaataaagtgcagcatcttgtcgttgatgccgttgaggctcctggtcctcggtggatcctaggcgcaggttacgctgaggcgtgggaggacgttccctctcgtctctagcggcttggccgcttcgtatgctccataaatttcccttgaccttgccagactttatctttggcccccacagctgcccacatctgtttccaaatctcctgcatgacataatattactataagccatctcgaccaccgattatgttattttcttctagcctctccgtgtcttgagagcagccaatcttttgcttgatctaccacccgcgagcaagacgaagagaaggctgattagttccaatgtatt

SEQ ID NO: 24007 - DNA, 1446 bp, Muscodor strobelii
  misc_feature: SGI cDNA ID NO. 568179
  misc_feature: Encodes the peptide sequence at SEQ ID NO 24008
atggcgacgtctcgtacaattcaaatcacaacgcagaatccaggtttgtgggataccaaacaaaatgaggcatcggccaagaaaacgaccgagctgttgcaattggatcttgagaaacaccattgtttcttcaatgaccacagatttcacgaccaattaagcattagccaccagctgttatccctctatggcctcggagcatcagctgaggaaatacagaaggggtatgatgataatgcaggttaccagaggaacatgcatactgtccactccgatcgaatcgaggagctcaaagattggggaaaagcccgagagcgactaggcattgacgaaaactacacggactttttagtgttcttccaaggagaaatcgaccggatggggtgggaggaagtcttgaatgaatatctcttcaagggagacgagagagctgacgaccttctgatgcgaatgtttgacagttttcttcatcctatcattcagctcatgtacggcatagaatggcgacaaccagcaatcgtcgcgatgggtcttgctcaggctgctgttcacaccctgagtatgggcaagttcatcaaaagcgccgaggaggcggcgaaaaagaacaatgccctgatgccaagcattgccgagcttttacaggacgttgcttccgacaaaatactggcgagtgcggcgaagagatcagacggcagtgacgtgcacgacgaggtagcagatgggatactcgttcgagctttcgatgaaaccatcaaagtagccagccgagttcatatcaacccagaagagctcgaagagcgaacagtcgagatgtacaataccgcgatttatgaagcagtcgcagcagcaactcggcctggcaagataccgaaggttgacttttttctgatgcaccacgtcaatctctgcccgatattcttagcaataaatgcgcaggactggatctccgtaacgacaaaggtaagactactagaatacaagattcgattcgacttgcttcagtacgcggcaagagcgtgtcctcaattatcccttgaggcaatcgaatcctatgttccgaagagcgactcttctcaatctgtaacaggtctcctacctcgaattttcgctttagaggatgacggtcacgcttcgaaattggtaagggctatcggcatatgccaaaaagtgagcgagaagtatgaggacaagtcctggatgaagatcaagggcgagacctggaataaagtgcagcatcttgtcgttgatgccgttgaggctcctggtcctcggtggatcctaggcgcaggttacgctgaggcgtgggaggtaagctttcgagagttccttgcgccattcttaatattctgtagcccccttcacgtggatttcgggcatctcggccatctcaaactcaagggcccctgcacagcggcatatacatacactgacgtattgtcatcgtag

SEQ ID NO: 24008 - protein, 481 aa, Muscodor strobelii
  misc_feature: SGI Peptide ID NO. 568179
  misc_feature (1)..(475): NCBI GI: 256728709 Blast Desc: NECHADRAFT_51051 [Nectria haematococca mpVI 77-13-4]
  misc_feature (1)..(436): NCBI GI: 261355706 Blast Desc: HypA [Verticillium albo-atrum VaMs.102]
  misc_feature (2)..(426): NCBI GI: 164426909 Blast Desc: NCU03793 [Neurospora crassa OR74A] gi|16944689|emb|CAD11413.1| [Neurospora crassa] gi|157071525|gb|EAA31946.2| [Neurospora crassa OR74A]
  misc_feature (1)..(436): NCBI GI: 39972325 Blast Desc: MGG_07464 [Magnaporthe grisea 70-15] gi|145016651|gb|EDK01081.1| MGG_07464 [Magnaporthe grisea 70-15]
  misc_feature (1)..(436): NCBI GI: 256731304 Blast Desc: NECHADRAFT_105262 [Nectria haematococca mpVI 77-13-4]
  misc_feature (1)..(441): NCBI GI: 169624435 Blast Desc: SNOG_15476 [Phaeosphaeria nodorum SN15] gi|111056021|gb|EAT77141.1| SNOG_15476 [Phaeosphaeria nodorum SN15]
  misc_feature (1)..(436): NCBI GI: 46126001 Blast Desc: FG07378.1 [Gibberella zeae PH-1]
  misc_feature (1)..(435): NCBI GI: 156045713 Blast Desc: SS1G_10051 [Sclerotinia sclerotiorum 1980] gi|154694440|gb|EDN94178.1| SS1G_10051 [Sclerotinia sclerotiorum 1980]
  misc_feature (7)..(436): NCBI GI: 116198179 Blast Desc: CHGG_07245 [Chaetomium globosum CBS 148.51] gi|88178524|gb|EAQ85992.1| CHGG_07245 [Chaetomium globosum CBS 148.51]
  misc_feature (3)..(436): NCBI GI: 261357834 Blast Desc: HypA [Verticillium albo-atrum VaMs.102]
MATSRTIQITTQNPGLWDTKQNEASAKKTTELLQLDLEKHHCFFNDHRFHDQLSISHQLLSLYGLGASAEEIQKGYDDNAGYQRNMHTVHSDRIEELKDWGKARERLGIDENYTDFLVFFQGEIDRMGWEEVLNEYLFKGDERADDLLMRMFDSFLHPIIQLMYGIEWRQPAIVAMGLAQAAVHTLSMGKFIKSAEEAAKKNNALMPSIAELLQDVASDKILASAAKRSDGSDVHDEVADGILVRAFDETIKVASRVHINPEELEERTVEMYNTAIYEAVAAATRPGKIPKVDFFLMHHVNLCPIFLAINAQDWISVTTKVRLLEYKIRFDLLQYAARACPQLSLEAIESYVPKSDSSQSVTGLLPRIFALEDDGHASKLVRAIGICQKVSEKYEDKSWMKIKGETWNKVQHLVVDAVEAPGPRWILGAGYAEAWEVSFREFLAPFLIFCSPLHVDFGHLGHLKLKGPCTAAYTYTDVLSS

SEQ ID NO: 24009 - DNA, 2732 bp, Muscodor strobelii; identical to SEQ ID NO: 24006
  misc_feature: SGI EST ID NO. CUFF.56517.0
  misc_feature: Variant of the nucleotide sequence at SEQ ID NO 24007

SEQ ID NO: 24010 - DNA, 1608 bp, Muscodor strobelii
  misc_feature: SGI cDNA ID NO. 568180
  misc_feature: Elevated expression when VOC is produced
  misc_feature: Encodes the peptide sequence at SEQ ID NO 24011
atggcgccactagcagagcttctgccacagcaattagtgggctgggagcacttcatactaggaggtgttgcgctctctcttgtagtcgcattctaccgcatattcatcaccatcaaatatccttccaatatcccccgagttggtgagcctgcaggcaagctcagtttcagcttgaaaacgagatggcgcgccgtcaaggaatgcgacgcaatctacatggaagcttatgagaaatatgccaagaatggcaaaacatgtctcgtcccaggcttcggagttcgtgacgaaattgtccttccgcaaagtgctatgaaatgggcactggctcaacccgaagccgccttaagccactctcacgctaccctcgagctcaatcagatcatctacagtcttggctctggtaaatactctgcggatgggtggcaaggtgatctagtcaaaaccaaattgaacgcctcattggagagtatttgcgctgctttgaacgatgaacttggagacgcattcgcagcaaattttggcctagatacggaaaattggaaggaaattgaccttttggctgttatgcgcccgatcgtcgggcaagctgccagccgttttaccgttggcctacccatgtgccgcgacccagtataccttgaagagagcttcaatgttgtcgatcgcctcgtagtagccgccggtgccaccggtggaagcccacgattcctccaaccagtagttggcagacttacatcgattggaatagagggcatgataaacaagatcaagggaacctttgagaagacctacaaagagagactagctatcatcgaagaccccaattataatggtcccgagcccaacgaccaccttcagatgatgatgcgatttgccgaaaaggaacgccctcatgagctacacgacttcgacaacatcaccaagcgcgtcattatcgccaactttgcctctatgcatcagacatctatccaagcaacaaactttctcctgaacatccttgactccgacaaggagttcaacacaatggccgtgctccgtgatgaagtccaaagaatcatgggcgacgacaaagactggacgaaacaaaaggttcaggccatgatccgtgcagacagtgcggcacgagagacgatgcgccttcattccttcggcaaccgttcagtactccgcaaggtcatgaaggaaggccttgtcaccgaagacggcgtcacattaccgaagggttccatgatctcgttccttgctttcccgcctcaggttgaggcagacaaattcgaagatcccctgaagtacgaccccttccgatactcccgtgtccgggaggcagcagccgacccggaaacaggcaaacctggtgccagccacttgagcttcgtttcgacatccccggaccacctgcctttcagccatggtcgtcacgcctgccccggtcgattccttatcgactttgagcttaagatgatagcggcattcgtgctcatgaactatgatattgagttccctgcagagtataacgggaagcgcccccagaacgagtggctcgcagaggccagcttcccaccagcaggtgtcaaactcagaataaagcgccgtccaggcactatctga

SEQ ID NO: 24011 - protein, 535 aa, Muscodor strobelii
  misc_feature: SGI Peptide ID NO. 568180
  misc_feature (50)..(528): Pfam Id: PF00067 Pfam Desc: Cytochrome P450
  misc_feature (345)..(528): Pfam Id: PF00067 Pfam Desc: Cytochrome P450
  misc_feature (14)..(531): NCBI GI: 115395914 Blast Desc: conserved [Aspergillus terreus NIH2624] gi|114193165|gb|EAU34865.1| conserved [Aspergillus terreus NIH2624]
  misc_feature (17)..(531): NCBI GI: 67526079 Blast Desc: AN3497.2 [Aspergillus nidulans FGSC A4] gi|40739868|gb|EAA59058.1| AN3497.2 [Aspergillus nidulans FGSC A4] gi|259481991|tpe|CBF76034.1| TPA: cytochrome P450, (Eurofung)
  misc_feature (1)..(531): NCBI GI: 256720602 Blast Desc: NECHADRAFT_50293 [Nectria haematococca mpVI 77-13-4]
  misc_feature (22)..(531): NCBI GI: 46134111 Blast Desc: FG09195.1 [Gibberella zeae PH-1]
  misc_feature (104)..(531): NCBI GI: 119499541 Blast Desc: NFIA_042090 [Neosartorya fischeri NRRL 181] gi|119414692|gb|EAW24631.1| conserved [Neosartorya fischeri NRRL 181]
  misc_feature (2)..(531): NCBI GI: 261355409 Blast Desc: cytochrome P450 [Verticillium albo-atrum VaMs.102]
  misc_feature (25)..(531): NCBI GI: 118026356 Blast Desc: [Cordyceps bassiana]
  misc_feature (18)..(526): NCBI GI: 225554652 Blast Desc: cytochrome P450 [Ajellomyces capsulatus G186AR]
  misc_feature (91)..(531): NCBI GI: 240276998 Blast Desc: cytochrome P450 [Ajellomyces capsulatus H143]
  misc_feature (99)..(526): NCBI GI: 154276976 Blast Desc: [Ajellomyces capsulatus NAm1] gi|150414406|gb|EDN09771.1| [Ajellomyces capsulatus NAm1]
  misc_feature (142)..(531): SWISSPROT Homolog: EC 1.14.13.78 Ent-kaurene oxidase
  misc_feature: Useful for introducing or modulating the production of volatile compounds
MAPLAELLPQQLVGWEHFILGGVALSLVVAFYRIFITIKYPSNIPRVGEPAGKLSFSLKTRWRAVKECDAIYMEAYEKYAKNGKTCLVPGFGVRDEIVLPQSAMKWALAQPEAALSHSHATLELNQIIYSLGSGKYSADGWQGDLVKTKLNASLESICAALNDELGDAFAANFGLDTENWKEIDLLAVMRPIVGQAASRFTVGLPMCRDPVYLEESFNVVDRLVVAAGATGGSPRFLQPVVGRLTSIGIEGMINKIKGTFEKTYKERLAIIEDPNYNGPEPNDHLQMMMRFAEKERPHELHDFDNITKRVIIANFASMHQTSIQATNFLLNILDSDKEFNTMAVLRDEVQRIMGDDKDWTKQKVQAMIRADSAARETMRLHSFGNRSVLRKVMKEGLVTEDGVTLPKGSMISFLAFPPQVEADKFEDPLKYDPFRYSRVREAAADPETGKPGASHLSFVSTSPDHLPFSHGRHACPGRFLIDFELKMIAAFVLMNYDIEFPAEYNGKRPQNEWLAEASFPPAGVKLRIKRRPGTI

SEQ ID NO: 24012 - DNA, 2923 bp, Muscodor strobelii
  misc_feature: SGI EST ID NO. CUFF.56534.0
  misc_feature: Variant of the nucleotide sequence at SEQ ID NO 24010
gtagtattattgggaatttggcgacaatacgttcgaatcgtaggctgtaatgtgatcggcatgctcgtggaagacctctgccaaatctgcctatttatagtgtaatatggaacaattcaagaacaatacacttccccatgactcgtcattctctgagagcacttcggccaaattaacctgcaaccttacgcccgctaactagaggtctctcgatttcgtcatttacgtgaggtgcagattgagtatcaggtgtccggttcgccgctcaccgtcgggctgtactgtagtaattcttgttagaggaatcgtccagcagcgaattcagttctgcccaatgcagccaagggtacgctactaaaatttagacgggcgctaagagatgcgttggtggcatattggctgaagccgcgggaatagcttgctagactggtccgactgggacatgggagggcgacctggttgcgtcagatctattataccaacatgtgcttgggaattacaaattcgatccttcgaggaaactgtgggcgttgcattacataccagctgcagcccatgaattccggaaatgatatagatctacaggcaccctactgcatttcgtacacaatatgagcaattcgggtttctttcctaatcatcattttctcataatcagaattattgctttgcgtcgctattgtaaccgtatttctgcacccacgaacgggtcgtgaacataaggacacagcgtcacaatggcgccactagcagagcttctgccacagcaattagtgggctgggagcacttcatactaggaggtgttgcgctctctcttgtagtcgcattctaccgcatattcatcaccatcaaatatccttccaatatcccccgagttggtgagcctgcaggcaagctcagtttcagcttgaaaacgagatggcgcgccgtcaaggaatgcgacgcaatctacatggaagcttatgagaaatatgccaagaatggcaaaacatgtctcgtcccaggcttcggagttcgtgacgaaattgtccttccgcaaagtgctatgaaatgggcactggctcaacccgaagccgccttaagccactctcacgctaccctcgagctcaatcagatcatctacagtcttggctctggtaaatactctgcggatgggtggcaaggtgatctagtcaaaaccaaattgaacgcctcattggagagtatttgcgctgctttgaacgatgaacttggagacgcattcgcagcaaattttggcctagatacggaaaattggaaggaaattgaccttttggctgttatgcgcccgatcgtcgggcaagctgccagccgttttaccgttggcctacccatgtgccgcgacccagtataccttgaagagagcttcaatgttgtcgatcgcctcgtagtagccgccggtgccaccggtggaagcccacgattcctccaaccagtagttggcagacttacatcgattggaatagagggcatgataaacaagatcaagggaacctttgagaagacctacaaagagagactagctatcatcgaagaccccaattataatggtcccgagcccaacgaccaccttcagatgatgatgcgatttgccgaaaaggaacgccctcatgagctacacgacttcgacaacatcaccaagcgcgtcattatcgccaactttgcctctatgcatcagacatctatccaagcaacaaactttctcctgaacatccttgactccgacaaggagttcaacacaatggccgtgctccgtgatgaagtccaaagaatcatgggcgacgacaaagactggacgaaacaaaaggttcaggccatgatccgtgcagacagtgcggcacgagagacgatgcgccttcattccttcggcaaccgttcagtactccgcaaggtcatgaaggaaggccttgtcaccgaagacggcgtcacattaccgaagggttccatgatctcgttccttgctttcccgcctcaggttgaggcagacaaattcgaagatcccctgaagtacgaccccttccgatactcccgtgtccgggaggcagcagccgacccggaaacaggcaaacctggtgccagccacttgagcttcgtttcgacatccccggaccacctgcctttcagccatggtcgtcacgcctgccccggtcgattccttatcgactttgagcttaagatgatagcggcattcgtgctcatgaactatgatattgagttccctgcagagtataacgggaagcgcccccagaacgagtggctcgcagaggccagcttcccaccagcaggtgtcaaactcagaataaagcgccgtccaggcactatctgagcacaaagtacgggttatttcaaggataatgagctatgggttggcgttaggcggttttttcatgtacatagattagcagcgatttctgctattttagacgcgtatatacctctagaaccgcacatagaagtgttggatatacttgaaccattcaatagcctctgcacatcatttccacgatccaacgagcatcccaacatgctattgcacgcacattgctgaacaatcaccaaaaacttatctgcgatcgtttactaagtcatcattccagctaaccctaggcaggtgaagtcattatataatccttgacgttcgtataagaaccaggcgaggcaggtccacggcacagcattcccgaatcctcccatccccatccaagcccagggcgcaacggaacagcaggggactttcatagtctcgcagccggcaatgcaatcctgtggcacgattatagtttgagatacagtgatctagatggcttggcagccaatgtttcgagcagaagctgttgttacatacctaatgcctgcctatcatcgcaacactcatcaaggtcattgataatacctgcccctgtg

SEQ ID NO: 24013 - DNA, 1005 bp, Muscodor strobelii
  misc_feature: SGI cDNA ID NO. 568181
  misc_feature: Encodes the peptide sequence at SEQ ID NO 24014
atggcgacgtcttcaagttacagtttcggacaaaagcctggtgatactaataacaatgcaacagctgcatcctctggtaaagacgtttcgccctggtatgatcggttcccatttcaagctcgactggtcaatgacctcgctcacaatgatcctacaacacggtcaggctttgcgccagggcatccatggctacaccctcgatattattccgatgtaccgagtgattcagaactccaaaatgcgggtgtttttcaatatggcacaggggaggatatgttttacaccagtctgacatcacaaggaagagaaatgaacggtattatgcattggcaagtcggagttacaaatcaccatgtgaactttggtaatcgattcggcaaagtatcagctggacataaacgacccgatttcggacccgttcccaaggagcaactggaagatgggacagacaacagaacgttcgatgaagttttacagaagatatacgacgaggaaacaatcagaattgacgaaacaacgtggctgcccttctttaggaaaaacaggtggtatgacctggaggaccctgcagcctctctcggcggccgatcttggagtgtcgacgcatctgacgtttgggatggcttgaggaggcccgtggaattggcgaataggatactcttggctttaatcgacgaaaaacacgaatatctcgagacgatgttgtatggtcttctgggatactggccgaccatcgtcaacgcgttctggcccgatccaaagccgctagagactttttcgaatgataaggttctgatctcttataacgtccttaagggtcactgtgatgcacaggggttaaataaccctctagatgggattgaaaggctcactccagcggaatggagaacgaggcttgaaggcctactcaatgatcttacttggaccttcatggatgacgccccattgtatgaccaccctgtcaatcacgattacaatttgctctctcagtactattaccgataa

SEQ ID NO: 24014 - protein, 334 aa, Muscodor strobelii
  misc_feature: SGI Peptide ID NO. 568181
MATSSSYSFGQKPGDTNNNATAASSGKDVSPWYDRFPFQARLVNDLAHNDPTTRSGFAPGHPWLHPRYYSDVPSDSELQNAGVFQYGTGEDMFYTSLTSQGREMNGIMHWQVGVTNHHVNFGNRFGKVSAGHKRPDFGPVPKEQLEDGTDNRTFDEVLQKIYDEETIRIDETTWLPFFRKNRWYDLEDPAASLGGRSWSVDASDVWDGLRRPVELANRILLALIDEKHEYLETMLYGLLGYWPTIVNAFWPDPKPLETFSNDKVLISYNVLKGHCDAQGLNNPLDGIERLTPAEWRTRLEGLLNDLTWTFMDDAPLYDHPVNHDYNLLSQYYYR

SEQ ID NO: 24015 - DNA, 519 bp, Muscodor strobelii
  misc_feature: SGI cDNA ID NO. 568182
  misc_feature: Encodes the peptide sequence at SEQ ID NO 24016
atgacaaagcttgacgacgattccctaggcttgctgcagatggccgcaatacccattaacgaaagtccgatcgaccagttcacgaacagtcgaacaataacctgcaagtatacaccgagccgtgaagctaaggctctaggactacgcgcaaaacactggatccgcagcgaacccgaagaaaaagaaaccgccgccgtaacatacctaatcgacagcttcgcgggcacccaacgcgacttcggaatccggcagtccgacttcctcgacctcgccgacaaagtcatcggccatctaatccagaccgccgtccaagtcccaggggactggatcctagaaatcaaccgcgtggcgattggtctacggacccagcgcctcgccatcgaaaaccgatttccgagagtccacagacgtcaatgggttcagacctgggacttcaagatcccggaatacagtcaggatctacgctggagacaatgggacggatttacgtgggctctcgtacccacacccggtccctga

SEQ ID NO: 24016 - protein, 172 aa, Muscodor strobelii
  misc_feature: SGI Peptide ID NO. 568182
MTKLDDDSLGLLQMAAIPINESPIDQFTNSRTITCKYTPSREAKALGLRAKHWIRSEPEEKETAAVTYLIDSFAGTQRDFGIRQSDFLDLADKVIGHLIQTAVQVPGDWILEINRVAIGLRTQRLAIENRFPRVHRRQWVQTWDFKIPEYSQDLRWRQWDGFTWALVPTPGP

SEQ ID NO: 24017 - DNA, 3474 bp, Muscodor strobelii
  misc_feature: SGI cDNA ID NO. 568183
  misc_feature: Encodes the peptide sequence at SEQ ID NO 24018
atggtcgactctcaggacgacctggccgcccagcccgacgatccggtcaccatcattaagcccgaaaccctcgataatgacgtggaacacctcgagaacgtgacaatggccaatgactttgaggccatgaaagagatcgtgctgccaccgctactcgaggagcccaagatactagaagatgctgtgagcacctggaccgtcgaaaactaccggtcgctcaaaaagaaagagcacggtcccgtcttcgaggctggtggattcccatggcgcattctgttatttccctatggaaaccagattgatcagtcatcggtgtacctcgaacacgggttcgaagatctcagcaaagtgcccgacgactggagttgctgtgcccagtttggccttgtgatgtggaatgttaatgatccgtcgctgtttgcccaccacaccgcgacacatcgcttcaccaaagaggagagtgattggggatttacgaggttcctagatcttcgaaagatgttccagcagccttggaacgatgccacagatcggcctctcgtcgaagacgatactgtcaatatcacagcctacgttcgcatcgtggaagatgagactggagtattatggcacaactttaacaattacgattccaaaaaggaaaccggctttgtagggctgaaaaaccaaggcgccacgtgctatttaaactcccttctacaatccctctactttacaaatgcattccgaaaggctgtctaccaaataccaactgcagaagacgaaagtgttaataacagcgcttacacactacagcgtcttttctaccagttacagatttcaaattcggcagtaggtaccaacgagttgacacgatcgtttggctgggatacacggcacattttcgaacagcaagacgtccaggaactctccaggaagctaattgagcgaatggaagagaagatgaagggtaccgctgctgaagactcactgcccaagatgctgagcgggaaagtcaagacctatgtatcttgcatcaatgtcgactacgaatctagccggcttgaagacttctgggatattcaactcaacgttcgcggcatcccgaatctccaggagagtttcaaggactacatccagcaagaaactcttgacggtgaaaacaagtactgggcaggtgacgagcacaagtaccaagatgcacgaaagggcgtaatatttgacagtttccctgaggttctgcatctgcacctgaagcgattcgaatacgacattcagagagacactatgatgaagatcaatgaccgtttcgagttcccggacactctagacgtagagccatacctcgagaaaggcgcagacagatcagagccgtggatctacaagttgcatggtgtcctcgtgcacagcggagatctcaacgccggacattactacgcattcttgaaacctgaaaaagacgggtggttttacaagttcgatgacgataaggttaccagagcaactgtgagagagaccctcgaggagaattttggtggcgagtacagatcgccattgtcattagcacgaccgggatccttgcagggcaggaaaaccgtgatgcgccagatgaatgcatacatgttggtctacattcgtgagtcgcgattagatcaagtcttgacagtggtcgagaagcaagatagcccacagcatctgcaacaacgcctggaggaagaagccgcagcgcgcgaggcaaagcggagagagaaagaagagcagcatctctatactattgtgcgagtcatcacgcaagacacattccgcaatcattcctcgacagatctcgccacgttctctgatgatcctgcgtccttgaaggatcctggagcgcctctcctgtacaagatgagaaaacaggcgaccatgagagaagcgctggctacgattgcgcaagacctgaatcaagatcctaaaagagtccggctctgggctatggtaaaccgtcaaaataagaccacgagaccagatcaacctatcatggatctccacccaactgtggatgagtctcagctacggacccaaggaatgaaccgggataccacactccgagtctgggcagaagtcgcagaggaagtggatgatgagggtgatgccatttggccaagttatcaaaacaatgcgaatggggtcgtcgtcaaaaatgacctcatacttctcttcctcaaacatttcgatgttgaggcgcaaaagttagaaggtgttggccacatatatgttagcaaggagaagcgtgtagaagaactcgctccggccatcctcaaaagaatgggctggggagaaaagcttccatcaggagaacaactgtctatgtgggaagaaataaagccaacgatgatagagagcctgaaaccgaagcaaacccttaaggcggcggagttgcaagacggcgacatcatctgctttcaaagggttcatgatcgaagatcgccagccgagatgatcaaagctcgcctaggtgacaagaactctgaagagcccaaacgttgggatagattcgaggaagctcgatcttactacgactttcttgtgtacaaacgggatgttcgtttcgatccgcacccgcgctgcgacaagccagacctcgagcccttcattttgactcttagcggcaaagccacttatgaccaagtcgctgaacgcgttgcagaaaagttaaatgtggagccaactcacttgcgcttcttcacagcgaatgccgcaacaggcgcgcccaaaggagcagtgcgacgagtccctaatgcaaacctttcacagatgttgaacccgcaaagctacgcccagaatccccagaccaaacccaattccctttattatgaggtcttggacatgagtcttgcagaactcgatacgaagaagagtgtcaagataacgtggctgagcgaaggaatctcgaaagaggaaacgtttgatgtacttgtgagcaagcaaggtcacgtcgaagatcttattgacgccttgatcaaaaaggcacaactcaaagatcaggaggaagccggccgtatacgtctttatgagattcataatcatagagtcttccgagaacttgcaccgaactatccggttctcagtatcaacgaatatgtggatgtgatcgcggagcgcgtgccggaagaagagattggagctaatgaacagcacttcatcaaagtcgtccacttccagaatgacccgagcagaatgcatgggatacctttcagattcctattaaaggagggtgaggtcttctccgatactaagaagcgcttagaaaagcgactcggcatcaaaggcaaagcattcgagaagatcaaatttgccgtcctgcgacgataccaaaagcctcctcggtatatcaatgacgatgacattctgtttgacgagggtagcactttagaagacgaggctgcacttggcttggaccatctagaccgcacccggacaacgcgcaatggaggagaaatgttcctcaagtag

SEQ ID NO: 24018 - protein, 1157 aa, Muscodor strobelii
  misc_feature: SGI Peptide ID NO. 568183
  misc_feature (67)..(194): Pfam Id: PF00917 Pfam Desc: MATH domain
  misc_feature (215)..(537): Pfam Id: PF00443 Pfam Desc: Ubiquitin carboxyl-terminal hydrolase
  misc_feature (1)..(1157): NCBI GI: 46126009 Blast Desc: FG07382.1 [Gibberella zeae PH-1]
  misc_feature (16)..(1157): NCBI GI: 171694141 Blast Desc: protein product [Podospora anserina] gi|170947019|emb|CAP73823.1| protein product [Podospora anserina]
  misc_feature (14)..(1157): NCBI GI: 39972333 Blast Desc: MGG_07468 [Magnaporthe grisea 70-15] gi|145016655|gb|EDK01085.1| MGG_07468 [Magnaporthe grisea 70-15]
  misc_feature (1)..(1157): NCBI GI: 164426911 Blast Desc: NCU03797 [Neurospora crassa OR74A] gi|157071526|gb|EAA31950.2| NCU03797 [Neurospora crassa OR74A]
  misc_feature (1)..(1157): NCBI GI: 16944687 Blast Desc: conserved [Neurospora crassa]
  misc_feature (16)..(1157): NCBI GI: 116198187 Blast Desc: CHGG_07249 [Chaetomium globosum CBS 148.51] gi|88178528|gb|EAQ85996.1| CHGG_07249 [Chaetomium globosum CBS 148.51]
  misc_feature (31)..(1157): NCBI GI: 261351717 Blast Desc: ubiquitin carboxyl-terminal hydrolase [Verticillium albo-atrum VaMs.102]
  misc_feature (35)..(1076): NCBI GI: 156045703 Blast Desc: SS1G_10046 [Sclerotinia sclerotiorum 1980] gi|154694435|gb|EDN94173.1| SS1G_10046 [Sclerotinia sclerotiorum 1980]
  misc_feature (36)..(1156): NCBI GI: 115433152 Blast Desc: ATEG_08092 [Aspergillus terreus NIH2624] gi|114189565|gb|EAU31265.1| ATEG_08092 [Aspergillus terreus NIH2624]
  misc_feature (1)..(1157): NCBI GI: 261202542 Blast Desc: ubiquitin C-terminal hydrolase [Ajellomyces dermatitidis SLH14081] gi|239590582|gb|EEQ73163.1| ubiquitin C-terminal hydrolase [Ajellomyces dermatitidis SLH14081]
  misc_feature (61)..(1141): SWISSPROT Homolog: EC 3.1.2.15 Ubiquitin thiolesterase
MVDSQDDLAAQPDDPVTIIKPETLDNDVEHLENVTMANDFEAMKEIVLPPLLEEPKILEDAVSTWTVENYRSLKKKEHGPVFEAGGFPWRILLFPYGNQIDQSSVYLEHGFEDLSKVPDDWSCCAQFGLVMWNVNDPSLFAHHTATHRFTKEESDWGFTRFLDLRKMFQQPWNDATDRPLVEDDTVNITAYVRIVEDETGVLWHNFNNYDSKKETGFVGLKNQGATCYLNSLLQSLYFTNAFRKAVYQIPTAEDESVNNSAYTLQRLFYQLQISNSAVGTNELTRSFGWDTRHIFEQQDVQELSRKLIERMEEKMKGTAAEDSLPKMLSGKVKTYVSCINVDYESSRLEDFWDIQLNVRGIPNLQESFKDYIQQETLDGENKYWAGDEHKYQDARKGVIFDSFPEVLHLHLKRFEYDIQRDTMMKINDRFEFPDTLDVEPYLEKGADRSEPWIYKLHGVLVHSGDLNAGHYYAFLKPEKDGWFYKFDDDKVTRATVRETLEENFGGEYRSPLSLARPGSLQGRKTVMRQMNAYMLVYIRESRLDQVLTVVEKQDSPQHLQQRLEEEAAAREAKRREKEEQHLYTIVRVITQDTFRNHSSTDLATFSDDPASLKDPGAPLLYKMRKQATMREALATIAQDLNQDPKRVRLWAMVNRQNKTTRPDQPIMDLHPTVDESQLRTQGMNRDTTLRVWAEVAEEVDDEGDAIWPSYQNNANGVVVKNDLILLFLKHFDVEAQKLEGVGHIYVSKEKRVEELAPAILKRMGWGEKLPSGEQLSMWEEIKPTMIESLKPKQTLKAAELQDGDIICFQRVHDRRSPAEMIKARLGDKNSEEPKRWDRFEEARSYYDFLVYKRDVRFDPHPRCDKPDLEPFILTLSGKATYDQVAERVAEKLNVEPTHLRFFTANAATGAPKGAVRRVPNANLSQMLNPQSYAQNPQTKPNSLYYEVLDMSLAELDTKKSVKITWLSEGISKEETFDVLVSKQGHVEDLIDALIKKAQLKDQEEAGRIRLYEIHNHRVFRELAPNYPVLSINEYVDVIAERVPEEEIGANEQHFIKVVHFQNDPSRMHGIPFRFLLKEGEVFSDTKKRLEKRLGIKGKAFEKIKFAVLRRYQKPPRYINDDDILFDEGSTLEDEAALGLDHLDRTRTTRNGGEMFLK

SEQ ID NO: 24019 - DNA, 4103 bp, Muscodor strobelii
  misc_feature: SGI EST ID NO. CUFF.56667.2
  misc_feature: Variant of the nucleotide sequence at SEQ ID NO 24017
aattcacttctttctttaccttctgagtattctcttgtcactcgcttttggatgttggattactggttttggagctccgaattgtgactttgccttctgccactccgccgccaaggctgctcgtccatgcggatgcctctgcctttcctgatctcaacaagtctgtgcctctcgtccgctatatctcgtcccttgatgtcgacagcctgcgctgctgccaccgctgtattccgtagtctgtcgagatcatttacggctcgactaatcagtgtccccaaatagagctacgactccgaaatacactcccctaacgacatgatggtcgactctcaggacgacctggccgcccagcccgacgatccggtcaccatcattaagcccgaaaccctcgataatgacgtggaacacctcgagaacgtgacaatggccaatgactttgaggccatgaaagagatcgtgctgccaccgctactcgaggagcccaagatactagaagatgctgtgagcacctggaccgtcgaaaactaccggtcgctcaaaaagaaagagcacggtcccgtcttcgaggctggtggattcccatggcgcattctgttatttccctatggaaaccagattgatcagtcatcggtgtacctcgaacacgggttcgaagatctcagcaaagtgcccgacgactggagttgctgtgcccagtttggccttgtgatgtggaatgttaatgatccgtcgctgtttgcccaccacaccgcgacacatcgcttcaccaaagaggagagtgattggggatttacgaggttcctagatcttcgaaagatgttccagcagccttggaacgatgccacagatcggcctctcgtcgaagacgatactgtcaatatcacagcctacgttcgcatcgtggaagatgagactggagtattatggcacaactttaacaattacgattccaaaaaggaaaccggctttgtagggctgaaaaaccaaggcgccacgtgctatttaaactcccttctacaatccctctactttacaaatgcattccgaaaggctgtctaccaaataccaactgcagaagacgaaagtgttaataacagcgcttacacactacagcgtcttttctaccagttacagatttcaaattcggcagtaggtaccaacgagttgacacgatcgtttggctgggatacacggcacattttcgaacagcaagacgtccaggaactctccaggaagctaattgagcgaatggaagagaagatgaagggtaccgctgctgaagactcactgcccaagatgctgagcgggaaagtcaagacctatgtatcttgcatcaatgtcgactacgaatctagccggcttgaagacttctgggatattcaactcaacgttcgcggcatcccgaatctccaggagagtttcaaggactacatccagcaagaaactcttgacggtgaaaacaagtactgggcaggtgacgagcacaagtaccaagatgcacgaaagggcgtaatatttgacagtttccctgaggttctgcatctgcacctgaagcgattcgaatacgacattcagagagacactatgatgaagatcaatgaccgtttcgagttcccggacactctagacgtagagccatacctcgagaaaggcgcagacagatcagagccgtggatctacaagttgcatggtgtcctcgtgcacagcggagatctcaacgccggacattactacgcattcttgaaacctgaaaaagacgggtggttttacaagttcgatgacgataaggttaccagagcaactgtgagagagaccctcgaggagaattttggtggcgagtacagatcgccattgtcattagcacgaccgggatccttgcagggcaggaaaaccgtgatgcgccagatgaatgcatacatgttggtctacattcgtgagtcgcgattagatcaagtcttgacagtggtcgagaagcaagatagcccacagcatctgcaacaacgcctggaggaagaagccgcagcgcgcgaggcaaagcggagagagaaagaagagcagcatctctatactattgtgcgagtcatcacgcaagacacattccgcaatcattcctcgacagatctcgccacgttctctgatgatcctgcgtccttgaaggatcctggagcgcctctcctgtacaagatgagaaaacaggcgaccatgagagaagcgctggctacgattgcgcaagacctgaatcaagatcctaaaagagtccggctctgggctatggtaaaccgtcaaaataagaccacgagaccagatcaacctatcatggatctccacccaactgtggatgagtctcagctacggacccaaggaatgaaccgggataccacactccgagtctgggcagaagtcgcagaggaagtggatgatgagggtgatgccatttggccaagttatcaaaacaatgcgaatggggtcgtcgtcaaaaatgacctcatacttctcttcctcaaacatttcgatgttgaggcgcaaaagttagaaggtgttggccacatatatgttagcaaggagaagcgtgtagaagaactcgctccggccatcctcaaaagaatgggctggggagaaaagcttccatcaggagaacaactgtctatgtgggaagaaataaagccaacgatgatagagagcctgaaaccgaagcaaacccttaaggcggcggagttgcaagacggcgacatcatctgctttcaaagggttcatgatcgaagatcgccagccgagatgatcaaagctcgcctaggtgacaagaactctgaagagcccaaacgttgggatagattcgaggaagctcgatcttactacgactttcttgtgtacaaacgggatgttcgtttcgatccgcacccgcgctgcgacaagccagacctcgagcccttcattttgactcttagcggcaaagccacttatgaccaagtcgctgaacgcgttgcagaaaagttaaatgtggagccaactcacttgcgcttcttcacagcgaatgccgcaacaggcgcgcccaaaggagcagtgcgacgagtccctaatgcaaacctttcacagatgttgaacccgcaaagctacgcccagaatccccagaccaaacccaattccctttattatgaggtcttggacatgagtcttgcagaactcgatacgaagaagagtgtcaagataacgtggctgagcgaaggaatctcgaaagaggaaacgtttgatgtacttgtgagcaagcaaggtcacgtcgaagatcttattgacgccttgatcaaaaaggcacaactcaaagatcaggaggaagccggccgtatacgtctttatgagattcataatcatagagtcttccgagaacttgcaccgaactatccggttctcagtatcaacgaatatgtggatgtgatcgcggagcgcgtgccggaagaagagattggagctaatgaacagcacttcatcaaagtcgtccacttccagaatgacccgagcagaatgcatgggatacctttcagattcctattaaaggagggtgaggtcttctccgatactaagaagcgcttagaaaagcgactcggcatcaaaggcaaagcattcgagaagatcaaatttgccgtcctgcgacgataccaaaagcctcctcggtatatcaatgacgatgacattctgtttgacgagggtagcactttagaagacgaggctgcacttggcttggaccatctagaccgcacccggacaacgcgcaatggaggagaaatgttcctcaagtagagttatgagtcgattcactttgacgtaactatcagcatgtcatcagccaagagggcaccagcaacagaattatcagcaccggacgtgtatgagacagctccgtatacattttgtgtatgagtatcatttgcctagagtgagagggagggagttgagtagtgcctgttcatcgatatgggcgcggtcctcaagagaggcctcattgcggatttgtcggtagcatagcatgattgatgcgaggactgtgacatccaatagagtctctagtttgagtggatgaaaaatatattcataaggtatgaatgagctgg

SEQ ID NO: 24020 - DNA, 1404 bp, Muscodor strobelii
  misc_feature: SGI cDNA ID NO. 568184
  misc_feature: Reduced expression when VOC is produced
  misc_feature: Encodes the peptide sequence at SEQ ID NO 24021
atgccatcagcattcgcggtgcaaaatgccaccaagaccgtccggctgagcgcccttcgagcctccgtaccgacgaggactccaatcgctaccagaatcgttcggcctcagatacaccaacgaagttggaaggcggatagccggagatggacgcatgctggaggtgccaagtggcggccggtacaggtcctcgacgaatgggtggctaaagaggcgcggccgatcagcttgcgccagctcatggtgtttggtcgctctctgaccgaatctcgactcttggcctcggcgaattatgttcgaacagagcttcctacgagaatcgcgcaccgtatccgtgatatgcagcgactcccctatgtcgtagtgacaaacaagcatataagcgatgtatatgagctgtactaccatggcttcgacactttgcggcgtgtcaaggagatcaagaacttggacgacaatgagcgattctgttccgtcgtggctgagatgctgcgaactcatctgagcgtcattccgaagctcgccatgggtattatggagtgtagcggcatgatgccagcggctgagctgaactccttcatgaacacgatcctcaaatcgcgtatctcccgccgcgtaatagcagagcaacacctcgccctaaccgagaccttcaattccccctggttctccccgggcgccaagctctccgaatccgagttcatcggcgaagtattcctaaaatgcatcgccaaggacgtcgtcgagcgctgcggcgccgccgtccaagacctagcccgcaccgccaacggcccctccgctctcatcccctcgatcaacataaacggccacctcgaagcgaacttcccctacatcctctcccacctcgagtacatcatcggcgagctcctgcgcaactcggtccaagccgtaatcgaaaacaaccacacgggcgacccacccccacccatcgaagtcaccctctgcgaagcccagcaacacgtcataatccgcatctcagaccgcggcggcggtattccgagagatatgctcccgcacatctggtccttcggcaaagggccctccgcgcccatgcccttcgaccaagtccccctaatagccgaaactctccaaaaattcaaaatcgacggcaacttctccgatctccaagatacattcgccaaacgctccgaaacatatacctccccacaccacgacggctccctaacctccctctccacccgtcccccagatttacgcttgggtatgggtctccctctatctcgcgtctacgccgagtactgggccggatctctcgaggttcatagtcttgagggctacggcgtcgatgcattcttgcagatttcgaagctggggaataagaatgagcagcttgctactagagctaccatggacgcggtctag

SEQ ID NO: 24021 - protein, 467 aa, Muscodor strobelii
  misc_feature: SGI Peptide ID NO. 568184
  misc_feature (284)..(451): Pfam Id: PF02518 Pfam Desc: Histidine kinase-, DNA gyrase B-, and HSP90-like ATPase
  misc_feature (284)..(347): Pfam Id: PF02518 Pfam Desc: Histidine kinase-, DNA gyrase B-, and HSP90-like ATPase
  misc_feature (22)..(467): NCBI GI: 46126007 Blast Desc: FG07381.1 [Gibberella zeae PH-1]
  misc_feature (54)..(467): NCBI GI: 256730927 Blast Desc: [Nectria haematococca mpVI 77-13-4]
  misc_feature (81)..(467): NCBI GI: 85101644 Blast Desc: NCU03796 [Neurospora crassa OR74A] gi|16944688|emb|CAC28800.2| related to branched-chain alpha-ketoacid dehydrogenase kinase [Neurospora crassa] NCU03796
  misc_feature (81)..(467): NCBI GI: 116198185 Blast Desc: CHGG_07248 [Chaetomium globosum CBS 148.51] gi|88178527|gb|EAQ85995.1| CHGG_07248 [Chaetomium globosum CBS 148.51]
  misc_feature (36)..(467): NCBI GI: 115433154 Blast Desc: conserved [Aspergillus terreus NIH2624] gi|114189566|gb|EAU31266.1| conserved [Aspergillus terreus NIH2624]
  misc_feature (58)..(467): NCBI GI: 225557078 Blast Desc: pyruvate dehydrogenase kinase [Ajellomyces capsulatus G186AR]
  misc_feature (58)..(467): NCBI GI: 240277624 Blast Desc: pyruvate dehydrogenase kinase [Ajellomyces capsulatus H143]
  misc_feature (58)..(467): NCBI GI: 154285356 Blast Desc: conserved [Ajellomyces capsulatus NAm1] gi|150407114|gb|EDN02655.1| conserved [Ajellomyces capsulatus NAm1]
  misc_feature (58)..(467): NCBI GI: 226277702 Blast Desc: conserved [Paracoccidioides brasiliensis Pb01]
  misc_feature (58)..(467): NCBI GI: 238503125 Blast Desc: pyruvate dehydrogenase kinase, [Aspergillus flavus NRRL3357] gi|220691606|gb|EED47954.1| pyruvate dehydrogenase kinase, [Aspergillus flavus NRRL3357]
  misc_feature (16)..(458): SWISSPROT Homolog: EC 2.7.11.4 [3-methyl-2-oxobutanoate dehydrogenase (acetyl-transferring)] kinase
  misc_feature: Useful for introducing or modulating the production of volatile compounds
MPSAFAVQNATKTVRLSALRASVPTRTPIATRIVRPQIHQRSWKADSRRWTHAGGAKWRPVQVLDEWVAKEARPISLRQLMVFGRSLTESRLLASANYVRTELPTRIAHRIRDMQRLPYVVVTNKHISDVYELYYHGFDTLRRVKEIKNLDDNERFCSVVAEMLRTHLSVIPKLAMGIMECSGMMPAAELNSFMNTILKSRISRRVIAEQHLALTETFNSPWFSPGAKLSESEFIGEVFLKCIAKDVVERCGAAVQDLARTANGPSALIPSININGHLEANFPYILSHLEYIIGELLRNSVQAVIENNHTGDPPPPIEVTLCEAQQHVIIRISDRGGGIPRDMLPHIWSFGKGPSAPMPFDQVPLIAETLQKFKIDGNFSDLQDTFAKRSETYTSPHHDGSLTSLSTRPPDLRLGMGLPLSRVYAEYWAGSLEVHSLEGYGVDAFLQISKLGNKNEQLATRATMDAV

SEQ ID NO: 24022 - DNA, 4080 bp, Muscodor strobelii
  misc_feature: SGI EST ID NO. CUFF.57372.0
  misc_feature: Variant of the nucleotide sequence at SEQ ID NO 24020
tgacaggagcactattcacattggtcaatcacgaaagactccaaatcatagaagcgcttcttctttctgctattctgctattcttttgcgcgcaatctcaacaccaattagagactactgctataatacaacccacacgctaatggaactggcggcatgccatcagcattcgcggtgcaaaatgccaccaagaccgtccggctgagcgcccttcgagcctccgtaccgacgaggactccaatcgctaccagaatcgttcggcctcagatacaccaacgaagttggaaggcggatagccggagatggacgcatgctggaggtgccaagtggcggccggtacaggtcctcgacgagtacgtagtccagttcctgcacctagccgctcgcttgcccgcctacgcgcctgatctgactaactcgccgggcacagatgggtggctaaagaggcgcggccgatcagcttgcgccagctcatggtgtttggtcgctctctgaccgaatctcgactcttggcctcggcgaattatgttcgaacagagcttcctacgagaatcgcgcaccgtatccgtgatatgcagcgactcccctatgtcgtagtgacaaacaagcatataagcgatgtatatgagctgtactaccatggcttcgacactttgcggcgtgtcaaggagatcaagaacttggacgacaatgagcgattctgttccgtcgtggctgagatgctgcgaactcatctgagcgtcattccgaagctcgccatgggtattatggagtgtagcggcatgatgccagcggctgagctgaactccttcatgaacacgatcctcaaatcgcgtatctcccgccgcgtaatagcagagcaacacctcgccctaaccgagaccttcaattccccctggttctccccgggcgccaagctctccgaatccgagttcatcggcgaagtattcctaaaatgcatcgccaaggacgtcgtcgagcgctgcggcgccgccgtccaagacctagcccgcaccgccaacggcccctccgctctcatcccctcgatcaacataaacggccacctcgaagcgaacttcccctacatcctctcccacctcgagtacatcatcggcgagctcctgcgcaactcggtccaagccgtaatcgaaaacaaccacacgggcgacccacccccacccatcgaagtcaccctctgcgaagcccagcaacacgtcataatccgcatctcagaccgcggcggcggtattccgagagatatgctcccgcacatctggtccttcggcaaagggccctccgcgcccatgcccttcgaccaagtccccctaatagccgaaactctccaaaaattcaaaatcgacggcaacttctccgatctccaagatacattcgccaaacgctccgaaacatatacctccccacaccacgacggctccctaacctccctctccacccgtcccccagatttacgcttgggtatgggtctccctctatctcgcgtctacgccgagtactgggccggatctctcgaggttcatagtcttgagggctacggcgtcgatgcattcttgcagatttcgaagctggggaataagaatgagcagcttgctactagagctaccatggacgcggtctaggttgcgcgtctacggagtgttcattttggtttagagggggagaagatgaggatgaggagttggtgtttgttgtgattgcgtgcgtgataccagtgcgagattatggaaatggaaatgggaatgaaaggatagggtgtatataaggtcgctatcgtgtttgaatgaggtactcgtaagaggcatggaataagaagtttcgaaataataagctcaaagccttgaatggttccccttattcttgaagagtgtggttgataatgtcttctacaagtggtattgattctaggatctttagctgtctgtattgattcttgtcctgaggaatgtagcatcagtacctcatggtctcttaaacacggcccaggtatacgtcttcttcgctcaatagtcattaatgtaagaaaatcttgattatatcatcaactaaacctaactgcactgaacaaatagaggcgagtccatactgggtggaggctcctatcaaaaaggggcccctggagaaatgattcggggacataaccagccttttaatctcttctctcatctcatcttgcacacacgcaacgcatcgacacgccagaacgcttcatagccccaattgccaggtacatatgcttttcttctgcgtctctcgtcaacttcccactgtcagctaatcaaatgtagccagccagctcgttaaacaaagcaggtccgtgcatgggaactcgtcttctgcttctcgaatattaaatggacgatgggattctgggtattatgaaactccctactctttactagtccgaggccgtaatcaccggtagtcaataccgccagatgataatgaaataagagggaacgattcggtttagcggcggccggagcgtgcgacgctgccctgcatctgctcgaggtcggtctcgagctgcttgatctgggcgtgcgtctgctcaaggtccttgttaagacgatctctttcggcgatgagcttctgctcccactgtcggaaacgttgctcctcaatcttaacctgttccgtaaaccgcttacgaagagcctcttcctcttccttgtacttggggttgtctagcttgcgcgggcgggcctcgccgaacttgcgggtttccatctgttgtgcgcggtaggcctcgtagtgcagctcctcggtggtgtggataaggtcaagcatgtgggtgcggatgaggatggagcgaagcttcttgaaatcgcagtggtcttcgttctcgacttcggcaacaccccacgagtactggcgacccttcacgatacggccatcaccggtcttaacgtccttctctgatcctatcacggcgaaaggcatggcagccatcaagctacgggcgtgctgaacggcagcctcgtcatcctcctcgatcggtggttggtagatcttgatgctctgagcttcaatgacggcacggatctaaggatactcgatcagtaaaagacgcttcacatggtagtggtatatgtgcgacgtaccttggccttgaacttggccagatcagcagggctcaacgtatcagctttggcaatgacggggatcaagttcacacgagagcagagtctcttcataacctcgatgtcgagaggcttcaaggtgtggccggtggggcggatgaagtataagcaggcatggacacggagatcgatcttgtcctggcggcgcggctgttgctcctggagcatgtacgactcgtgctggtcgtcgagaaactcgatgatgggcatccaggagtcgcggttgttgacatagtcgccaaagcccggggtatcaatgacggtcaagcggactagatacaaactctagtcaatcactagcagcagatacggatggcagcgatgcaaataattacccttgaagaatttctcttccagctcggcttttgtaatctcaatctcgacagtcttgtcgacttgcttctggtggcgcttcttgtggtcggcatagttcttgatggtggtggagaagagagtgttgatgaaggtcgtctttcccaggcccgattcaccagcaacctaattcagggcggacatgttaatacaatacaacctcgtcgagtcggcaatgggccgagacgatgagaccatagcacgcaccatgatagtgaaggcggcacctctcttggcgacgatcttgtgtcgctggttgggcagattggcaatgccaattggcgacgcgctctcggtggtggtaggcggcatcgtgaaggtggatgtgtacagctattcacaatacagtattggagagaggggctcgctggggacgatgaacagtgtaggtaaaagtgcacgccagacggacacaattctaaacaatgagggtatctcagcgacaacacgggatgttttgggaaaggagaatcgccggtgtaaaaatgaagccgggggtggttgttctcacagcgggcaagaaggtttaggcttgtgcttcaggggaaag

SEQ ID NO: 24023 - DNA, 1155 bp, Muscodor strobelii
  misc_feature: SGI cDNA ID NO. 568185
  misc_feature: Reduced expression when VOC is produced
  misc_feature: Encodes the peptide sequence at SEQ ID NO 24024
atgccgcctaccaccaccgagagcgcgtcgccaattggcattgccaatctgcccaaccagcgacacaagatcgtcgccaagagaggtgccgccttcactatcatggttgctggtgaatcgggcctgggaaagacgaccttcatcaacactctcttctccaccaccatcaagaactatgccgaccacaagaagcgccaccagaagcaagtcgacaagactgtcgagattgagattacaaaagccgagctggaagagaaattcttcaaggtccgcttgaccgtcattgataccccgggctttggcgactatgtcaacaaccgcgactcctggatgcccatcatcgagtttctcgacgaccagcacgagtcgtacatgctccaggagcaacagccgcgccgccaggacaagatcgatctccgtgtccatgcctgcttatacttcatccgccccaccggccacaccttgaagcctctcgacatcgaggttatgaagagactctgctctcgtgtgaacttgatccccgtcattgccaaagctgatacgttgagccctgctgatctggccaagttcaaggccaagatccgtgccgtcattgaagctcagagcatcaagatctaccaaccaccgatcgaggaggatgacgaggctgccgttcagcacgcccgtagcttgatggctgccatgcctttcgccgtgataggatcagagaaggacgttaagaccggtgatggccgtatcgtgaagggtcgccagtactcgtggggtgttgccgaagtcgagaacgaagaccactgcgatttcaagaagcttcgctccatcctcatccgcacccacatgcttgaccttatccacaccaccgaggagctgcactacgaggcctaccgcgcacaacagatggaaacccgcaagttcggcgaggcccgcccgcgcaagctagacaaccccaagtacaaggaagaggaagaggctcttcgtaagcggtttacggaacaggttaagattgaggagcaacgtttccgacagtgggagcagaagctcatcgccgaaagagatcgtcttaacaaggaccttgagcagacgcacgcccagatcaagcagctcgagaccgacctcgagcagatgcagggcagcgtcgcacgctccggccgccgctaa

SEQ ID NO: 24024 - protein, 384 aa, Muscodor strobelii
  misc_feature: SGI Peptide ID NO. 568185
  misc_feature (28)..(308): Pfam Id: PF00735 Pfam Desc: Septin
  misc_feature (1)..(384): NCBI GI: 39972329 Blast Desc: MGG_07466 [Magnaporthe grisea 70-15] gi|145016653|gb|EDK01083.1| MGG_07466 [Magnaporthe grisea 70-15]
  misc_feature (1)..(384): NCBI GI: 171694145 Blast Desc: protein product [Podospora anserina] gi|170947021|emb|CAP73825.1| protein product [Podospora anserina]
  misc_feature (1)..(384): NCBI GI: 85101640 Blast Desc: cell division control protein 12 [Neurospora crassa OR74A] gi|12718472|emb|CAC28801.1| cell division control protein CDC12 [Neurospora crassa] gi|28922725|gb|EAA31948.1| cell control
  misc_feature (4)..(384): NCBI GI: 256731303 Blast Desc: [Nectria haematococca mpVI 77-13-4]
  misc_feature (1)..(384): NCBI GI: 59802939 Blast Desc: septin-like protein [Magnaporthe grisea]
  misc_feature (1)..(384): NCBI GI: 46126005 Blast Desc: FG07380.1 [Gibberella zeae PH-1]
  misc_feature (12)..(384): NCBI GI: 116198183 Blast Desc: CHGG_07247 [Chaetomium globosum CBS 148.51] gi|88178526|gb|EAQ85994.1| CHGG_07247 [Chaetomium globosum CBS 148.51]
  misc_feature (1)..(384): NCBI GI: 156050253 Blast Desc: SS1G_07713 [Sclerotinia sclerotiorum 1980] gi|154692114|gb|EDN91852.1| SS1G_07713 [Sclerotinia sclerotiorum 1980]
  misc_feature (1)..(384): NCBI GI: 154285236 Blast Desc: cell division control protein 12 [Ajellomyces capsulatus NAm1] gi|150407054|gb|EDN02595.1| cell division control protein 12 [Ajellomyces capsulatus NAm1]
  misc_feature (1)..(384): NCBI GI: 154705471 Blast Desc: septin-2 [Paracoccidioides brasiliensis] gi|226284451|gb|EEH40017.1| cell division control protein [Paracoccidioides brasiliensis Pb01] gi|226294215|gb|EEH49635.1|
  misc_feature: Useful for introducing or modulating the production of volatile compounds
MPPTTTESASPIGIANLPNQRHKIVAKRGAAFTIMVAGESGLGKTTFINTLFSTTIKNYADHKKRHQKQVDKTVEIEITKAELEEKFFKVRLTVIDTPGFGDYVNNRDSWMPIIEFLDDQHESYMLQEQQPRRQDKIDLRVHACLYFIRPTGHTLKPLDIEVMKRLCSRVNLIPVIAKADTLSPADLAKFKAKIRAVIEAQSIKIYQPPIEEDDEAAVQHARSLMAAMPFAVIGSEKDVKTGDGRIVKGRQYSWGVAEVENEDHCDFKKLRSILIRTHMLDLIHTTEELHYEAYRAQQMETRKFGEARPRKLDNPKYKEEEEALRKRFTEQVKIEEQRFRQWEQKLIAERDRLNKDLEQTHAQIKQLETDLEQMQGSVARSGRR

SEQ ID NO: 24025 - DNA, 3007 bp, Muscodor strobelii
  misc_feature: SGI EST ID NO. CUFF.57373.3
  misc_feature: Variant of the nucleotide sequence at SEQ ID NO 24023
gtgagaacaaccacccccggcttcatttttacaccggcgattctcctttcccaaaacatcccgtgttgtcgctgagataccctcattgtttagaattgtgtccgtctggcgtgcacttttacctacactgttcatcgtccccagcgagcccctctctccaatactgtattgtgaatagctgtacacatccaccttcacgatgccgcctaccaccaccgagagcgcgtcgccaattggcattgccaatctgcccaaccagcgacacaagatcgtcgccaagagaggtgccgccttcactatcatggttgctggtgaatcgggcctgggaaagacgaccttcatcaacactctcttctccaccaccatcaagaactatgccgaccacaagaagcgccaccagaagcaagtcgacaagactgtcgagattgagattacaaaagccgagctggaagagaaattcttcaaggtccgcttgaccgtcattgataccccgggctttggcgactatgtcaacaaccgcgactcctggatgcccatcatcgagtttctcgacgaccagcacgagtcgtacatgctccaggagcaacagccgcgccgccaggacaagatcgatctccgtgtccatgcctgcttatacttcatccgccccaccggccacaccttgaagcctctcgacatcgaggttatgaagagactctgctctcgtgtgaacttgatccccgtcattgccaaagctgatacgttgagccctgctgatctggccaagttcaaggccaagatccgtgccgtcattgaagctcagagcatcaagatctaccaaccaccgatcgaggaggatgacgaggctgccgttcagcacgcccgtagcttgatggctgccatgcctttcgccgtgataggatcagagaaggacgttaagaccggtgatggccgtatcgtgaagggtcgccagtactcgtggggtgttgccgaagtcgagaacgaagaccactgcgatttcaagaagcttcgctccatcctcatccgcacccacatgcttgaccttatccacaccaccgaggagctgcactacgaggcctaccgcgcacaacagatggaaacccgcaagttcggcgaggcccgcccgcgcaagctagacaaccccaagtacaaggaagaggaagaggctcttcgtaagcggtttacggaacaggttaagattgaggagcaacgtttccgacagtgggagcagaagctcatcgccgaaagagatcgtcttaacaaggaccttgagcagacgcacgcccagatcaagcagctcgagaccgacctcgagcagatgcagggcagcgtcgcacgctccggccgccgctaaaccgaatcgttccctcttatttcattatcatctggcggtattgactaccggtgattacggcctcggactagtaaagagtagggagtttcataatacccagaatcccatcgtccatttaatattcgagaagcagaagacgagttcccatgcacggacctgctttgtttaacgagctggctggctacatttgattagctgacagtgggaagttgacgagagacgcagaagaaaagcatatgtacctggcaattggggctatgaagcgttctggcgtgtcgatgcgttgcgtgtgtgcaagatgagatgagagaagagattaaaaggctggttatgtccccgaatcatttctccaggggcccctttttgataggagcctccacccagtatggactcgcctctatttgttcagtgcagttaggtttagttgatgatataatcaagattttcttacattaatgactattgagcgaagaagacgtatacctgggccgtgtttaagagaccatgaggtactgatgctacattcctcaggacaagaatcaatacagacagctaaagatcctagaatcaataccacttgtagaagacattatcaaccacactcttcaagaataaggggaaccattcaaggctttgagcttattatttcgaaacttcttattccatgcctcttacgagtacctcattcaaacacgatagcgaccttatatacaccctatcctttcattcccatttccatttccataatctcgcactggtatcacgcacgcaatcacaacaaacaccaactcctcatcctcatcttctccccctctaaaccaaaatgaacactccgtagacgcgcaacctagaccgcgtccatggtagctctagtagcaagctgctcattcttattccccagcttcgaaatctgcaagaatgcatcgacgccgtagccctcaagactatgaacctcgagagatccggcccagtactcggcgtagacgcgagatagagggagacccatacccaagcgtaaatctgggggacgggtggagagggaggttagggagccgtcgtggtgtggggaggtatatgtttcggagcgtttggcgaatgtatcttggagatcggagaagttgccgtcgattttgaatttttggagagtttcggctattagggggacttggtcgaagggcatgggcgcggagggccctttgccgaaggaccagatgtgcgggagcatatctctcggaataccgccgccgcggtctgagatgcggattatgacgtgttgctgggcttcgcagagggtgacttcgatgggtgggggtgggtcgcccgtgtggttgttttcgattacggcttggaccgagttgcgcaggagctcgccgatgatgtactcgaggtgggagaggatgtaggggaagttcgcttcgaggtggccgtttatgttgatcgaggggatgagagcggaggggccgttggcggtgcgggctaggtcttggacggcggcgccgcagcgctcgacgacgtccttggcgatgcattttaggaatacttcgccgatgaactcggattcggagagcttggcgcccggggagaaccagggggaattgaaggtctcggttagggcgaggtgttgctctgctattacgcggcgggagatacgct

SEQ ID NO: 24026 - DNA, 2697 bp, Muscodor strobelii
  misc_feature: SGI cDNA ID NO. 568186
  misc_feature: Encodes the peptide sequence at SEQ ID NO 24027
atgaagaccgatttcaagttttcaaatctgcttggcactgtctactgtcaagggaatctcttgttcagtccagatggcacctgtctcttctccccagtagggaatagagtcactgtcttcaatcttgtcgaaaacaagtcgcatacacttcccttcgcccaccgaaagaacatctcgaggataggtctgacaccgcggggtaacttgttactgtcggtagatgacgagggccatgcgatcttaaccaacgttcagcgtcgcatctccatatatcacttctcttttcggtcgcctgtcacagccctcgctttctctccttccggacgccatttcgctgtcggacttggtcgcaagaccgaagtatggcaggtccccgcgacgcccgattccacccccgacggcggccttgaattcgcgccttttgtacgacaccacactcatatgggccatttcgacgaagttaggcacatagaatggtctaaggattcacgattctttcttactgcatccaaggacttgacaacacgcatatggagtctcgatgccgaggaagggtttacgccgactgttctgtccggacacaaacagagcgttataggagcatggttctcaaaagatcaagagaccatttataccgtcagcaaagatggcgccgtatttgactggcaatataccaggcatcccaatgcaccgccgccggacgaagacgatgagatgacagatgctaacgaggacgatctgcggtggaggatcgtgaagcgtcactatttcaatcagaacaatgcgacagtcaagtgcgcttcatatcacgcagattcgaaccttctggtcaccggttttacgaacggtatatttggcttgtacgaaatgccagactttaaccccatccacacactcagcatctcccaaaacgaaatcgactacgtgaccatgaatcagagcgcagaatggctagccttcggggcatcgaaattaggccagctgttggtgtgggaatggcaatcggaatcttacatcttgaaacaacagggccatttcgattccatgaactcgttggtttattcgcccgatggaaagcggattgtcaccaccgccgacgacggcaaaatcaaagtttgggatgtggactcggggttttgcattgtcacattcacagagcacactagtggcgttacggcttgcgaatttgcaaagaagggcaatgttttgttcactgccagcttagacggctcaattagagcatgggatctcatcagataccgaaactttaggacctttaccgccccaacaagattatcattttcttgtatgtcagtagacccaagtggcgaagtggtggcggcaggttcactagactcctttgatattcatatctggtcagtgcaaacgggtcaattgctagatcaaatgtcaggacacgaaggcccggtttcttcactagcatttgctcccaatggcgacctgctggtcagtggcagttgggatcggacggctcgagtgtggtcaatctttggtcgaacacagtcaagcgaacctctgcaactacaagcagatgtgttggatgttgccatacgacctgactctgctcagctcgccatttcgactctcgatggccaactgacattctggtcagtgtccgaagccgaacaagtttcggggctcgatggtcgacgagacgtgtccggcggtcgcaaggtttccgataggagaactgctgccaatgtctcaggtaccaagagctttggatctatacagtacagtacggatggcagttgtatactagcagcgggaagcagcaagtacatttgcctgtattcagtaagcaccatggttctactgaagaaatttaccgtcagcgtcaatttatcgctatccgggactcaagaattcttaaacagcaaacttctcacagaagcgggacccgaaggcttattagatgatgagaagaactcagaccgggacacaaggaaagagagcaatctgccaggctcgaagcggggtggtgatccttcagctagacaggcgcaaccggacgtcaaggtgactggtgtggcattttcaccggctggtacatcattctgcgccgcttccaccgaaggactcctcatttacagtcttgataacgatctccagttcgacccctttgacttgaacatggagatcacgcccgcctcgacactagctgttcttgaaaatgaaaaagattatctcaaagcgcttgtgatggcattccgcctcaacgaggcaggcttgatcaaaagagtatttcaggctattccctacccagatattccattggtcgtagagcagttcccgacagtctacgtagcaagattgctacggttcatagccgcccaaacggaagagtcaccccacattgagttctgcatgctctggatcaaggccgtggttgataaacatgggtcttggctaacagcaaaccgaagcaaagtcgacgttgaactacgagttgtggccagagccattgcccggatgcaaaacgagataagacgccttgcagatgagaatgtttacatggtcgattacttactcgggcaagctgcgtccaagaaggcaagcaatgcctcaagcctggctaatagagacgatgcatcaatgaaaagcctgacagcaagaggagaagatgccgacggcacagatgatgactctggaggcgaatggataggtttagactga

SEQ ID NO: 24027 - protein, 898 aa, Muscodor strobelii
  misc_feature: SGI Peptide ID NO. 568186
  misc_feature (464)..(502): Pfam Id: PF00400 Pfam Desc: WD domain, G-beta repeat
  misc_feature (378)..(416): Pfam Id: PF00400 Pfam Desc: WD domain, G-beta repeat
  misc_feature (336)..(374): Pfam Id: PF00400 Pfam Desc: WD domain, G-beta repeat
  misc_feature (141)..(179): Pfam Id: PF00400 Pfam Desc: WD domain, G-beta repeat
  misc_feature (742)..(857): Pfam Id: PF04047 Pfam Desc: Periodic tryptophan protein 2 WD repeat associated presumed domain
  misc_feature (1)..(898): NCBI GI: 39972327 Blast Desc: MGG_07465 [Magnaporthe grisea 70-15] gi|145016652|gb|EDK01082.1| MGG_07465 [Magnaporthe grisea 70-15]
  misc_feature (1)..(898): NCBI GI: 116198181 Blast Desc: conserved [Chaetomium globosum CBS 148.51] gi|88178525|gb|EAQ85993.1| conserved [Chaetomium globosum CBS 148.51]
  misc_feature (1)..(898): NCBI GI: 46126003 Blast Desc: PWP2_NEUCR Periodic tryptophan protein 2 homolog [Gibberella zeae PH-1]
  misc_feature (1)..(898): NCBI GI: 256730928 Blast Desc: [Nectria haematococca mpVI 77-13-4]
  misc_feature (1)..(897): NCBI GI: 85101636 Blast Desc: periodic tryptophan protein 2 [Neurospora crassa OR74A] gi|30580488|sp|Q9C270.1|PWP2_NEUCR RecName: Full=Periodic tryptophan protein 2 homolog gi|12718473|emb|CAC28802.1| periodic
  misc_feature (1)..(898): NCBI GI: 171694147 Blast Desc: protein product [Podospora anserina] gi|170947022|emb|CAP73826.1| protein product [Podospora anserina]
  misc_feature (44)..(857): NCBI GI: 156050251 Blast Desc: SS1G_07712 [Sclerotinia sclerotiorum 1980] gi|154692113|gb|EDN91851.1| SS1G_07712 [Sclerotinia sclerotiorum 1980]
  misc_feature (1)..(858): NCBI GI: 189206880 Blast Desc: periodic tryptophan protein 2 [Pyrenophora tritici-repentis Pt-1C-BFP] gi|187975867|gb|EDU42493.1| periodic tryptophan protein 2 [Pyrenophora tritici-repentis Pt-1C-BFP]
  misc_feature (1)..(898): NCBI GI: 169616143 Blast Desc: SNOG_11245 [Phaeosphaeria nodorum SN15] gi|111060624|gb|EAT81744.1| SNOG_11245 [Phaeosphaeria nodorum SN15]
  misc_feature (1)..(851): NCBI GI: 225684909 Blast Desc: WD repeat domain 5B [Paracoccidioides brasiliensis Pb03]
MKTDFKFSNLLGTVYCQGNLLFSPDGTCLFSPVGNRVTVFNLVENKSHTLPFAHRKNISRIGLTPRGNLLLSVDDEGHAILTNVQRRISIYHFSFRSPVTALAFSPSGRHFAVGLGRKTEVWQVPATPDSTPDGGLEFAPFVRHHTHMGHFDEVRHIEWSKDSRFFLTASKDLTTRIWSLDAEEGFTPTVLSGHKQSVIGAWFSKDQETIYTVSKDGAVFDWQYTRHPNAPPPDEDDEMTDANEDDLRWRIVKRHYFNQNNATVKCASYHADSNLLVTGFTNGIFGLYEMPDFNPIHTLSISQNEIDYVTMNQSAEWLAFGASKLGQLLVWEWQSESYILKQQGHFDSMNSLVYSPDGKRIVTTADDGKIKVWDVDSGFCIVTFTEHTSGVTACEFAKKGNVLFTASLDGSIRAWDLIRYRNFRTFTAPTRLSFSCMSVDPSGEVVAAGSLDSFDIHIWSVQTGQLLDQMSGHEGPVSSLAFAPNGDLLVSGSWDRTARVWSIFGRTQSSEPLQLQADVLDVAIRPDSAQLAISTLDGQLTFWSVSEAEQVSGLDGRRDVSGGRKVSDRRTAANVSGTKSFGSIQYSTDGSCILAAGSSKYICLYSVSTMVLLKKFTVSVNLSLSGTQEFLNSKLLTEAGPEGLLDDEKNSDRDTRKESNLPGSKRGGDPSARQAQPDVKVTGVAFSPAGTSFCAASTEGLLIYSLDNDLQFDPFDLNMEITPASTLAVLENEKDYLKALVMAFRLNEAGLIKRVFQAIPYPDIPLVVEQFPTVYVARLLRFIAAQTEESPHIEFCMLWIKAVVDKHGSWLTANRSKVDVELRVVARAIARMQNEIRRLADENVYMVDYLLGQAASKKASNASSLANRDDASMKSLTARGEDADGTDDDSGGEWIGLD

SEQ ID NO: 24028 - DNA, 3568 bp, Muscodor strobelii
  misc_feature: SGI EST ID NO. CUFF.56531.0
  misc_feature: Variant of the nucleotide sequence at SEQ ID NO 24026
gctgcgtattggatgcgcaaatccaagtatcgcgagagtatggtagtcatggcgatggtggacatatagcaacaatgaagaccgatttcaagttttcaaatctgcttggcactgtctactgtcaagggaatctcttgttcagtccagatggcacctgtctcttctccccagtagggaatagagtcactgtcttcaatcttgtcgaaaacaagtcgcatacacttcccttcgcccaccgaaagaacatctcgaggataggtctgacaccgcggggtaacttgttactgtcggtagatgacgagggccatgcgatcttaaccaacgttcagcgtcgcatctccatatatcacttctcttttcggtcgcctgtcacagccctcgctttctctccttccggacgccatttcgctgtcggacttggtcgcaagaccgaagtatggcaggtccccgcgacgcccgattccacccccgacggcggccttgaattcgcgccttttgtacgacaccacactcatatgggccatttcgacgaagttaggcacatagaatggtctaaggattcacgattctttcttactgcatccaaggacttgacaacacgcatatggagtctcgatgccgaggaagggtttacgccgactgttctgtccggacacaaacagagcgttataggagcatggttctcaaaagatcaagagaccatttataccgtcagcaaagatggcgccgtatttgactggcaatataccaggcatcccaatgcaccgccgccggacgaagacgatgagatgacagatgctaacgaggacgatctgcggtggaggatcgtgaagcgtcactatttcaatcagaacaatgcgacagtcaagtgcgcttcatatcacgcagattcgaaccttctggtcaccggttttacgaacggtatatttggcttgtacgaaatgccagactttaaccccatccacacactcagcatctcccaaaacgaaatcgactacgtgaccatgaatcagagcgcagaatggctagccttcggggcatcgaaattaggccagctgttggtgtgggaatggcaatcggaatcttacatcttgaaacaacagggccatttcgattccatgaactcgttggtttattcgcccgatggaaagcggattgtcaccaccgccgacgacggcaaaatcaaagtttgggatgtggactcggggttttgcattgtcacattcacagagcacactagtggcgttacggcttgcgaatttgcaaagaagggcaatgttttgttcactgccagcttagacggctcaattagagcatgggatctcatcagataccgaaactttaggacctttaccgccccaacaagattatcattttcttgtatgtcagtagacccaagtggcgaagtggtggcggcaggttcactagactcctttgatattcatatctggtcagtgcaaacgggtcaattgctagatcaaatgtcaggacacgaaggcccggtttcttcactagcatttgctcccaatggcgacctgctggtcagtggcagttgggatcggacggctcgagtgtggtcaatctttggtcgaacacagtcaagcgaacctctgcaactacaagcagatgtgttggatgttgccatacgacctgactctgctcagctcgccatttcgactctcgatggccaactgacattctggtcagtgtccgaagccgaacaagtttcggggctcgatggtcgacgagacgtgtccggcggtcgcaaggtttccgataggagaactgctgccaatgtctcaggtaccaagagctttggatctatacagtacagtacggatggcagttgtatactagcagcgggaagcagcaagtacatttgcctgtattcagtaagcaccatggttctactgaagaaatttaccgtcagcgtcaatttatcgctatccgggactcaagaattcttaaacagcaaacttctcacagaagcgggacccgaaggcttattagatgatgagaagaactcagaccgggacacaaggaaagagagcaatctgccaggctcgaagcggggtggtgatccttcagctagacaggcgcaaccggacgtcaaggtgactggtgtggcattttcaccggctggtacatcattctgcgccgcttccaccgaaggactcctcatttacagtcttgataacgatctccagttcgacccctttgacttgaacatggagatcacgcccgcctcgacactagctgttcttgaaaatgaaaaagattatctcaaagcgcttgtgatggcattccgcctcaacgaggcaggcttgatcaaaagagtatttcaggctattccctacccagatattccattggtcgtagagcagttcccgacagtctacgtagcaagattgctacggttcatagccgcccaaacggaagagtcaccccacattgagttctgcatgctctggatcaaggccgtggttgataaacatgggtcttggctaacagcaaaccgaagcaaagtcgacgttgaactacgagttgtggccagagccattgcccggatgcaaaacgagataagacgccttgcagatgagaatgtttacatggtcgattacttactcgggcaagctgcgtccaagaaggcaagcaatgcctcaagcctggctaatagagacgatgcatcaatgaaaagcctgacagcaagaggagaagatgccgacggcacagatgatgactctggaggcgaatggataggtttagactgatgctgctaattcacctaaacactccgggctatgaagataatcttcgcggattgtcaaactttaccgagcgtccttcaaactccatgtttacactgcactgcatttcacagtcagtgagagtctcggtcgaccctttccgcagcacgtcaagtcgcggcgaaacagactatccttgttagatagtattaaagcaggctagcatatttgggcttgttagctgcggctaatctctcaacgcaaggctctgtagatgcagatgtcgtttgaagctgctcccggagtgtctgccgggctctacatctgggcatccgagcgaccccctgaatgaaaggcctaccctgaaaggaaagtggtggctacagtaggtacgccctatgcgagataatgcgagaataacacaccgagccctgcactcagacccttgacccggttcggtgaggctcaaagtgtatccggggttgctaaattacctttcaccagcggcgtacaaccaacgaaatgctgattggactatattagaatcttgaggttactctacatatgtacttgaaccaggacagcaaatagtgcatggtacctatgtaaattacgctgtatatgactcttctcgatgaatcattggctccatagcctatgtgacgacacctttacatttcaatgcctgaggtgttgcctgaatccacagtgctgttggttgacacttctttgacctgattggttcccagtcttggcagatggtcccagatcccaggtacaggcatagggctgtgcatacagcctggggcagtgagctcccc

SEQ ID NO: 24029 - DNA, 1806 bp, Muscodor strobelii
  misc_feature: SGI cDNA ID NO. 568187
  misc_feature: Encodes the peptide sequence at SEQ ID NO 24030
atggatatgaacgctcttctccggggcttcgtccctacagcggaagctgcaaacgttacaagttcggccacagaagcgacagagacaaatgctatgcaccccaatataatcgagagcatcttaccgctactcggcctgcgggggttcgccccaatatacagagttgtcggctcttcattaggctgggatccaacaatcttactaacggcactgggagttctctgggccttcaacagaattttcagacaggtctacagcttagtctacaaactcatcactgatcatttgatgagcacaatccacatcagcagtacggacgatatttaccttcatctgatgaaatggctggccgtacagcccagaatgacggactcgcggtctctcatggccgagacggtgagcaagacggcttgggaagacgaagatgagtcgaagattgctcgcgatcgttcgggtctgtatctcaatttctcgaatcaggaggcgagagcgcccccgcaatttgtaccggccgtagggttgcacagcttctggttcaaaggccaatacttcagattgaaccgtaagaaggagtcggttcttgatgatggatccagtcacggaattcttggatttaaagacaaggaggacctgatgatatcttgcctgtggagaagtccagaacctatcaaacaactgctagcacattgcaaggagttttatcacagcgatcaccaggcccgcaccatcgtcaagcgacctaacccacagatggtgcggcgatatgccggccgacacagttggcagcaagtcgcaaaccgacctgtgcgagacatgcgaactgttgtccttgaccaaaaccagaaacttcaggttttagctgacatgaacgagtatctgcatcctgcaactccgcgctggtacgctaatagaggaatcccgcttcgtagaggttatctatttcacgggcctccaggcacgggcaaaacgtctctttcattcgcactagcaggtgtctttggtctcgacatccatgtcatctcactcctggagccaaatcttaccgaagaggatctaggtagtctcttcaactcactacctaggcgttgtatagtcctacttgaagacatcgacactgccggtcttcgacgccctgcagaagaaatagagaaagctgagaccaaggatgccgccaaacctgagtctgcaaatgaagagagatcggacgatatcaaggcgcttgccaaggcgatcaagcgcgaccacgacgacgcaaagaagggaatctcactatccggtctgctaaatgccatcgacggtgtggcaagccacgagggtcgcgtcctaattatgactaccaacgttcctgagtctttggacgatgctctcatccgccccggtcgtgtagacttacaagtagagttcacgaacgccacacaagaacaagccaaggaactcttcattcggatgtacgaaggggaccaaggacgtcctcaacaccaaaagtccaaagccaacgcagacctcaaggccacaaatggatcaatatcggtcaaatcttccgaaacaaacggccataccttttcacccgagacatccagtgcgctcaagtctggcgaattagatatctctatcgacgagctccctgaaatcgcaaaggagttcagtcaaaagatccccgagggtgctttctcgccagctgagatccagggatatctcctgaagcggaagaagcacccccgtcgtgcgttggcagagactgataagtgggttgcggcgcttgtccagcaaaaggcttctaagacgaagattctgcaggtacagtag

SEQ ID NO: 24030 - protein, 601 aa, Muscodor strobelii
  misc_feature: SGI Peptide ID NO. 568187
  misc_feature (311)..(515): Pfam Id: PF00004 Pfam Desc: ATPase family associated with various cellular activities (AAA)
  misc_feature (66)..(275): Pfam Id: PF08740 Pfam Desc: BCS1 N terminal
  misc_feature (424)..(480): Pfam Id: PF00004 Pfam Desc: ATPase family associated with various cellular activities (AAA)
  misc_feature (311)..(377): Pfam Id: PF00004 Pfam Desc: ATPase family associated with various cellular activities (AAA)
  misc_feature (1)..(601): NCBI GI: 171694079 Blast Desc: protein product [Podospora anserina] gi|170946988|emb|CAP73792.1| protein product [Podospora anserina]
  misc_feature (1)..(601): NCBI GI: 261355512 Blast Desc: mitochondrial chaperone BCS1 [Verticillium albo-atrum VaMs.102]
  misc_feature (46)..(601): NCBI GI: 145607141 Blast Desc: MGG_04018 [Magnaporthe grisea 70-15] gi|145014740|gb|EDJ99308.1| MGG_04018 [Magnaporthe grisea 70-15]
  misc_feature (22)..(485): NCBI GI: 116198167 Blast Desc: CHGG_07239 [Chaetomium globosum CBS 148.51] gi|88178518|gb|EAQ85986.1| CHGG_07239 [Chaetomium globosum CBS 148.51]
  misc_feature (11)..(588): NCBI GI: 238839404 Blast Desc: mitochondrial chaperone BCS1 [Microsporum canis CBS 113480]
  misc_feature (143)..(595): NCBI GI: 145605060 Blast Desc: MGG_02058 [Magnaporthe grisea 70-15] gi|145012932|gb|EDJ97573.1| MGG_02058 [Magnaporthe grisea 70-15]
  misc_feature (1)..(490): NCBI GI: 156050557 Blast Desc: SS1G_07866 [Sclerotinia sclerotiorum 1980] gi|154692266|gb|EDN92004.1| SS1G_07866 [Sclerotinia sclerotiorum 1980]
  misc_feature (1)..(490): NCBI GI: 154308749 Blast Desc: BC1G_07797 [Botryotinia fuckeliana B05.10] gi|150852748|gb|EDN27940.1| BC1G_07797 [Botryotinia fuckeliana B05.10]
  misc_feature (9)..(379): NCBI GI: 256731533 Blast Desc: [Nectria haematococca mpVI 77-13-4]
  misc_feature (16)..(587): NCBI GI: 115401702 Blast Desc: conserved [Aspergillus terreus NIH2624] gi|114190380|gb|EAU32080.1| conserved [Aspergillus terreus NIH2624]
MDMNALLRGFVPTAEAANVTSSATEATETNAMHPNIIESILPLLGLRGFAPIYRVVGSSLGWDPTILLTALGVLWAFNRIFRQVYSLVYKLITDHLMSTIHISSTDDIYLHLMKWLAVQPRMTDSRSLMAETVSKTAWEDEDESKIARDRSGLYLNFSNQEARAPPQFVPAVGLHSFWFKGQYFRLNRKKESVLDDGSSHGILGFKDKEDLMISCLWRSPEPIKQLLAHCKEFYHSDHQARTIVKRPNPQMVRRYAGRHSWQQVANRPVRDMRTVVLDQNQKLQVLADMNEYLHPATPRWYANRGIPLRRGYLFHGPPGTGKTSLSFALAGVFGLDIHVISLLEPNLTEEDLGSLFNSLPRRCIVLLEDIDTAGLRRPAEEIEKAETKDAAKPESANEERSDDIKALAKAIKRDHDDAKKGISLSGLLNAIDGVASHEGRVLIMTTNVPESLDDALIRPGRVDLQVEFTNATQEQAKELFIRMYEGDQGRPQHQKSKANADLKATNGSISVKSSETNGHTFSPETSSALKSGELDISIDELPEIAKEFSQKIPEGAFSPAEIQGYLLKRKKHPRRALAETDKWVAALVQQKASKTKILQVQ

SEQ ID NO: 24031 - DNA, 2701 bp, Muscodor strobelii
  misc_feature: SGI EST ID NO. CUFF.56544.0
  misc_feature: Variant of the nucleotide sequence at SEQ ID NO 24029
gtcagaggcaacaaaggactgccgcgtcagttcagatcttcagattaccaggctgccacgctccgatacgagtctgacccacgatgcaacattcaatgttcgccactcgttagctgtaccgtgcatggtacacattgcctcgtcatacctgcatacttttcttctacaaatgtatataataacaaagaacgacgaatattttcaaggcagtgcatcacaaatcttacgtttgtacttggggcgaaccccccaatagccaggacttcttcgtagtaccgtaaggcgcaccagatccgcgtccagcttccttgttgaacagagcctcaagccgatgctatacctataaatcgggcagctcctattccagttttctaactcgttcaccacaaagtgaggggatctcttgttgaatagtccgcccaagtaatagctctggtcttcaaactcgcactgcagctgctgagttgaaaccagttgcatcatatttttaaacggctgcggcaaacaaaacatccatttttaagaaaaatggatatgaacgctcttctccggggcttcgtccctacagcggaagctgcaaacgttacaagttcggccacagaagcgacagagacaaatgctatgcaccccaatataatcgagagcatcttaccgctactcggcctgcgggggttcgccccaatatacagagttgtcggctcttcattaggctgggatccaacaatcttactaacggcactgggagttctctgggccttcaacagaattttcagacaggtctacagcttagtctacaaactcatcactgatcatttgatgagcacaatccacatcagcagtacggacgatatttaccttcatctgatgaaatggctggccgtacagcccagaatgacggactcgcggtctctcatggccgagacggtgagcaagacggcttgggaagacgaagatgagtcgaagattgctcgcgatcgttcgggtctgtatctcaatttctcgaatcaggaggcgagagcgcccccgcaatttgtaccggccgtagggttgcacagcttctggttcaaaggccaatacttcagattgaaccgtaagaaggagtcggttcttgatgatggatccagtcacggaattcttggatttaaagacaaggaggacctgatgatatcttgcctgtggagaagtccagaacctatcaaacaactgctagcacattgcaaggagttttatcacagcgatcaccaggcccgcaccatcgtcaagcgacctaacccacagatggtgcggcgatatgccggccgacacagttggcagcaagtcgcaaaccgacctgtgcgagacatgcgaactgttgtccttgaccaaaaccagaaacttcaggttttagctgacatgaacgagtatctgcatcctgcaactccgcgctggtacgctaatagaggaatcccgcttcgtagaggttatctatttcacgggcctccaggcacgggcaaaacgtctctttcattcgcactagcaggtgtctttggtctcgacatccatgtcatctcactcctggagccaaatcttaccgaagaggatctaggtagtctcttcaactcactacctaggcgttgtatagtcctacttgaagacatcgacactgccggtcttcgacgccctgcagaagaaatagagaaagctgagaccaaggatgccgccaaacctgagtctgcaaatgaagagagatcggacgatatcaaggcgcttgccaaggcgatcaagcgcgaccacgacgacgcaaagaagggaatctcactatccggtctgctaaatgccatcgacggtgtggcaagccacgagggtcgcgtcctaattatgactaccaacgttcctgagtctttggacgatgctctcatccgccccggtcgtgtagacttacaagtagagttcacgaacgccacacaagaacaagccaaggaactcttcattcggatgtacgaaggggaccaaggacgtcctcaacaccaaaagtccaaagccaacgcagacctcaaggccacaaatggatcaatatcggtcaaatcttccgaaacaaacggccataccttttcacccgagacatccagtgcgctcaagtctggcgaattagatatctctatcgacgagctccctgaaatcgcaaaggagttcagtcaaaagatccccgagggtgctttctcgccagctgagatccagggatatctcctgaagcggaagaagcacccccgtcgtgcgttggcagagactgataagtgggttgcggcgcttgtccagcaaaaggcttctaagacgaagattctgcaggtacagtagcaaggatatgacttacgggggatgaagacagtagttcaagcctacattaagaaacaacacgttaggaccgcatgttgggatgagatatacacgttgattgagacatcagaatgaaaatgcatagctgaatggcgcaggaagagtacccggcaatatctcgttgtttttctttactacatatgtgttgctttcataggaaatgactagatggcaatcagacaagcactctgtcttgaatttgcttacttgtacatgacatgatcgagcaacgttcatttcatttaacatatcaaggtatctacttcatgcatatactagtaggaaaaactcctcaagtcctgttccagacgtagctacgcacttaatc

SEQ ID NO: 24032 - DNA, 393 bp, Muscodor strobelii
  misc_feature: SGI cDNA ID NO. 568188
  misc_feature: Reduced expression when VOC is produced
  misc_feature: Encodes the peptide sequence at SEQ ID NO 24033
atgaatacggtgaggtcattctggctcggctggggctccctgtgcgtcgccggcggaggcgcctactacttcgccaagaagcaaatcaacgccgaccgcacccagcgacaagaagagatgatgcgcaagaagcgcgccatgacctctctcgagtacagcgacaacgttccctcccagcccggctcgtcctcagccatgggcgggtcgacatccccagcaacgaatggaacgcccgctcgagacgatacggctgggtcgccgagccaggaagcgagtagtgacccggcgccgacgagacatgcgcctgcgaccgagggccagagggtgatagagaagagtaaatatgagagtagtacgccttttaagagtccgaaaggagatcggttttcatga

SEQ ID NO: 24033 - protein, 130 aa, Muscodor strobelii
  misc_feature: SGI Peptide ID NO. 568188
  misc_feature (1)..(130): NCBI GI: 256731132 Blast Desc: NECHADRAFT_102844 [Nectria haematococca mpVI 77-13-4]
  misc_feature (1)..(130): NCBI GI: 145607145 Blast Desc: MGG_04022 [Magnaporthe grisea 70-15] gi|145014744|gb|EDJ99312.1| MGG_04022 [Magnaporthe grisea 70-15]
  misc_feature (10)..(130): NCBI GI: 171694153 Blast Desc: protein product [Podospora anserina] gi|170947025|emb|CAP73829.1| protein product [Podospora anserina]
  misc_feature (14)..(130): NCBI GI: 261355506 Blast Desc: conserved [Verticillium albo-atrum VaMs.102]
  misc_feature (1)..(130): NCBI GI: 154318999 Blast Desc: BC1G_02451 [Botryotinia fuckeliana B05.10] gi|150856882|gb|EDN32074.1| BC1G_02451 [Botryotinia fuckeliana B05.10]
  misc_feature (1)..(130): NCBI GI: 156063004 Blast Desc: SS1G_01618 [Sclerotinia sclerotiorum 1980] gi|154696954|gb|EDN96692.1| SS1G_01618 [Sclerotinia sclerotiorum 1980]
  misc_feature (1)..(130): NCBI GI: 46123029 Blast Desc: FG05892.1 [Gibberella zeae PH-1]
  misc_feature (1)..(129): NCBI GI: 145242600 Blast Desc: An09g05630 [Aspergillus niger] gi|134078425|emb|CAL00840.1| protein product [Aspergillus niger]
  misc_feature (1)..(130): NCBI GI: 242792357 Blast Desc: conserved [Talaromyces stipitatus ATCC 10500] gi|218718524|gb|EED17944.1| conserved [Talaromyces stipitatus ATCC 10500]
  misc_feature (1)..(130): NCBI GI: 238503145 Blast Desc: conserved [Aspergillus flavus NRRL3357] gi|220691616|gb|EED47964.1| conserved [Aspergillus flavus NRRL3357]
  misc_feature: Useful for introducing or modulating the production of volatile compounds
MNTVRSFWLGWGSLCVAGGGAYYFAKKQINADRTQRQEEMMRKKRAMTSLEYSDNVPSQPGSSSAMGGSTSPATNGTPARDDTAGSPSQEASSDPAPTRHAPATEGQRVIEKSKYESSTPFKSPKGDRFS

SEQ ID NO: 24034 - DNA, 971 bp, Muscodor strobelii
  misc_feature: SGI EST ID NO. CUFF.56602.2
  misc_feature: Variant of the nucleotide sequence at SEQ ID NO 24032
caggggtccgtcctagcgtagccgatggccctggactctggagctgtatcgtacgatgctaaagtcaacgcagcgacttttttttctacatgcggtatcgtcgacgtcaactgtctgtctgtcacaaacacaaccagcatcacggtatcataatctgcaagcgattgaccagctcacgagaaccattgtcacttccaacatcactccgaacttaatcacacaccggtcgcaaagatgaatacggtgaggtcattctggctcggctggggctccctgtgcgtcgccggcggaggcgcctactacttcgccaagaagcaaatcaacgccgaccgcacccagcgacaagaagagatgatgcgcaagaagcgcgccatgacctctctcgagtacagcgacaacgttccctcccagcccggctcgtcctcagccatgggcgggtcgacatccccagcaacgaatggaacgcccgctcgagacgatacggctgggtcgccgagccaggaagcgagtagtgacccggcgccgacgagacatgcgcctgcgaccgagggccagagggtgatagagaagagtaaatatgagagtagtacgccttttaagagtccgaaaggagatcggttttcatgagttcacattgttgggataccgataacgacaatcatggcagtggcaagagattgcgaatcacgtcaacaacgaacagtgtattgaatagggatatgactcgacgtcacgagaactgtatataataggtaatgggcggcataatgagaaacaacaattcggctcttcatcgattgctgaaaatgtgggatatttcattgtgggctcatcagtcgatgtggcttgtgacgaacaacgcactattgcacgggcgacgtttgcgtgaggacatctggcagtgatgcaaaatagacacttacaatttcttaagaacaattctcccttccacgtatctatactaatctcag

SEQ ID NO: 24035 - DNA, 3585 bp, Muscodor strobelii
  misc_feature: SGI cDNA ID NO. 568189
  misc_feature: Reduced expression when VOC is produced
  misc_feature: Encodes the peptide sequence at SEQ ID NO 24036
atggattcgaccgctaaggacggccgccctgatgcgtcttccctcaagccggtgtcttcgctgcgcatgcagttcgagagcatgaacaaggtcaaggaggaagcctcgtctacgccaacgccaacgccgacgccgactatctccagacagcgaacaccctcgccaaagccccctgctgtgcccgacacgaggcctgctcggccgaagagcatactgcttcaagacgagatcaaggccaaaccacccgtgccagcccctcgcgaccctgggactctgcgtccgcctctcgctgccaaaccgccgcccctgagtcccaagcccatcagcgtcaagccaccctccgttctcgtcgagcctcctacatctcctccgaaagacagggtcatccccccactggccgtagacacaccctctcttctgaatccggatcccatcaagtcgccttcgacccccgctacgccgtcttctcgtccctttaagatcccaagtcgcccaactactccgagtctccaacctcgtaaatcctccccacgtctcactccctctcagcctccatcaccaccgccgccccggagatctgtcgagctccgcctcgagcgagaggcgaaagcaaggtccacgccgccgcctgccccacccctcgtgaaccgcaccgagaagccagctgctcgactgtcgaccatagcggacaatgcgcctcggctcgaaccgagaccaattccatcgcacactgctgagaagtcgccgtttaacagcccaccgactcttgccagctctcctcctgaagaccaagagtcaccacccatactgcccactcggccagcccgtcctatatcgcacaatcccgtatcctcgcgctccgcaataccaccacaattcgagcctcctccgcttcaccacgccatagcaagtgtaaagagaaaccaggagacgaatggagtctcaaagccagcattggcgcctgccataccgaacggccgtcctcctctgccaactcggccaacggtgacccatgaagcgacccccaagattccagcgacttctaccatgatgccgccaccgcgtcgggccccgtctgccagccatatgactgtagatacttcagtaaacactatacagccgaagcgaatctcgtctacaccaacaacacagttcggacctccacccactagagccgtccaccccagatccatgaccgtagaccgcacctctgatagaactccggtcgagtttcgagaaccgcctcagcgatttcctcccatgccagagaagactccgatgcctactgacccgtcgacaacgagtagtgcaggtgctgctggggcgacgacagtatttcctgatgcgaccaaagtaaatcgtcgacctccgttcgtgaaacttggcgtgcaagaaatttccatgaagtatgacacgagaagtttcgacgtatgcgggcaatatcttgtgaccggcggtcatctagctcgagtctggagcctccacgacggcgagctcctcatgagtctatcgctgggcgaaggcatcaaggtctcaagcgtagccttcaaaccagggtccaacgtgaatgacgaaggttcgagaatatggatcggaaataatatgggcgaggttatggaggccgacgttgccacgcagtctatcatcggcaacaaaacgaacctccatggtcggaatgaggttatcaagatcttcagatatttcacggaactatggactctggatgatgtcgggacactacatgtctggggcccagacaatgacggtctcccttctttgaaaggcaaccctcatcaaacatatagactgccacgtgggcataccttttccatgattgtcggggaattgttatggtatgctacaggcaaagaaatgcgcatctttgcgccaacggtggacggcagcactcaaccacaagttcttatgcggcccctgataacagacggtgctggtgatattacatccggaactatgctcaagtcacagcctgacaaggtcttcttcggtcataccgatggcaaagtcagtgtctactcccaaaacgactatgcttgccttgaggtgataagtgttagcacctacaagatcaactctcttgccggggtagggaagttgatgtgggttgcatacaacactggcagggtctccatttacgatacgacacaatcgccatgggccatgaaaaaagactggcaggcgcattacgatggtcctgcgctgaagctcatgcttgatcgtgctagtttctacaagcttggccgtccgcaactgttgtctctgggcgcagataacaaggtccggatatgggacagccttcttgaagatgattttctagagaatgaaatgaagtcgctggactccaaatactgcgaattccaggatatcaagcttttggccatgacttggaatgctggggcgtccactccaaatagtctcaggtactcccaagacgatgctgttttcattcagaatttgttgaaggcgaacagtgcaccggatgtcctcgtttttggattccaagagctggtggacttggaagataaaacagcgacggccaagcgactattcaaatcaaagaagaaagatgctccagatcaggaacgcatgagccaccaataccgagactggagagacttcttagtccgaaccctcgacgacaacatgcccgatcatctatatcacctgcttcagactgcaactttggtcggcttattcacctgcatcttcgtgaaatccacgctcagagaccgagttcgcaacctgagtactgccgatgtcaagcgcggaatgggtggtttgcatggcaacaagggtgctattatcgtacgcttcatgattgatgacacatcgctctgtttcgtcaattgccatctagcagcgggtcaatctcaagcgaattctcgccataacgatatcgccgccatcatggatgccgacattctacctgccgagcgcgacccgatcgtccgcgtcgatagcttcattggtggcggcgatgggtctatggttatggatcacgaactctgtctcttgaatggtgatctgaactaccgtattgatactatgtcgcgtgacacagtggtcatagccgtcaagcagaacaatcttcaaaagctgctggagcgcgaccaacttcttgttgctcgacgccggaacccagccttcaagcttcgagctttcgaggaaatgcccatacagtttgctccaacctacaagtatgacgtgggcacagatgactacgacactagcgagaagaggcgctctccagcatggtgcgaccgtctccttcaccgagggtctggcaggatagtacaacttgattaccggcggcacgaggtcagagtgtctgatcatcggcctgtgaccggccggttcaagtttactatcaaaaccatctcgcctaagaagcgcaccttggcgtgggcggactgccaacagcgcttcgaagacctgaaggtaaaggaggcagacgaagagaaactttcgtatctcatgaacgtcatcggatatgaccttacgatcagcaagggattgatacgtgacaaggcagctcgcaggggcgatcacagtccagcgcgcggctaa

SEQ ID NO: 24036 - protein, 1194 aa, Muscodor strobelii
  misc_feature: SGI Peptide ID NO. 568189
  misc_feature (797)..(1125): Pfam Id: PF03372 Pfam Desc: Endonuclease/Exonuclease/phosphatase family
  misc_feature (444)..(1182): NCBI GI: 255955487 Blast Desc: Pc21g14830 [Penicillium chrysogenum Wisconsin 54-1255] gi|211590207|emb|CAP96380.1| Pc21g14830 [Penicillium chrysogenum Wisconsin 54-1255]
  misc_feature (5)..(1160): NCBI GI: 169776029 Blast Desc: [Aspergillus oryzae RIB40] gi|83771216|dbj|BAE61348.1| protein product [Aspergillus oryzae]
  misc_feature (446)..(1179): NCBI GI: 119182838 Blast Desc: CIMG_06419 [Coccidioides immitis RS]
  misc_feature (446)..(1179): NCBI GI: 240109413 Blast Desc: Endonuclease/Exonuclease/phosphatase family protein [Coccidioides posadasii C735 delta SOWgp]
  misc_feature (347)..(1179): NCBI GI: 225679482 Blast Desc: skeletal muscle and kidney enriched inositol phosphatase [Paracoccidioides brasiliensis Pb03]
  misc_feature (332)..(1163): NCBI GI: 154285006 Blast Desc: conserved [Ajellomyces capsulatus NAm1] gi|150406939|gb|EDN02480.1| conserved [Ajellomyces capsulatus NAm1]
  misc_feature (603)..(1160): NCBI GI: 169615931 Blast Desc: SNOG_11132 [Phaeosphaeria nodorum SN15] gi|160703074|gb|EAT81631.2| SNOG_11132 [Phaeosphaeria nodorum SN15]
  misc_feature (3)..(1194): NCBI GI: 145607147 Blast Desc: MGG_12131 [Magnaporthe grisea 70-15] gi|145014745|gb|EDJ99313.1| MGG_12131 [Magnaporthe grisea 70-15]
  misc_feature (1)..(1193): NCBI GI: 116198177 Blast Desc: CHGG_07244 [Chaetomium globosum CBS 148.51] gi|88178523|gb|EAQ85991.1| CHGG_07244 [Chaetomium globosum CBS 148.51]
  misc_feature (1)..(1193): NCBI GI: 256731535 Blast Desc: [Nectria haematococca mpVI 77-13-4]
  misc_feature: Useful for introducing or modulating the production of volatile compounds
MDSTAKDGRPDASSLKPVSSLRMQFESMNKVKEEASSTPTPTPTPTISRQRTPSPKPPAVPDTRPARPKSILLQDEIKAKPPVPAPRDPGTLRPPLAAKPPPLSPKPISVKPPSVLVEPPTSPPKDRVIPPLAVDTPSLLNPDPIKSPSTPATPSSRPFKIPSRPTTPSLQPRKSSPRLTPSQPPSPPPPRRSVELRLEREAKARSTPPPAPPLVNRTEKPAARLSTIADNAPRLEPRPIPSHTAEKSPFNSPPTLASSPPEDQESPPILPTRPARPISHNPVSSRSAIPPQFEPPPLHHAIASVKRNQETNGVSKPALAPAIPNGRPPLPTRPTVTHEATPKIPATSTMMPPPRRAPSASHMTVDTSVNTIQPKRISSTPTTQFGPPPTRAVHPRSMTVDRTSDRTPVEFREPPQRFPPMPEKTPMPTDPSTTSSAGAAGATTVFPDATKVNRRPPFVKLGVQEISMKYDTRSFDVCGQYLVTGGHLARVWSLHDGELLMSLSLGEGIKVSSVAFKPGSNVNDEGSRIWIGNNMGEVMEADVATQSIIGNKTNLHGRNEVIKIFRYFTELWTLDDVGTLHVWGPDNDGLPSLKGNPHQTYRLPRGHTFSMIVGELLWYATGKEMRIFAPTVDGSTQPQVLMRPLITDGAGDITSGTMLKSQPDKVFFGHTDGKVSVYSQNDYACLEVISVSTYKINSLAGVGKLMWVAYNTGRVSIYDTTQSPWAMKKDWQAHYDGPALKLMLDRASFYKLGRPQLLSLGADNKVRIWDSLLEDDFLENEMKSLDSKYCEFQDIKLLAMTWNAGASTPNSLRYSQDDAVFIQNLLKANSAPDVLVFGFQELVDLEDKTATAKRLFKSKKKDAPDQERMSHQYRDWRDFLVRTLDDNMPDHLYHLLQTATLVGLFTCIFVKSTLRDRVRNLSTADVKRGMGGLHGNKGAIIVRFMIDDTSLCFVNCHLAAGQSQANSRHNDIAAIMDADILPAERDPIVRVDSFIGGGDGSMVMDHELCLLNGDLNYRIDTMSRDTVVIAVKQNNLQKLLERDQLLVARRRNPAFKLRAFEEMPIQFAPTYKYDVGTDDYDTSEKRRSPAWCDRLLHRGSGRIVQLDYRRHEVRVSDHRPVTGRFKFTIKTISPKKRTLAWADCQQRFEDLKVKEADEEKLSYLMNVIGYDLTISKGLIRDKAARRGDHSPARG

SEQ ID NO: 24037 - DNA, 4605 bp, Muscodor strobelii
  misc_feature: SGI EST ID NO. CUFF.56627.0
  misc_feature: Variant of the nucleotide sequence at SEQ ID NO 24035
caagaattcataatagaccatccccatcatcaaccgcacatggcgtatcatacctacttgactcgactgcggtattgccataacgaaatacctagcggtacatgacagctggacgaccccatctccaaacccattgagatcggcttcgggtccagccagaatcgaggagcctgtaaccacatatggcttttcgacattcgcgtacctgagattcctgtctccctagtgacaggcacatcttcgtcactcgttgtcataccggctactcacagcacacaccagagccaaaacaaagaaacgccacgagctaccgatgcgaatgctaccccgacgattgtccggttcctaagtatttcgtcatagtaccgatacagaccacaggcctgcggccctcctccacctccaccaccaccccaccaatcccactgcactcccttcatcctggacctgcagccttgccctggacggctgagagaagtggttgaagctatcactgcagcattgatattgttggcattgtagagctatatcgcttctaggcttgtatgctttgcaggacccggacagtggtagctagaggggatgatatgctctggccccgtgtaaagcagcatcatggattcgaccgctaaggacggccgccctgatgcgtcttccctcaagccggtgtcttcgctgcgcatgcagttcgagagcatgaacaaggtcaaggaggaagcctcgtctacgccaacgccaacgccgacgccgactatctccagacagcgaacaccctcgccaaagccccctgctgtgcccgacacgaggcctgctcggccgaagagcatactgcttcaagacgagatcaaggccaaaccacccgtgccagcccctcgcgaccctgggactctgcgtccgcctctcgctgccaaaccgccgcccctgagtcccaagcccatcagcgtcaagccaccctccgttctcgtcgagcctcctacatctcctccgaaagacagggtcatccccccactggccgtagacacaccctctcttctgaatccggatcccatcaagtcgccttcgacccccgctacgccgtcttctcgtccctttaagatcccaagtcgcccaactactccgagtctccaacctcgtaaatcctccccacgtctcactccctctcagcctccatcaccaccgccgccccggagatctgtcgagctccgcctcgagcgagaggcgaaagcaaggtccacgccgccgcctgccccacccctcgtgaaccgcaccgagaagccagctgctcgactgtcgaccatagcggacaatgcgcctcggctcgaaccgagaccaattccatcgcacactgctgagaagtcgccgtttaacagcccaccgactcttgccagctctcctcctgaagaccaagagtcaccacccatactgcccactcggccagcccgtcctatatcgcacaatcccgtatcctcgcgctccgcaataccaccacaattcgagcctcctccgcttcaccacgccatagcaagtgtaaagagaaaccaggagacgaatggagtctcaaagccagcattggcgcctgccataccgaacggccgtcctcctctgccaactcggccaacggtgacccatgaagcgacccccaagattccagcgacttctaccatgatgccgccaccgcgtcgggccccgtctgccagccatatgactgtagatacttcagtaaacactatacagccgaagcgaatctcgtctacaccaacaacacagttcggacctccacccactagagccgtccaccccagatccatgaccgtagaccgcacctctgatagaactccggtcgagtttcgagaaccgcctcagcgatttcctcccatgccagagaagactccgatgcctactgacccgtcgacaacgagtagtgcaggtgctgctggggcgacgacagtatttcctgatgcgaccaaagtaaatcgtcgacctccgttcgtgaaacttggcgtgcaagaaatttccatgaagtatgacacgagaagtttcgacgtatgcgggcaatatcttgtgaccggcggtcatctagctcgagtctggagcctccacgacggcgagctcctcatgagtctatcgctgggcgaaggcatcaaggtctcaagcgtagccttcaaaccagggtccaacgtgaatgacgaaggttcgagaatatggatcggaaataatatgggcgaggttatggaggccgacgttgccacgcagtctatcatcggcaacaaaacgaacctccatggtcggaatgaggttatcaagatcttcagatatttcacggaactatggactctggatgatgtcgggacactacatgtctggggcccagacaatgacggtctcccttctttgaaaggcaaccctcatcaaacatatagactgccacgtgggcataccttttccatgattgtcggggaattgttatggtatgctacaggcaaagaaatgcgcatctttgcgccaacggtggacggcagcactcaaccacaagttcttatgcggcccctgataacagacggtgctggtgatattacatccggaactatgctcaagtcacagcctgacaaggtcttcttcggtcataccgatggcaaagtcagtgtctactcccaaaacgactatgcttgccttgaggtgataagtgttagcacctacaagatcaactctcttgccggggtagggaagttgatgtgggttgcatacaacactggcagggtctccatttacgatacgacacaatcgccatgggccatgaaaaaagactggcaggcgcattacgatggtcctgcgctgaagctcatgcttgatcgtgctagtttctacaagcttggccgtccgcaactgttgtctctgggcgcagataacaaggtccggatatgggacagccttcttgaagatgattttctagagaatgaaatgaagtcgctggactccaaatactgcgaattccaggatatcaagcttttggccatgacttggaatgctggggcgtccactccaaatagtctcaggtactcccaagacgatgctgttttcattcagaatttgttgaaggcgaacagtgcaccggatgtcctcgtttttggattccaagagctggtggacttggaagataaaacagcgacggccaagcgactattcaaatcaaagaagaaagatgctccagatcaggaacgcatgagccaccaataccgagactggagagacttcttagtccgaaccctcgacgacaacatgcccgatcatctatatcacctgcttcagactgcaactttggtcggcttattcacctgcatcttcgtgaaatccacgctcagagaccgagttcgcaacctgagtactgccgatgtcaagcgcggaatgggtggtttgcatggcaacaagggtgctattatcgtacgcttcatgattgatgacacatcgctctgtttcgtcaattgccatctagcagcgggtcaatctcaagcgaattctcgccataacgatatcgccgccatcatggatgccgacattctacctgccgagcgcgacccgatcgtccgcgtcgatagcttcattggtggcggcgatgggtctatggttatggatcacgaactctgtctcttgaatggtgatctgaactaccgtattgatactatgtcgcgtgacacagtggtcatagccgtcaagcagaacaatcttcaaaagctgctggagcgcgaccaacttcttgttgctcgacgccggaacccagccttcaagcttcgagctttcgaggaaatgcccatacagtttgctccaacctacaagtatgacgtgggcacagatgactacgacactagcgagaagaggcgctctccagcatggtgcgaccgtctccttcaccgagggtctggcaggatagtacaacttgattaccggcggcacgaggtcagagtgtctgatcatcggcctgtgaccggccggttcaagtttactatcaaaaccatctcgcctaagaagcgcaccttggcgtgggcggactgccaacagcgcttcgaagacctgaaggtaaaggaggcagacgaagagaagtgagttatagggatcgtatcctaatcttcttcgctaacaattttagactttcgtatctcatgaacgtcatcggatatgaccttacgatcagcaagggattgatacgtgacaaggcagctcgcaggggcgatcacagtccagcgcgcggctaagaaatgatgtccttctacttctctcaactttgtgtcacgaattcaagaaaatacaggtttggttcaggattgatgcattcataggaacacaggaaaatagactaataggcgttgtgtttgcgaaatggctgctagcaaccgatgttgaggtctgcgcgaccagaaacgaagtctttgacacgatgcatatcttgcattctatccctccccggcagcctatacgcgacgacactgatgagaacattgaatgactctgttggcggtaatcactataatcagtattttcacagcgatagaggagaaaaatattatagctgatagatgttcgctcaaagagataaagctccggtcatcggac

SEQ ID NO: 24038 - DNA, 1626 bp, Muscodor strobelii
  misc_feature: SGI cDNA ID NO. 568190
  misc_feature: Reduced expression when VOC is produced
  misc_feature: Encodes the peptide sequence at SEQ ID NO 24039
atgggagcgtttccgatagatggcccggccatcacgtaccccgagtcaagggttttgttgatcatcacggggggcacgatttgcatgaagccttctgctagtgggcttgtgcctgttgatgggtttcttagggaggctatggcgcctaggccgagctttaatgatctctctggtgaagtaaccctcgaagcaatagacaacggccaacccataaccctccccagtcttcgcacaccaccaagctcctactcacgccacatccgctacgcagccctagaattctcacccctcctagattcatcctcaatcagcagcgaaggctggacatccatcgcgacatcaatccgttcaaactaccacctcttcgacggattcgtcgtgctgcacgggacagactccctcgcctactccgcatccgcactatccttcatgctgcgggacctaggcaaacccgtgatcctcaccggatcccaagcctccatcttcgcgctgcaatccgacgcagtggataacttgctcggctccttgatcatagcggggaccttcacaatcccagaagtttgtctgtttttccaccataaactgtaccgcgggaaccgctgcacgaaagtttccgcttccgcattcgaggctttcgcgagccctaactgcgatcccctggcacgcgtcacgagtctaggcgttgacgtaaactggggactcgtcctccgtccgacgaaaatcgcccggttcgaagtcacgccccatctcgacacggcgcatgtagcagctgtccgcatattccccggtatcaaaccggaaatggtcgattccgttctccgcgtgccgcagctgcgcggtctcatcctagagacgttcggcatgggcaatgcgccagcgggcgtcgacgggagtctgacgcgcgttattagatccgcggtggagcgcggtatagtgatcgtcaacgtatcgcaatgcacaagtggattcgtgtctccgctgtacgcccccggtttcgcgctgggagaggcgggagtcgtgtttggtcatgacttgactagtgaggctgcccttacgaaattgagttatttacttgcgctgccggatttgaccgcgaaggaggttggggtgagaatggcgcagagtattagaggtgagatgacggtgctcagtcatccttcttttacgcatcctcagggttcgctggatgatgatgatgagaatcctacctccgggacgaaaagccctcgtcctctatcgagaggtgagacggcgtttgcggggttggggtatgcgattcagtctggtgatttgagggctgtgaaggaactgcttgatcttgatattaccgatagtgtgggtagtgtgggtgggaagccctcggatttattgctcagagcggactatgcggggaatacggctgtccatcttgcggctgttggaccggatatgggggttctgagggagttgttggttaggggtgcgagtgtgcatgttaggaatagagcgaataatacgccgcttttcctcgcggagaagatggggaatagggattgtgttgagttgcttaggagtgctggtgctgtgctttggcccgaggaagggaggccgagtttagaaaagttcgacaatgggatggaagtttga

SEQ ID NO: 24039 - protein, 541 aa, Muscodor strobelii
  misc_feature: SGI Peptide ID NO. 568190
  misc_feature (17)..(369): Pfam Id: PF00710 Pfam Desc: Asparaginase
  misc_feature (463)..(495): Pfam Id: PF00023 Pfam Desc: Ankyrin repeat
  misc_feature (93)..(369): Pfam Id: PF00710 Pfam Desc: Asparaginase
  misc_feature (1)..(527): NCBI GI: 85101241 Blast Desc: NCU03768 [Neurospora crassa OR74A] gi|12718304|emb|CAC28655.1| related to Lysophospholipase [Neurospora crassa] gi|28922653|gb|EAA31878.1| NCU03768 crassa
  misc_feature (9)..(524): NCBI GI: 116198163 Blast Desc: conserved [Chaetomium globosum CBS 148.51] gi|88178516|gb|EAQ85984.1| conserved [Chaetomium globosum CBS 148.51]
  misc_feature (14)..(527): NCBI GI: 261351521 Blast Desc: lysophospholipase [Verticillium albo-atrum VaMs.102]
  misc_feature (9)..(526): NCBI GI: 171694077 Blast Desc: protein product [Podospora anserina] gi|170946987|emb|CAP73791.1| protein product [Podospora anserina]
  misc_feature (47)..(527): NCBI GI: 145607139 Blast Desc: MGG_04017 [Magnaporthe grisea 70-15] gi|145014739|gb|EDJ99307.1| MGG_04017 [Magnaporthe grisea 70-15]
  misc_feature (5)..(527): NCBI GI: 256731287 Blast Desc: [Nectria haematococca mpVI 77-13-4]
  misc_feature (9)..(527): NCBI GI: 46126065 Blast Desc: FG07410.1 [Gibberella zeae PH-1]
  misc_feature (12)..(525): NCBI GI: 156052583 Blast Desc: SS1G_06458 [Sclerotinia sclerotiorum 1980] gi|154704237|gb|EDO03976.1| SS1G_06458 [Sclerotinia sclerotiorum 1980]
  misc_feature (14)..(527): NCBI GI: 169776379 Blast Desc: [Aspergillus oryzae RIB40] gi|83771391|dbj|BAE61523.1| protein product [Aspergillus oryzae]
  misc_feature (14)..(527): NCBI GI: 225557025 Blast Desc: lysophospholipase [Ajellomyces capsulatus G186AR]
  misc_feature (12)..(527): SWISSPROT Homolog: EC 3.1.1.47 1-alkyl-2-acetylglycerophosphocholine esterase
  misc_feature (12)..(527): SWISSPROT Homolog: EC 3.5.1.1 Asparaginase
  misc_feature (12)..(527): SWISSPROT Homolog: EC 3.1.1.5 Lysophospholipase
  misc_feature: Useful for introducing or modulating the production of volatile compounds
MGAFPIDGPAITYPESRVLLIITGGTICMKPSASGLVPVDGFLREAMAPRPSFNDLSGEVTLEAIDNGQPITLPSLRTPPSSYSRHIRYAALEFSPLLDSSSISSEGWTSIATSIRSNYHLFDGFVVLHGTDSLAYSASALSFMLRDLGKPVILTGSQASIFALQSDAVDNLLGSLIIAGTFTIPEVCLFFHHKLYRGNRCTKVSASAFEAFASPNCDPLARVTSLGVDVNWGLVLRPTKIARFEVTPHLDTAHVAAVRIFPGIKPEMVDSVLRVPQLRGLILETFGMGNAPAGVDGSLTRVIRSAVERGIVIVNVSQCTSGFVSPLYAPGFALGEAGVVFGHDLTSEAALTKLSYLLALPDLTAKEVGVRMAQSIRGEMTVLSHPSFTHPQGSLDDDDENPTSGTKSPRPLSRGETAFAGLGYAIQSGDLRAVKELLDLDITDSVGSVGGKPSDLLLRADYAGNTAVHLAAVGPDMGVLRELLVRGASVHVRNRANNTPLFLAEKMGNRDCVELLRSAGAVLWPEEGRPSLEKFDNGMEV

SEQ ID NO: 24040 - DNA, 2461 bp, Muscodor strobelii
  misc_feature: SGI EST ID NO. CUFF.56550.0
  misc_feature: Variant of the nucleotide sequence at SEQ ID NO 24038
aaggacgcgaactttgtcggattcgatcgacttacaccgacaagactagtgggaagtataattcggtatctccgttcgagatttatcactcccttaatctcatggaaacttgagatgacaaccaatatctgagcctcactcacaaaacaatcaaatctctcggtaattgaatgattggcatgagaagctctttggcctgcaattcaaacacaagagtctgtgacggcaagtgaccacggggtgggttcaaaactctcgagacggacggattatccggcaagagccgcgatacgaggatcgcgacttggaaggttaatgcgacacttttattgcgtgattgcgaacggcttcgagtatcgagttgaggaagcaacttatctgcacgacagattttctagacgactcacgggacgaacgagagagtaatactcggagatcagagtactgaacactctcaatcaacctcagtctcatccaagcacacatcacaatcgacaccggcattcaaatccgaccaagttcgcctcgaggaagaagtgtaacaagtcagcagaatgggagcgtttccgatagatggcccggccatcacgtaccccgagtcaagggttttgttgatcatcacggggggcacgatttgcatgaagccttctgctagtgggcttgtgcctgttgatgggtttcttagggaggctatggcgcctaggccgagctttaatgatctctctggtgaagtaaccctcgaagcaatagacaacggccaacccataaccctccccagtcttcgcacaccaccaagctcctactcacgccacatccgctacgcagccctagaattctcacccctcctagattcatcctcaatcagcagcgaaggctggacatccatcgcgacatcaatccgttcaaactaccacctcttcgacggattcgtcgtgctgcacgggacagactccctcgcctactccgcatccgcactatccttcatgctgcgggacctaggcaaacccgtgatcctcaccggatcccaagcctccatcttcgcgctgcaatccgacgcagtggataacttgctcggctccttgatcatagcggggaccttcacaatcccagaagtttgtctgtttttccaccataaactgtaccgcgggaaccgctgcacgaaagtttccgcttccgcattcgaggctttcgcgagccctaactgcgatcccctggcacgcgtcacgagtctaggcgttgacgtaaactggggactcgtcctccgtccgacgaaaatcgcccggttcgaagtcacgccccatctcgacacggcgcatgtagcagctgtccgcatattccccggtatcaaaccggaaatggtcgattccgttctccgcgtgccgcagctgcgcggtctcatcctagagacgttcggcatgggcaatgcgccagcgggcgtcgacgggagtctgacgcgcgttattagatccgcggtggagcgcggtatagtgatcgtcaacgtatcgcaatgcacaagtggattcgtgtctccgctgtacgcccccggtttcgcgctgggagaggcgggagtcgtgtttggtcatgacttgactagtgaggctgcccttacgaaattgagttatttacttgcgctgccggatttgaccgcgaaggaggttggggtgagaatggcgcagagtattagaggtgagatgacggtgctcagtcatccttcttttacgcatcctcagggttcgctggatgatgatgatgagaatcctacctccgggacgaaaagccctcgtcctctatcgagaggtgagacggcgtttgcggggttggggtatgcgattcagtctggtgatttgagggctgtgaaggaactgcttgatcttgatattaccgatagtgtgggtagtgtgggtgggaagccctcggatttattgctcagagcggactatgcggggaatacggctgtccatcttgcggctgttggaccggatatgggggttctgagggagttgttggttaggggtgcgagtgtgcatgttaggaatagagcgaataatacgccgcttttcctcgcggagaagatggggaatagggattgtgttgagttgcttaggagtgctggtgctgtgctttggcccgaggaagggaggccgagtttagaaaagttcgacaatgggatggaagtttgaaatattcgcccggcgctataataagtcgagttggtattgtgaacgctggtagagacaggttctgctaaagttgatagattgactttggcggttggactttcctgcgcaggggctaaataggctgatggtcatggaaagaagggtgtaatggaaggagattaggatgagatatatggtgatgtaagaaggcgatgctcgttatgttgttcaagtttgccttgattagatattttagtctgaaagttcataggtactatcggagggaaacgtcagcatctggt

SEQ ID NO: 24041 - DNA, 534 bp, Muscodor strobelii
  misc_feature: SGI cDNA ID NO. 568191
  misc_feature: Encodes the peptide sequence at SEQ ID NO 24042
atgccttcactcgtcactcgcatttgtttggttatcggtgcagcttctgctgctagcactggtgctcatgcttatccgtcgcaactcacatacgagtgtgacaaagtcaacatcctcttcactggcttgcctccttaccacccgcttgtttctagccaaggtctcaatactacccagatagacatcgacctccaggactgccacgccgatctgctagcagaaggctacaacataagaagcgtcttcgtcggccccgaagacgggattgagattctcgaggagaagctacaaggagttagttgggatggcgtcatgattggctacggtgttcgtgggtcttctgatccgaatgtgactatatactttgaagatgcccttaacctcttccgggaaaccaaccctaactccgagttcgtgcttaattacgatgacttgagtagttcggatgccgtcgagaggaagtttccgatgggcgagaattgtgcgactcccggtaccaatcttggatattttgatatctgtactgcctgctag

SEQ ID NO: 24042 - protein, 177 aa, Muscodor strobelii
  misc_feature: SGI Peptide ID NO. 568191
  misc_feature (4)..(177): NCBI GI: 46109866 Blast Desc: FG01815.1 [Gibberella zeae PH-1]
  misc_feature (36)..(177): NCBI GI: 145613022 Blast Desc: [Magnaporthe grisea 70-15] gi|145020086|gb|EDK04314.1| [Magnaporthe grisea 70-15]
  misc_feature (23)..(165): NCBI GI: 171690162 Blast Desc: protein product [Podospora anserina] gi|170945029|emb|CAP71140.1| protein product [Podospora anserina]
  misc_feature (31)..(136): NCBI GI: 46126403 Blast Desc: FG07579.1 [Gibberella zeae PH-1]
MPSLVTRICLVIGAASAASTGAHAYPSQLTYECDKVNILFTGLPPYHPLVSSQGLNTTQIDIDLQDCHADLLAEGYNIRSVFVGPEDGIEILEEKLQGVSWDGVMIGYGVRGSSDPNVTIYFEDALNLFRETNPNSEFVLNYDDLSSSDAVERKFPMGENCATPGTNLGYFDICTAC

SEQ ID NO: 24043 - DNA, 936 bp, Muscodor strobelii
  misc_feature: SGI cDNA ID NO. 568192
  misc_feature: Encodes the peptide sequence at SEQ ID NO 24044
atgtctaacaccaaattccatcctgagacgtctattggcgatctctccggccgtgtctacttcgtcactggaggaactgctggtctcggcgcaggatcggttcgatatcttgcagcgaagaaccctgccaagatcttcttcagtgggcgtaacaaaacaaaggcagatgagctcatcgccgatatcaaagctgtatctcccaagaccgaattggtcttcatcaagtgcgacctctcaagcttgaagtcagtccagcaagccgctcggcaattcatctcccagtcagatcgcttggatgtcttgatgaacaacgccggtgtcatggctttggcacctggtctgagtgaagacggctacgaaatccagttcgctacgaatcatatgggtcacgcactactcattaaacttcttgctcctaccatgctcaagactgctgaacagcccaattcggatgttcgcattgtcaatctttcttcggttgcgtatggaaacgcaccagcatctggcatcgatatcgacaccctgaagacgactcaagccagtcttggccctttcttgacaccctcaaagtggacaagatatggccaatccaaacttgccaatattttatacaacaccgaacttgcgaagaagtacccaagcatcaaatgtgttgctgtgcatcccggttacattaagacggagctacacaatggcaacagcatggtagactgggctatcctggtcgcgatctcgaagaacaactggacacctgtagaggagggttcttataaccagacttgggcggcaacgacacctaaggagaaccttgagaatggcgggtactatgagccggttggtgtcaaggttgtgcctacgacttctcaggccaatgacaagactctttcaaggaagctcttcgagtggactgagaaggagttggcgaactggtcttaa

SEQ ID NO: 24044 - protein, 311 aa, Muscodor strobelii
  misc_feature: SGI Peptide ID NO. 568192
  misc_feature (18)..(184): Pfam Id: PF00106 Pfam Desc: short chain dehydrogenase
  misc_feature (18)..(161): Pfam Id: PF00106 Pfam Desc: short chain dehydrogenase
  misc_feature (1)..(311): NCBI GI: 189200044 Blast Desc: retinol dehydrogenase 14 [Pyrenophora tritici-repentis Pt-1C-BFP] gi|187983458|gb|EDU48946.1| retinol dehydrogenase 14 [Pyrenophora tritici-repentis Pt-1C-BFP]
  misc_feature (2)..(310): NCBI GI: 159128997 Blast Desc: oxidoreductase, short-chain dehydrogenase/reductase family [Aspergillus fumigatus A1163]
  misc_feature (14)..(310): NCBI GI: 70989477 Blast Desc: oxidoreductase, short-chain dehydrogenase/reductase family [Aspergillus fumigatus Af293] gi|66847219|gb|EAL87550.1| oxidoreductase, short-chain dehydrogenase/reductase family Af293]
  misc_feature (2)..(310): NCBI GI: 119480111 Blast Desc: oxidoreductase, short-chain dehydrogenase/reductase family [Neosartorya fischeri NRRL 181] gi|119408238|gb|EAW18187.1| oxidoreductase, short-chain family
  misc_feature (1)..(310): NCBI GI: 169784686 Blast Desc: [Aspergillus oryzae RIB40] gi|83775551|dbj|BAE65671.1| protein product [Aspergillus oryzae]
  misc_feature (1)..(310): NCBI GI: 238508114 Blast Desc: oxidoreductase, short-chain dehydrogenase/reductase family [Aspergillus flavus NRRL3357] gi|220688777|gb|EED45129.1| oxidoreductase, short-chain dehydrogenase/reductase family flavus
  misc_feature (1)..(310): NCBI GI: 115401672 Blast Desc: conserved [Aspergillus terreus NIH2624] gi|114190365|gb|EAU32065.1| conserved [Aspergillus terreus NIH2624]
  misc_feature (11)..(310): NCBI GI: 238839616 Blast Desc: oxidoreductase [Microsporum canis CBS 113480]
  misc_feature (1)..(309): NCBI GI: 154322292 Blast Desc: BC1G_01293 [Botryotinia fuckeliana B05.10] gi|150850540|gb|EDN25733.1| BC1G_01293 [Botryotinia fuckeliana B05.10]
  misc_feature (4)..(310): NCBI GI: 169614041 Blast Desc: SNOG_10155 [Phaeosphaeria nodorum SN15] gi|111061370|gb|EAT82490.1| SNOG_10155 [Phaeosphaeria nodorum SN15]
  misc_feature (22)..(225): SWISSPROT Homolog: EC 1.3.1.33 Protochlorophyllide reductase
MSNTKFHPETSIGDLSGRVYFVTGGTAGLGAGSVRYLAAKNPAKIFFSGRNKTKADELIADIKAVSPKTELVFIKCDLSSLKSVQQAARQFISQSDRLDVLMNNAGVMALAPGLSEDGYEIQFATNHMGHALLIKLLAPTMLKTAEQPNSDVRIVNLSSVAYGNAPASGIDIDTLKTTQASLGPFLTPSKWTRYGQSKLANILYNTELAKKYPSIKCVAVHPGYIKTELHNGNSMVDWAILVAISKNNWTPVEEGSYNQTWAATTPKENLENGGYYEPVGVKVVPTTSQANDKTLSRKLFEWTEKELANWS

SEQ ID NO: 24045 - DNA, 1952 bp, Muscodor strobelii
  misc_feature: SGI EST ID NO. CUFF.56554.0
  misc_feature: Variant of the nucleotide sequence at SEQ ID NO 24043
tgatcaagcgttttatcaactcttaaggaaaaggaggcgagaccgagaagttacttggtacaatcggccttagaatcctccgaagcgggaggaccgccgtaccggccccttgtcgcgattcttttaatcactcgtaccttcttaactcttacgcaactttaagaaacgagagcaagattctgtcgtgcaaaaatctttaaataaattagctcctgagcatgaaccaagttgaaatagcatttaagacaagcttatctccgtgtcaagcgctgtttcgatcatgtattggattgtgtacttcgatcaatgttaatgtaatgtcatgagccctacatcgacgcgacaccaccagacggggaaaagcgggtacttgtgagcagcttgcatgaattagcgtctcgatatgtaccttcgtactggtgtgtgagcgacgtgcagctcggactctgcttcagccctggctggacggtcgcttagcggcagtaaggtacttcagtaccttatccactcgctctcgaagctgtctcgaaacagcttcgagttcatccgagtcaataagttcatcaagtcatgcaggaggatcgtcaagccggctgtatgaacggacttatccataacgacgaactaagatcgtagaattgccgtgaggatagaatatataaacattaagagtatcctgttgttagaattagtttgtagtatcaccatcatcatcatcacttcatagatcacgatctaaagagcaatactcaaatcatctccaatctcatcttcaaagacttgcaactcttgcaactcgcaacatcacaactcgtcatctcaatatcagatatatcaattctaacttagaatgtctaacaccaaattccatcctgagacgtctattggcgatctctccggccgtgtctacttcgtcactggaggaactgctggtctcggcgcaggatcggttcgatatcttgcagcgaagaaccctgccaagatcttcttcagtgggcgtaacaaaacaaaggcagatgagctcatcgccgatatcaaagctgtatctcccaagaccgaattggtcttcatcaagtgcgacctctcaagcttgaagtcagtccagcaagccgctcggcaattcatctcccagtcagatcgcttggatgtcttgatgaacaacgccggtgtcatggctttggcacctggtctgagtgaagacggctacgaaatccagttcgctacgaatcatatgggtcacgcactactcattaaacttcttgctcctaccatgctcaagactgctgaacagcccaattcggatgttcgcattgtcaatctttcttcggttgcgtatggaaacgcaccagcatctggcatcgatatcgacaccctgaagacgactcaagccagtcttggccctttcttgacaccctcaaagtggacaagatatggccaatccaaacttgccaatattttatacaacaccgaacttgcgaagaagtacccaagcatcaaatgtgttgctgtgcatcccggttacattaagacggagctacacaatggcaacagcatggtagactgggctatcctggtcgcgatctcgaagaacaactggacacctgtagaggagggttcttataaccagacttgggcggcaacgacacctaaggagaaccttgagaatggcgggtactatgagccggttggtgtcaaggttgtgcctacgacttctcaggccaatgacaagactctttcaaggaagctcttcgagtggactgagaaggagttggcgaactggtcttaattgggttcttgagtggcatgattatgaggcataccttgggtcgggtgttcggtgctggcaagctgtacgacttgattcggttgggtaatggacaatatagactaatgttgtacgagtttctttgttattagaacgtaaatatagacttttcttttttgacttcgcg

SEQ ID NO: 24046 - DNA, 762 bp, Muscodor strobelii
  misc_feature: SGI cDNA ID NO. 568193
  misc_feature: Encodes the peptide sequence at SEQ ID NO 24047
atgcctaaaggactagccgagtcccgttgggcaacgccatccttgacctcatggccgcgtccaccgccatcaaggagtatcgctcaaccggtgccgtcctctcgcgtcataaacgacaagcccatatcgcccgaacaggaactctcacgatttcttaagattgtcgcccgtctgaagtggaagatacccttcttggaagctggctacagacttgcgattgatcgtgcgggcaaagagcaacacgaaatatatggtaacgagatgcacttcaaattggacttccacgacttctacatgttgattgagcgcgctctcgtccacctgatgggtgtctacggaatcatcatctataacagacgagatgggaacggcagcgtaaacgcctctagtcaacctcaccggtaccacgagaacgtcctaaatgctctcgacgaccattttaatcccctgcacacgactttctcacagccactggtacgaatacatcttcgacgtgctaaagagttacgaaattcgtggaaagacgcggatgccgacagacctactgctatatccgcggtgccgctagaagactacaaccttgaggagatcttgcagactatcctcgcggcactcgaccaggccttttccgtcacagagcgatatattcgcgacagaaatccaaatcttgaccagaatcaacccttgagcgttgccgactggactatgaactcagatgactgggaatttatggttgatgccatggactgggaggttatttag

SEQ ID NO: 24047 - protein, 253 aa, Muscodor strobelii
  misc_feature: SGI Peptide ID NO. 568193
  misc_feature (1)..(253): NCBI GI: 212536302 Blast Desc: conserved [Penicillium marneffei ATCC 18224] gi|210070706|gb|EEA24796.1| conserved [Penicillium marneffei ATCC 18224]
  misc_feature (1)..(252): NCBI GI: 242795362 Blast Desc: fungal specific transcription factor, [Talaromyces stipitatus ATCC 10500] gi|218719159|gb|EED18579.1| fungal specific transcription factor, [Talaromyces stipitatus ATCC
  misc_feature (5)..(253): NCBI GI: 119497545 Blast Desc: NFIA_023450 [Neosartorya fischeri NRRL 181] gi|119413693|gb|EAW23634.1| conserved [Neosartorya fischeri NRRL 181]
  misc_feature (4)..(253): NCBI GI: 121703471 Blast Desc: conserved [Aspergillus clavatus NRRL 1] gi|119398143|gb|EAW08574.1| conserved [Aspergillus clavatus NRRL 1]
  misc_feature (5)..(253): NCBI GI: 70990030 Blast Desc: conserved [Aspergillus fumigatus Af293] gi|66847496|gb|EAL87826.1| conserved [Aspergillus fumigatus Af293]
  misc_feature (5)..(253): NCBI GI: 159124814 Blast Desc: conserved [Aspergillus fumigatus A1163]
  misc_feature (5)..(253): NCBI GI: 145234703 Blast Desc: An03g00980 [Aspergillus niger] gi|134057673|emb|CAK38071.1| protein product [Aspergillus niger]
  misc_feature (46)..(253): NCBI GI: 116198413 Blast Desc: CHGG_07362 [Chaetomium globosum CBS 148.51] gi|88178641|gb|EAQ86109.1| CHGG_07362 [Chaetomium globosum CBS 148.51]
  misc_feature (5)..(253): NCBI GI: 169775599 Blast Desc: [Aspergillus oryzae RIB40] gi|83771001|dbj|BAE61133.1| protein product [Aspergillus oryzae]
  misc_feature (5)..(253): NCBI GI: 238502229 Blast Desc: conserved [Aspergillus flavus NRRL3357] gi|220691158|gb|EED47506.1| conserved [Aspergillus flavus NRRL3357]
MPKGLAESRWATPSLTSWPRPPPSRSIAQPVPSSRVINDKPISPEQELSRFLKIVARLKWKIPFLEAGYRLAIDRAGKEQHEIYGNEMHFKLDFHDFYMLIERALVHLMGVYGIIIYNRRDGNGSVNASSQPHRYHENVLNALDDHFNPLHTTFSQPLVRIHLRRAKELRNSWKDADADRPTAISAVPLEDYNLEEILQTILAALDQAFSVTERYIRDRNPNLDQNQPLSVADWTMNSDDWEFMVDAMDWEVI

SEQ ID NO: 24048 - DNA, 1615 bp, Muscodor strobelii
  misc_feature: SGI EST ID NO. CUFF.56557.0
  misc_feature: Variant of the nucleotide sequence at SEQ ID NO 24046
tctgcctgcggcaaatacaaggcaggagcgctcgaagtacggagatatctacaatagtgatttgcagcggtgtaatctaggtgcaattggcctaacctctaggtggacccctgtccgtccatgaagcaagaaccgcgtaaggaaacaaaagacctccagagaacaagcactttctcttatgttatgaacaggattcgatacattaacaatggcatgaacaaaggatacggcaattccccatttacattgatcgacaaccagccatctcgcaatcgaaggagatttatgttctctagcacttatagattggcgttctttatcgcatgctctttttgcgattatagtcaccagtgactgacatattgccattctcgtcgttgagcgacgaaacatcatggtacatatttgtggtcgcgaagatttcctaatatccttttgatccttatcatttctacattctccttatacataacccagcttgccaatttataatcaccagcaccagtatcggaaaccatgcctaaaggactagccgagtcccgttgggcaacgccatccttgacctcatggccgcgtccaccgccatcaaggagtatcgctcaaccggtgccgtcctctcgcgtcataaacgacaagcccatatcgcccgaacaggaactctcacgatttcttaagattgtcgcccgtctgaagtggaagatacccttcttggaagctggctacagacttgcgattgatcgtgcgggcaaagagcaacacgaaatatatggtaacgagatgcacttcaaattggacttccacgacttctacatgttgattgagcgcgctctcgtccacctgatgggtgtctacggaatcatcatctataacagacgagatgggaacggcagcgtaaacgcctctagtcaacctcaccggtaccacgagaacgtcctaaatgctctcgacgaccattttaatcccctgcacacgactttctcacagccactggtacgaatacatcttcgacgtgctaaagagttacgaaattcgtggaaagacgcggatgccgacagacctactgctatatccgcggtgccgctagaagactacaaccttgaggagatcttgcagactatcctcgcggcactcgaccaggccttttccgtcacagagcgatatattcgcgacagaaatccaaatcttgaccagaatcaacccttgagcgttgccgactggactatgaactcagatgactgggaatttatggttgatgccatggactgggaggttatttaggcagccgagtagcctttcttcggtaactttatagatcacgacgtttgcatagcatcgtgtctgtcttccttttctttgccgtcctggagatgatgctgactgaaaaactgggttgctgtttctcgtttgataccctagatagtcttataaattgcagtcttctttgttttaactcaatccgtcccgtatgttcagtctacctggtagatgacatctatacttattttcacagcccgcactccatactgaatgtgggattgacgtcatttcgtcatttgtctttgctagtgcaaatgaatgctggtattaaagcattcgtcttcaactatgaatctca

SEQ ID NO: 24049 - DNA, 1389 bp, Muscodor strobelii
  misc_feature: SGI cDNA ID NO. 568194
  misc_feature: Encodes the peptide sequence at SEQ ID NO 24050
atgggccccctaaatcaaccaggatctcgcgcattccttttgctcctcatcatcacagctctttatctgacgtacggttattcaaaattctatcgtgatcccctctccattttcttctctgaagaacatgggtatgatcgcttctattccgcaacgcgacatgcggaagccgatgcgtttcttgatgggctcgagactcatcccaatgttgtgcgctcgggtttggggaaggctggttctgatccggagatatgcgcagtattcttgactactggtcgtgaaatgcaggggagacagtacatcgaaacagcagtcgggtctttcttggccaatatgtcgcgggcagaaagagctgcgatccacctcaaactcttttttgttggcgtgccagctcctgagacggagcacaagagctacgacagcttagtcgcagctgatgtcgcggacgatatcgtcacatattcgtcgactctgccgagcggaacgaagagcgacaggatggctaagctcgagtcatggtccagcgaccgcaataagcaagctgtggaaaggaagtcggtgcacgattatgcctacgcacttcatcagtgtgtacaaaccaccagggcgccatatatcgcattgttcgaagacgacatattgcttgccaataattgggcagcaagcacgttgaagcacctccacgacatcgagcagatgatgaaggatcccagacgccacactccaagtcgcggccggattgccccaggtcaaccaaatagctggctatacctacgcatgtttaatcaagagaggagcactggttggggaggcggcacaggtttccgacgtaacaacgtgcacatcatctccgtcgccatctccgtccctctggcagcgctcctgatcatttcgcgtcgagcgtttctgcctcgttccctggcacggcatatcgatacatggaccatcatcgtgatatgtggcataggagtgccgctgttcgtatggctcttcttcgcatccggaaaggcctcactcgtcggtacatcgcccggtatctacgaggagtggttcggatgttgcaaccaggctttggtgtataatagagaacacgcccaagcactgtcaaacttcctcatgggtgcgacaagcaaaagtggtcgtgccggtagagccgacatgttgccaaaggagtttgctttcgaacatggtctcgcaaggatcagtgcctatccgatgatggtgcagcacattgggaggattagtgccacggctactacctcagatgaggcgcggaagatctggagtatggcatttgagaacctgaagtcggagtctttagcacgtgatcatattcgtgatgtaagagatttgtttggtgatgacgcggtcaaccctatgcgaggctag

SEQ ID NO: 24050 - protein, 462 aa, Muscodor strobelii
  misc_feature: SGI Peptide ID NO. 568194
  misc_feature (11)..(444): NCBI GI: 46110549 Blast Desc: FG02156.1 [Gibberella zeae PH-1]
  misc_feature (10)..(445): NCBI GI: 255941602 Blast Desc: Pc16g12710 [Penicillium chrysogenum Wisconsin 54-1255] gi|211586193|emb|CAP93941.1| Pc16g12710 [Penicillium chrysogenum Wisconsin 54-1255]
  misc_feature (4)..(444): NCBI GI: 212537167 Blast Desc: conserved [Penicillium marneffei ATCC 18224] gi|210068481|gb|EEA22572.1| conserved [Penicillium marneffei ATCC 18224]
  misc_feature (8)..(460): NCBI GI: 67539916 Blast Desc: AN6128.2 [Aspergillus nidulans FGSC A4] gi|40738913|gb|EAA58103.1| AN6128.2 [Aspergillus nidulans FGSC A4] gi|259479681|tpe|CBF70126.1| TPA: conserved [Aspergillus FGSC
  misc_feature (10)..(460): NCBI GI: 258576275 Blast Desc: conserved [Uncinocarpus reesii 1704] gi|237902585|gb|EEP76986.1| conserved [Uncinocarpus reesii 1704]
  misc_feature (25)..(446): NCBI GI: 121717029 Blast Desc: conserved [Aspergillus clavatus NRRL 1] gi|119404140|gb|EAW14557.1| conserved [Aspergillus clavatus NRRL 1]
  misc_feature (23)..(444): NCBI GI: 242802614 Blast Desc: conserved [Talaromyces stipitatus ATCC 10500] gi|218717351|gb|EED16772.1| conserved [Talaromyces stipitatus ATCC 10500]
  misc_feature (8)..(450): NCBI GI: 145249192 Blast Desc: An14g03100 [Aspergillus niger] gi|134081613|emb|CAK46547.1| protein product [Aspergillus niger]
  misc_feature (11)..(425): NCBI GI: 238841182 Blast Desc: integral membrane protein [Microsporum canis CBS 113480]
  misc_feature (4)..(434): NCBI GI: 119497407 Blast Desc: integral membrane protein [Neosartorya fischeri NRRL 181] gi|119413624|gb|EAW23565.1| integral membrane protein [Neosartorya fischeri NRRL 181]
MGPLNQPGSRAFLLLLIITALYLTYGYSKFYRDPLSIFFSEEHGYDRFYSATRHAEADAFLDGLETHPNVVRSGLGKAGSDPEICAVFLTTGREMQGRQYIETAVGSFLANMSRAERAAIHLKLFFVGVPAPETEHKSYDSLVAADVADDIVTYSSTLPSGTKSDRMAKLESWSSDRNKQAVERKSVHDYAYALHQCVQTTRAPYIALFEDDILLANNWAASTLKHLHDIEQMMKDPRRHTPSRGRIAPGQPNSWLYLRMFNQERSTGWGGGTGFRRNNVHIISVAISVPLAALLIISRRAFLPRSLARHIDTWTIIVICGIGVPLFVWLFFASGKASLVGTSPGIYEEWFGCCNQALVYNREHAQALSNFLMGATSKSGRAGRADMLPKEFAFEHGLARISAYPMMVQHIGRISATATTSDEARKIWSMAFENLKSESLARDHIRDVRDLFGDDAVNPMRG

SEQ ID NO: 24051 - DNA, 1677 bp, Muscodor strobelii
  misc_feature: SGI EST ID NO. CUFF.56559.0
  misc_feature: Variant of the nucleotide sequence at SEQ ID NO 24049
ttatgaccgtgtttgcacctcttattgatcatccttcatacaatcactgacgctccagatctggagccatatactcattgttcgggaaggcctctcaatctagtcatccaacgggcattaatccgtgggaacatcatgctctcatgcagaaagagggcttgcgacgttgcgtcgttcccagaatgggccccctaaatcaaccaggatctcgcgcattccttttgctcctcatcatcacagctctttatctgacgtacggttattcaaaattctatcgtgatcccctctccattttcttctctgaagaacatgggtatgatcgcttctattccgcaacgcgacatgcggaagccgatgcgtttcttgatgggctcgagactcatcccaatgttgtgcgctcgggtttggggaaggctggttctgatccggagatatgcgcagtattcttgactactggtcgtgaaatgcaggggagacagtacatcgaaacagcagtcgggtctttcttggccaatatgtcgcgggcagaaagagctgcgatccacctcaaactcttttttgttggcgtgccagctcctgagacggagcacaagagctacgacagcttagtcgcagctgatgtcgcggacgatatcgtcacatattcgtcgactctgccgagcggaacgaagagcgacaggatggctaagctcgagtcatggtccagcgaccgcaataagcaagctgtggaaaggaagtcggtgcacgattatgcctacgcacttcatcagtgtgtacaaaccaccagggcgccatatatcgcattgttcgaagacgacatattgcttgccaataattgggcagcaagcacgttgaagcacctccacgacatcgagcagatgatgaaggatcccagacgccacactccaagtcgcggccggattgccccaggtcaaccaaatagctggctatacctacgcatgtttaatcaagagaggagcactggttggggaggcggcacaggtttccgacgtaacaacgtgcacatcatctccgtcgccatctccgtccctctggcagcgctcctgatcatttcgcgtcgagcgtttctgcctcgttccctggcacggcatatcgatacatggaccatcatcgtgatatgtggcataggagtgccgctgttcgtatggctcttcttcgcatccggaaaggcctcactcgtcggtacatcgcccggtatctacgaggagtggttcggatgttgcaaccaggctttggtgtataatagagaacacgcccaagcactgtcaaacttcctcatgggtgcgacaagcaaaagtggtcgtgccggtagagccgacatgttgccaaaggagtttgctttcgaacatggtctcgcaaggatcagtgcctatccgatgatggtgcagcacattgggaggattagtgccacggctactacctcagatgaggcgcggaagatctggagtatggcatttgagaacctgaagtcggagtctttagcacgtgatcatattcgtgatgtaagagatttgtttggtgatgacgcggtcaaccctatgcgaggctagggttgagctagtatttgtatctatactacctctcaacgatgagtaataaagttttgtgaaatcaacgcggattgatgaggagtgaagatacgtagcaaaggttgac

SEQ ID NO: 24052 - DNA, 852 bp, Muscodor strobelii
  misc_feature: SGI cDNA ID NO. 568195
  misc_feature: Encodes the peptide sequence at SEQ ID NO 24053
atgatgttcgttaggcccgatgtcacaatcttcaaagaattcttgcgctccaaacacgagaaggacaccaagcacattgatactgttgcagtcatggacacttcattcaacgacatcatgtcgtcgcctctgtttaattttgacgttggacccaacgcacagagattcactctacactcacttgccttctcccgcctatcccaaccactcgactctctgatcaatggtggtatgcgtgaagctcgcgagcaacttgctgtatgggatgacatggaacctgctgtcttttctttactcgctggatatgcatacaatggcagatgccctttccccactaaggatcaatatcaacaagtcagtctggaagcaaaacgagccggcaacgagaagaaaagcaaagctgtaggctctatgtctatggtcaagtttaatcaagagttcacgaactatcttgaaagctatgggaccatgatatttcctgaatccgcccaggctcattatcagagaactgctagcataacgatggatcctgatgccttcgtgaagtacatgaagttgtacgtgacagcagacaaatatttgattgtcaaattgcaacaacacattctttacgagacacatgtgggtctgttgcatcaccctctcaaggaaataacaaccgcaattaagggtatgcgtctcgcaatcattatcatttactcgtcgacacatggagaggatcagatgcgaaagttgctggcattccacacggctaagttacatgatcgttatgaggaagactttaaagacatcatggagaaattgggcgagttctccttcttagtagcacactatttgcagcgaagaagatga

SEQ ID NO: 24053 - protein, 283 aa, Muscodor strobelii
  misc_feature: SGI Peptide ID NO. 568195
  misc_feature (35)..(251): NCBI GI: 212541026 Blast Desc: PMAA_058390 [Penicillium marneffei ATCC 18224] gi|210067967|gb|EEA22059.1| PMAA_058390 [Penicillium marneffei ATCC 18224]
  misc_feature (32)..(112): NCBI GI: 154314343 Blast Desc: [Botryotinia fuckeliana B05.10] gi|150848910|gb|EDN24103.1| [Botryotinia fuckeliana B05.10]
  misc_feature (32)..(104): NCBI GI: 238842159 Blast Desc: conserved [Microsporum canis CBS 113480]
  misc_feature (35)..(135): NCBI GI: 115492757 Blast Desc: [Aspergillus terreus NIH2624] gi|114197866|gb|EAU39566.1| [Aspergillus terreus NIH2624]
  misc_feature (39)..(112): NCBI GI: 119484214 Blast Desc: NFIA_097410 [Neosartorya fischeri NRRL 181] gi|119410166|gb|EAW20113.1| conserved [Neosartorya fischeri NRRL 181]
  misc_feature (32)..(104): NCBI GI: 238492589 Blast Desc: AFLA_040690 [Aspergillus flavus NRRL3357] gi|220696025|gb|EED52367.1| AFLA_040690 [Aspergillus flavus NRRL3357]
  misc_feature (36)..(136): NCBI GI: 258575647 Blast Desc: conserved [Uncinocarpus reesii 1704] gi|237902271|gb|EEP76672.1| conserved [Uncinocarpus reesii 1704]
  misc_feature (32)..(105): NCBI GI: 258573019 Blast Desc: [Uncinocarpus reesii 1704] gi|237900957|gb|EEP75358.1| [Uncinocarpus reesii 1704]
  misc_feature (36)..(219): NCBI GI: 240272832 Blast Desc: conserved [Ajellomyces capsulatus H143]
  misc_feature (36)..(111): NCBI GI: 212541262 Blast Desc: conserved [Penicillium marneffei ATCC 18224] gi|210068085|gb|EEA22177.1| conserved [Penicillium marneffei ATCC 18224]
MMFVRPDVTIFKEFLRSKHEKDTKHIDTVAVMDTSFNDIMSSPLFNFDVGPNAQRFTLHSLAFSRLSQPLDSLINGGMREAREQLAVWDDMEPAVFSLLAGYAYNGRCPFPTKDQYQQVSLEAKRAGNEKKSKAVGSMSMVKFNQEFTNYLESYGTMIFPESAQAHYQRTASITMDPDAFVKYMKLYVTADKYLIVKLQQHILYETHVGLLHHPLKEITTAIKGMRLAIIIIYSSTHGEDQMRKLLAFHTAKLHDRYEEDFKDIMEKLGEFSFLVAHYLQRRR

SEQ ID NO: 24054 - DNA, 867 bp, Muscodor strobelii
  misc_feature: SGI cDNA ID NO. 568196
  misc_feature: Encodes the peptide sequence at SEQ ID NO 24055
atgccctctcttgtgcagtctcaactccgtggcgtgggcagtcaggctagctcgaagcttgcttctatccctcatgttgctaaccaagcactggctgcgtctgattttcattcgcagccttcgcagtccgcgagcgcagctggccatgccatgaggttttcgaaccttcgtccacagccttcgcagcctgcactggctaactgggaccttcgtcgatggccttggctgcctgttgacgccctggaccaggttacctcgattcttcatctgtggccctcgctgcctgctggcgtagttgctacagcccatttcccagttttcggagcgactggcggtcgcacttcaaacgccatgatcatgggcctgggtaccgtcatcttatacaagggccctttggaaagcaagaccaatgatcaggcgggcaggacgaacaggaaggagcacactcagactggggataggggcaccaagagtggagatgggtacaaacagaatggcgcgaacggttctggggaaaagggcaacacaggtccgagattcagcttcgagtttaagattagctcgactgtagtcgtagtcgtcacatttgaaacctgggattacttcggccgccgtggatatacagaagatcccgggctgcgccgttccagtatcccgaccgcccgcactccaacgaactcagacccgacagccggccatgatcaaaatcggaacgcggtagaagccgtacagccacctaccccggcactcaaaccgatgtccattcaagtactatcaaatgcgagaatccgctcgggaaaagtgctgtctggccatacggaagatgaacgaagcacttcgtccgcattaaagagggatgaagactaa

SEQ ID NO: 24055 - protein, 288 aa, Muscodor strobelii
  misc_feature: SGI Peptide ID NO. 568196
MPSLVQSQLRGVGSQASSKLASIPHVANQALAASDFHSQPSQSASAAGHAMRFSNLRPQPSQPALANWDLRRWPWLPVDALDQVTSILHLWPSLPAGVVATAHFPVFGATGGRTSNAMIMGLGTVILYKGPLESKTNDQAGRTNRKEHTQTGDRGTKSGDGYKQNGANGSGEKGNTGPRFSFEFKISSTVVVVVTFETWDYFGRRGYTEDPGLRRSSIPTARTPTNSDPTAGHDQNRNAVEAVQPPTPALKPMSIQVLSNARIRSGKVLSGHTEDERSTSSALKRDED

SEQ ID NO: 24056 - DNA, 1485 bp, Muscodor strobelii
  misc_feature: SGI EST ID NO. CUFF.56577.0
  misc_feature: Variant of the nucleotide sequence at SEQ ID NO 24054
gataacttcacagcttactcttggctaactctgagaaagtcacaagaaaaatcttactatgtagcgttgctctatgtaagtgccgtatcagtttcccttctagatgtggtgaaggctggggatttatgggtaccttctggcgttgtatcatccgtgcttgccgctctgctctccgaatcgtcacaactataatatggatctttggcagtacttaatccagcttcgagctttttatagtctatttataatttgacagcctgtatgtattcagttcatttcgttcaagtccctgactgggtcatcaacaatgatcatggcaggaccgattatcaaatttatccaacaggggatgccctctcttgtgcagtctcaactccgtggcgtgggcagtcaggctagctcgaagcttgcttctatccctcatgttgctaaccaagcactggctgcgtctgattttcattcgcagccttcgcagtccgcgagcgcagctggccatgccatgaggttttcgaaccttcgtccacagccttcgcagcctgtgagcgtaactaatcaggccacgaagtctccgattctttctctattaccttcgatgactgttaacacagctaaccaggcactggctaactgggaccttcgtcgatggccttggctgcctgttgacgccctggaccaggttacctcgattcttcatctgtggccctcgctgcctgctggcgtagttgctacagcccatttcccagttttcggagcgactggcggtcgcacttcaaacgccatgatcatgggcctgggtaccgtcatcttatacaagggccctttggaaagcaagaccaatgatcaggcgggcaggacgaacaggaaggagcacactcagactggggataggggcaccaagagtggagatgggtacaaacagaatggcgcgaacggttctggggaaaagggcaacacaggtccgagattcagcttcgagtttaagattagctcgactgtagtcgtagtcgtcacatttgaaacctgggattacttcggccgccgtggatatacagaagatcccgggctgcgccgttccagtatcccgaccgcccgcactccaacgaactcagacccgacagccggccatgatcaaaatcggaacgcggtagaagccgtacagccacctaccccggcactcaaaccgatgtccattcaagtactatcaaatgcgagaatccgctcgggaaaagtgctgtctggccatacggaagatgaacgaagcacttcgtccgcattaaagagggatgaagactaagcattgattcgatctgtaatctgcattcctttgcgttagagcgacgcatgcatggaaaggtgtcccgcaatatatggaaaattcgttgttctgcctttgtatattaaaactcagctcattccggctcattaagctgaaagatatagatcgcaatttttgcttgaatgccaaatgcaaggcataaccatttc

SEQ ID NO: 24057 - DNA, 735 bp, Muscodor strobelii
  misc_feature: SGI cDNA ID NO. 568197
  misc_feature: Encodes the peptide sequence at SEQ ID NO 24058
atgacaagccaggacggagtcaagttcatatctggactcctggcagacgacggtgtcccatcggtactttggggcgagttcctcctaaatgtctacggcgtcccttctatcgttggaggtattgattttgtagtaccggacgacaagataccagctgccgtcgcgaccctcaagcgttcctttctctgcccatgtccagatcccgatgcttgcattgtgtctggagattcgagcccgtttcccgttcctgtattccatatgcacgtgccaggttccgagcttgatgtttctctgagggcgcattcggaaactctctgggatataccaccgccgagcatggcttgcttaaaagggagaacgacggctgagcctagtctctattacattgatgcctcatctccagagctgccacctggccgtgctggtcgcggtcatggctcattttcctcagaaggatctcctgtgcttgttcctcgtgcccatatattgctagaggcgtatatacgactggccagtgcttttcgagaagactactggtcttatttctctagtatgattacctacatgtcagagtacgtcaacgcggacggccttatcgataccaatctactctctacaccttgtcggacattttgggacgatcgcaagcaaaggcggtttcccatggtgcagctcgcgaacaatcttcaacgcgatctgggtgatgagataaccgataactcggattccatatga

SEQ ID NO: 24058 - protein, 244 aa, Muscodor strobelii
  misc_feature: SGI Peptide ID NO. 568197
  misc_feature (10)..(217): NCBI GI: 70985745 Blast Desc: conserved [Aspergillus fumigatus Af293] gi|66846007|gb|EAL86340.1| conserved [Aspergillus fumigatus Af293]
  misc_feature (10)..(217): NCBI GI: 159128487 Blast Desc: conserved [Aspergillus fumigatus A1163]
  misc_feature (5)..(216): NCBI GI: 67516397 Blast Desc: AN0480.2 [Aspergillus nidulans FGSC A4] gi|40747423|gb|EAA66579.1| [Aspergillus nidulans FGSC A4] gi|259489270|tpe|CBF89403.1| TPA: conserved [Aspergillus nidulans
  misc_feature (18)..(236): NCBI GI: 255939215 Blast Desc: Pc15g01570 [Penicillium chrysogenum Wisconsin 54-1255] gi|211584999|emb|CAP83043.1| Pc15g01570 [Penicillium chrysogenum Wisconsin 54-1255]
  misc_feature (7)..(214): NCBI GI: 225559009 Blast Desc: thioredoxin reductase [Ajellomyces capsulatus G186AR]
  misc_feature (3)..(214): NCBI GI: 238841851 Blast Desc: conserved [Microsporum canis CBS 113480]
  misc_feature (4)..(217): NCBI GI: 255935715 Blast Desc: Pc13g04490 [Penicillium chrysogenum Wisconsin 54-1255] gi|211583504|emb|CAP91518.1| Pc13g04490 [Penicillium chrysogenum Wisconsin 54-1255]
  misc_feature (4)..(205): NCBI GI: 121714929 Blast Desc: conserved [Aspergillus clavatus NRRL 1] gi|119403230|gb|EAW13648.1| conserved [Aspergillus clavatus NRRL 1]
  misc_feature (14)..(211): NCBI GI: 169622561 Blast Desc: SNOG_14505 [Phaeosphaeria nodorum SN15] gi|111056925|gb|EAT78045.1| SNOG_14505 [Phaeosphaeria nodorum SN15]
  misc_feature (7)..(211): NCBI GI: 240111644 Blast Desc: CPC735_021430 [Coccidioides posadasii C735 delta SOWgp]
MTSQDGVKFISGLLADDGVPSVLWGEFLLNVYGVPSIVGGIDFVVPDDKIPAAVATLKRSFLCPCPDPDACIVSGDSSPFPVPVFHMHVPGSELDVSLRAHSETLWDIPPPSMACLKGRTTAEPSLYYIDASSPELPPGRAGRGHGSFSSEGSPVLVPRAHILLEAYIRLASAFREDYWSYFSSMITYMSEYVNADGLIDTNLLSTPCRTFWDDRKQRRFPMVQLANNLQRDLGDEITDNSDSI

SEQ ID NO: 24059 - DNA, 963 bp, Muscodor strobelii
  misc_feature: SGI cDNA ID NO. 568198
  misc_feature: Reduced expression when VOC is produced
  misc_feature: Encodes the peptide sequence at SEQ ID NO 24060
atgagtggtggttggaatacaatcgagtcggacgcgggcgtcttcacgtttcttctcaacaaccttggtgccaaagatgtgcagttcgaggagctcctcacgctagagccggaagcgttggctgctctttaccctgtctacggcgtaatcttcctcttcaagtatccgacagacgcgccctacgcatccgccgatggtccactcgatggctctttcgatcacgacgcctccgagcgcatcttcttcgccgcgcaaacgatccaaaacgcatgcgggacacaggctctcttatcggtactattgaacaaagacaaggaaagcgatggcggggttgacatcggcaccccactgcgcgagttccaggacttcaccatggtgctgccgccagagtttcgaggcgaggccctcagcaacagcgagctgatccgcgatgtccacaacagctttgcgaagagcagtccttttgtcgacgagacacagcgcacgagcggcgagaccgaagatgcctttcacttcattgcgtacacgcccatcggcggaacgctctacgaactcgatggcctgcaacccgctcccattagccacggggcttgcggcaccgaagattttcctcagaaggtcatggatgtgttgcagcggcgcattgcgcgatacgagatgtcggagatccgcttcaacctcatggctatgattagagacccaaggattcaggctagagagattggagatactgaggcattggagcgcgaggaggggaagaggagggattggcaattcgagaatgcgctgcggagacacaattttgttggctttgctggtaaggtgctcgagggtgtcgttggggagaaattaaaggaagatggcgcatatgagaagtggatagaaaacgccaagacgaagactagggcgagacttgaggccaaacagaagggaggtggtgaagatatcaagatggcgggatag

SEQ ID NO: 24060 - protein, 320 aa, Muscodor strobelii
  misc_feature: SGI Peptide ID NO. 568198
  misc_feature (4)..(218): Pfam Id: PF01088 Pfam Desc: Ubiquitin carboxyl-terminal hydrolase, family 1
  misc_feature (1)..(320): NCBI GI: 85103260 Blast Desc: NCU03704 [Neurospora crassa OR74A] gi|16944569|emb|CAC18190.2| related to 26S proteasome-associated ubiquitin carboxyl-terminal hydrolase [Neurospora crassa] crassa
  misc_feature (1)..(320): NCBI GI: 116198283 Blast Desc: CHGG_07297 [Chaetomium globosum CBS 148.51] gi|88178576|gb|EAQ86044.1| CHGG_07297 [Chaetomium globosum CBS 148.51]
  misc_feature (1)..(295): NCBI GI: 46109962 Blast Desc: FG01863.1 [Gibberella zeae PH-1]
  misc_feature (1)..(305): NCBI GI: 171694207 Blast Desc: protein product [Podospora anserina] gi|170947052|emb|CAP73857.1| protein product [Podospora anserina]
  misc_feature (1)..(297): NCBI GI: 256728499 Blast Desc: [Nectria haematococca mpVI 77-13-4]
  misc_feature (13)..(320): NCBI GI: 154299204 Blast Desc: BC1G_11780 [Botryotinia fuckeliana B05.10] gi|150857483|gb|EDN32675.1| BC1G_11780 [Botryotinia fuckeliana B05.10]
  misc_feature (1)..(320): NCBI GI: 261360839 Blast Desc: ubiquitin carboxyl-terminal hydrolase [Verticillium albo-atrum VaMs.102]
  misc_feature (1)..(312): NCBI GI: 169599286 Blast Desc: SNOG_02461 [Phaeosphaeria nodorum SN15] gi|111069553|gb|EAT90673.1| SNOG_02461 [Phaeosphaeria nodorum SN15]
  misc_feature (1)..(315): NCBI GI: 189209099 Blast Desc: ubiquitin carboxyl-terminal hydrolase 2 [Pyrenophora tritici-repentis Pt-1C-BFP] gi|187976975|gb|EDU43601.1| ubiquitin carboxyl-terminal hydrolase 2 [Pyrenophora tritici-repentis
  misc_feature (3)..(312): NCBI GI: 226278682 Blast Desc: ubiquitin carboxyl-terminal hydrolase [Paracoccidioides brasiliensis Pb01]
  misc_feature (4)..(300): SWISSPROT Homolog: EC 3.1.2.15 Ubiquitin thiolesterase
  misc_feature: Useful for introducing or modulating the production of volatile compounds
MSGGWNTIESDAGVFTFLLNNLGAKDVQFEELLTLEPEALAALYPVYGVIFLFKYPTDAPYASADGPLDGSFDHDASERIFFAAQTIQNACGTQALLSVLLNKDKESDGGVDIGTPLREFQDFTMVLPPEFRGEALSNSELIRDVHNSFAKSSPFVDETQRTSGETEDAFHFIAYTPIGGTLYELDGLQPAPISHGACGTEDFPQKVMDVLQRRIARYEMSEIRFNLMAMIRDPRIQAREIGDTEALEREEGKRRDWQFENALRRHNFVGFAGKVLEGVVGEKLKEDGAYEKWIENAKTKTRARLEAKQKGGGEDIKMAG

SEQ ID NO: 24061 - DNA, 1518 bp, Muscodor strobelii
  misc_feature: SGI EST ID NO. CUFF.56589.0
  misc_feature: Variant of the nucleotide sequence at SEQ ID NO 24059
ctgcagtgtagcggcaaatggtggggtggagctgtattaatagtacctctcgcctgtacgcgcagttggtgaggtgcctgaatttaggtagcgctagagaggtacccgctctttgtcgcacctacctaaatccttcgcccttatcagatcaattgctttgacatcactggcgggacctcaaattccgtgactagatggacctgacgattttcttcacttggaaccgatcgacgaccctacccttcccaaagatctgaaaatattcagcgcatctattagccctaaattttattccaaggctgttcgaggttgttggagagattctcaccgctacggtgagtctggggtcaagatgagtggtggttggaatacaatcgagtcggacgcgggcgtcttcacgtttcttctcaacaaccttggtgccaaagatgtgcagttcgaggagctcctcacgctagagccggaagcgttggctgctctttaccctgtctacggcgtaatcttcctcttcaagtatccgacagacgcgccctacgcatccgccgatggtccactcgatggctctttcgatcacgacgcctccgagcgcatcttcttcgccgcgcaaacgatccaaaacgcatgcgggacacaggctctcttatcggtactattgaacaaagacaaggaaagcgatggcggggttgacatcggcaccccactgcgcgagttccaggacttcaccatggtgctgccgccagagtttcgaggcgaggccctcagcaacagcgagctgatccgcgatgtccacaacagctttgcgaagagcagtccttttgtcgacgagacacagcgcacgagcggcgagaccgaagatgcctttcacttcattgcgtacacgcccatcggcggaacgctctacgaactcgatggcctgcaacccgctcccattagccacggggcttgcggcaccgaagattttcctcagaaggtcatggatgtgttgcagcggcgcattgcgcgatacgagatgtcggagatccgcttcaacctcatggctatgattagagacccaaggattcaggctagagagattggagatactgaggcattggagcgcgaggaggggaagaggagggattggcaattcgagaatgcgctgcggagacacaattttgttggctttgctggtaaggtgctcgagggtgtcgttggggagaaattaaaggaagatggcgcatatgagaagtggatagaaaacgccaagacgaagactagggcgagacttgaggccaaacagaagggaggtggtgaagatatcaagatggcgggataggctggtaccgggcttgatctttgaagctattctggctgcctctttcacgtttgcatgattaatagacgatgtaaatcgctatgactaatgtggccatgcggatacggagaatatggagaaagaagattccgcaatagcgggctatctctgtctaaaatggtccctattgcgtgacgtgtgctcccaaatgtataaacctctca

SEQ ID NO: 24062 - DNA, 2505 bp, Muscodor strobelii
  misc_feature: SGI cDNA ID NO. 568199
  misc_feature: Encodes the peptide sequence at SEQ ID NO 24063
atgaagttccaaccttacgtgttatccgccttcgcggcggctctaaccgttgccgcctctacattgacaccgcatgtattacctttagccgtgcgaaatccttacttaagcttctggttaaccactgcccgtaatgcgccatgggatgaatggccaaggttctggcgagaccagactgttggttttgctgttatggcctcagttcctggcaacaagaccgtttatccgctacttggaagacctcaggattttcttcatcaacactcatctagttacaacgttacttttcctgattaccaaggcgctacggtatgtactattcgttttgattacaagaaccgatttgacgcctctactacgaacctcacctacactattcaggaatccgatatcaagatcactttgtcatttctttctcctattacccccacttcaactctcagacaatccctcccagctagttatctgacttgctacgttgaaggctcgtctgacgtgagcctctatctcgatgtgaatggagagtttgtgagcggcttcagtgatagtcgaattgaatggcgcctcaacaagcctggctcgggctctagttcttcgaaaggtcaagacatattgaaaacttggtccataaagcgacataacgaattgctatttactgaacacgatgatcgcgcggaatggggcacttttcacatcactgcgcccgccgacattgagcaccaggctggagagtctcgtcaaacccgccgcatgtttgcagaatcaggttcactgaagaacagggttgacgaaaaattccggggcatcttcgacgacgagcccgtctttgctttttcgaaaacattcaagcttgcaagcaactcgtccgcatcaccgggcgtccgaagcgacagtgtcttgtttacctttgctctgacgcaggatccagtggtccaatttgcctctgccagagggttgactctgatgcgaccgttgtggatatctagatttccacaagcctatgatatgctgcactttcattatcacgatttctcgacggcagcatttcttgctcagaactattcggatcaacttgccaaagatgcctatgcatcgggctcacgagattaccaggacattgttgcattatcagcccgtcaagtacttggtgccacgcagttcgcgggaacaccagagtcgccgatcatttttctcaaggaaatatcatccaatgggaatttccagaccattgatgttatctttccagcctttccgtttttcctctatacaaaccctcaatggcttgcgtatcttcttgaacctcttcttgagcaccagttaagtgggcagtatcctaatgattacagcatgcatgaccttggaactcatttccctaacgccactgggcacggagatggtcaagatgagtatatgcctgttgaagaatgtggtaacatgttgatcatggggttggcattagccaacgcactgagggatcacacgccacccgcgttgaactccgaaacgcttcccggaatccagagcttaccggggcctgtggtacgttcaatgagcatggatgagtacggaatggaccgtacttttgagcagatgggaacaacgggctcgaaggtcgcagtcaagtggttgagtcgcgcgtacaagctgtggaatcaatggacaggctatctcgttgactattccctgattcctgagaaccagctctgcactgacgatttcgctggctggctggcgaaccagacaaatcttgccctcaaaggcattgttggtattagagccatgagtggtattgcagagatagttggcaaagagtccgaagctgaaagatacagagatatcgcagtcgaatatatcgacaaatggcaagaatacggtatttcgagggacaagacgcatgccaagctgtcgtatacttggtacggatcctggacaacactctataacctttatgccgatgcactgttgtgtttccacctagatcctacatcaagtacagaccttctgcgagaggagacattggaacagcaacccttgggccagggaacgacggatcgccgtaagacaaagaactttattcctgataacatctaccagatgcaaagcgactggtaccacaatgtactccaaaagtacgggcttccactagacggccgtgcactttataccaagagtgactgggagttctttgccgctgcgattgccagcaagtcagttcggacggaaatactgcagcatgtagcggcttgggtcaacgaaacaacgtcggatcgccccttcacagacttgtacgagactgaaggccgcggggagcgtactgggcataatttcaaggcacggccggtagtaggagggcattttgcattcctagccctcgaaagagcatgtggcggcaaggcatcggaagggcttgcatttttggacgaacggccaccactcaaaatcgacgtacagaaagtgctagacctggaagacaatggcatttcactggctgatggagagctataa

SEQ ID NO: 24063 - protein, 834 aa, Muscodor strobelii
  misc_feature: SGI Peptide ID NO. 568199
  misc_feature (589)..(791): Pfam Id: PF08760 Pfam Desc: Domain of function (DUF1793)
  misc_feature (1)..(820): NCBI GI: 85102645 Blast Desc: NCU03648 [Neurospora crassa OR74A] gi|11595545|emb|CAC18168.1| related to glutaminase A [Neurospora crassa] gi|28922919|gb|EAA32139.1| NCU03648 [Neurospora crassa
  misc_feature (24)..(823): NCBI GI: 116197983 Blast Desc: CHGG_07147 [Chaetomium globosum CBS 148.51] gi|88178426|gb|EAQ85894.1| CHGG_07147 [Chaetomium globosum CBS 148.51]
  misc_feature (1)..(826): NCBI GI: 145609327 Blast Desc: MGG_07512 [Magnaporthe grisea 70-15] gi|145016709|gb|EDK01139.1| MGG_07512 [Magnaporthe grisea 70-15]
  misc_feature (7)..(807): NCBI GI: 115396308 Blast Desc: conserved [Aspergillus terreus NIH2624] gi|114193362|gb|EAU35062.1| conserved [Aspergillus terreus NIH2624]
  misc_feature (19)..(808): NCBI GI: 145232869 Blast Desc: An02g06720 [Aspergillus niger] gi|134056728|emb|CAK44217.1| protein product [Aspergillus niger]
  misc_feature (1)..(807): NCBI GI: 156052174 Blast Desc: SS1G_07496 [Sclerotinia sclerotiorum 1980] gi|154705272|gb|EDO05011.1| SS1G_07496 [Sclerotinia sclerotiorum 1980]
  misc_feature (1)..(815): NCBI GI: 238486896 Blast Desc: glutaminase, [Aspergillus flavus NRRL3357] gi|220699565|gb|EED55904.1| glutaminase, [Aspergillus flavus NRRL3357]
  misc_feature (1)..(815): NCBI GI: 169770657 Blast Desc: [Aspergillus oryzae RIB40] gi|60360798|dbj|BAD90555.1| [Aspergillus oryzae] gi|83767657|dbj|BAE57796.1| protein product [Aspergillus oryzae] gi|195972790|dbj|BAG68491.1| protein oryzae]
  misc_feature (20)..(808): NCBI GI: 70999622 Blast Desc: glutaminase [Aspergillus fumigatus Af293] gi|66852165|gb|EAL92490.1| glutaminase, [Aspergillus fumigatus Af293] gi|159127541|gb|EDP52656.1| glutaminase, [Aspergillus
  misc_feature (14)..(811): NCBI GI: 242784394 Blast Desc: glutaminase, [Talaromyces stipitatus ATCC 10500] gi|218720525|gb|EED19944.1| glutaminase, [Talaromyces stipitatus ATCC 10500]
MKFQPYVLSAFAAALTVAASTLTPHVLPLAVRNPYLSFWLTTARNAPWDEWPRFWRDQTVGFAVMASVPGNKTVYPLLGRPQDFLHQHSSSYNVTFPDYQGATVCTIRFDYKNRFDASTTNLTYTIQESDIKITLSFLSPITPTSTLRQSLPASYLTCYVEGSSDVSLYLDVNGEFVSGFSDSRIEWRLNKPGSGSSSSKGQDILKTWSIKRHNELLFTEHDDRAEWGTFHITAPADIEHQAGESRQTRRMFAESGSLKNRVDEKFRGIFDDEPVFAFSKTFKLASNSSASPGVRSDSVLFTFALTQDPVVQFASARGLTLMRPLWISRFPQAYDMLHFHYHDFSTAAFLAQNYSDQLAKDAYASGSRDYQDIVALSARQVLGATQFAGTPESPIIFLKEISSNGNFQTIDVIFPAFPFFLYTNPQWLAYLLEPLLEHQLSGQYPNDYSMHDLGTHFPNATGHGDGQDEYMPVEECGNMLIMGLALANALRDHTPPALNSETLPGIQSLPGPVVRSMSMDEYGMDRTFEQMGTTGSKVAVKWLSRAYKLWNQWTGYLVDYSLIPENQLCTDDFAGWLANQTNLALKGIVGIRAMSGIAEIVGKESEAERYRDIAVEYIDKWQEYGISRDKTHAKLSYTWYGSWTTLYNLYADALLCFHLDPTSSTDLLREETLEQQPLGQGTTDRRKTKNFIPDNIYQMQSDWYHNVLQKYGLPLDGRALYTKSDWEFFAAAIASKSVRTEILQHVAAWVNETTSDRPFTDLYETEGRGERTGHNFKARPVVGGHFAFLALERACGGKASEGLAFLDERPPLKIDVQKVLDLEDNGISLADGEL

SEQ ID NO: 24064 - DNA, 506 bp, Muscodor strobelii
  misc_feature: SGI EST ID NO. CUFF.56595.0
  misc_feature: Variant of the nucleotide sequence at SEQ ID NO 24062
cggcatattgcagaccacattgcttcttcccgtctgcaccttgctcagaagctctctatttgacatattctggactacattgatcacttctatactagtttgaacacccaaagtacgtcgttagcatcacagttgctctaagcattcggtaacggcgggtcaaagtgcccagagcttgctgacgccttcggtcactgtgtggctttcggtttgagccatgaagttccaaccttacgtgttatccgccttcgcggcggctctaaccgttgccgcctctacattgacaccgcatgtattacctttagccgtgcgaaatccttacttaagcttctggttaaccactgcccgtaatgcgccatgggatgaatggccaaggttctggcgagaccagactgttggttttgctgttatggcctcagttcctggcaacaagaccgtttatccgctacttggaagacctcaggattttcttcatcaacactcatctagttacaacgttacttttc

SEQ ID NO: 24065 - DNA, 1023 bp, Muscodor strobelii
  misc_feature: SGI cDNA ID NO. 568200
  misc_feature: Reduced expression when VOC is produced
  misc_feature: Encodes the peptide sequence at SEQ ID NO 24066
atggactacgagaccgccaacggcgatcgctatgacgatgacggtcctcgctacgagcgtgaccagcgcagcgcctcacctcgtgcttcccgggatgacggcatcgacgactctcgccgtcgctctgcctctcccggccacgcccagcccgatcgtgcccccaaagaagacagcggccgagacgaggatggctctgtcaatcctggctccaacctcttcgtcaccggaatccacccccgccttagtgaagcggaggtaacccgtctgttcgagaagtacggtgaagttgagaagtgccagatcatgaaggacccgcataccaaggagtctcgcggcttcggctttgtcaagatggtcacttcggaccaggcagacgctgccagggacggtctccagggcgaggtcatagagggccgtacccttagtatcgagaaggcccgccgtgctagaccccgaacgccgactccgggcaagtacttcggccctcccaagagagaaggaggtcgccccggctttgacgaccgtcgtcgtggtggccgcttcggtggcggtggctacggcggtggctacggtcgcgacgacccttaccgctaccgtggcggaggtggcggcggctacgatcgcaactatcgtgacgaccgcggcggagaccgaggctaccgtgaggatcgcggatatgatcgcaactaccgtgatgaccgcggcggcttcagtggtggcggccgcgaggaccgtggctacgatcgcggctacgagcgtcgagagcgcaacgacggtggcttcggccgtgaagaccgctatgcaagtggtggccgtgaggatcgtgaccgaggatacagtggccgtggtgccagcggtgccggcggcgaggagcgacgtggaggaggtggcggctatgatcgcagcgagcgttacgaacgatctgatcgtggtggtgaccgtgctcgcgatcctgctgcgtccggatatgctgacactggtgctcgacctgacgctcgcgagtcatatgccggtgcgccttga

SEQ ID NO: 24066 - protein, 340 aa, Muscodor strobelii
  misc_feature: SGI Peptide ID NO. 568200
  misc_feature (72)..(143): Pfam Id: PF00076 Pfam Desc: RNA recognition motif. (a.k.a. RRM, RBD, or RNP domain)
  misc_feature (1)..(339): NCBI GI: 256728655 Blast Desc: NECHADRAFT_72372 [Nectria haematococca mpVI 77-13-4]
  misc_feature (1)..(166): NCBI GI: 261360801 Blast Desc: conserved [Verticillium albo-atrum VaMs.102]
  misc_feature (1)..(169): NCBI GI: 85099136 Blast Desc: NCU04164 [Neurospora crassa OR74A] gi|28922241|gb|EAA31486.1| [Neurospora crassa OR74A]
  misc_feature (1)..(169): NCBI GI: 16944647 Blast Desc: conserved [Neurospora crassa]
  misc_feature (1)..(209): NCBI GI: 46110044 Blast Desc: FG01904.1 [Gibberella zeae PH-1]
  misc_feature (1)..(166): NCBI GI: 171693991 Blast Desc: protein product [Podospora anserina] gi|170946944|emb|CAP73748.1| protein product [Podospora anserina]
  misc_feature (1)..(166): NCBI GI: 116197981 Blast Desc: CHGG_07146 [Chaetomium globosum CBS 148.51] gi|88178425|gb|EAQ85893.1| CHGG_07146 [Chaetomium globosum CBS 148.51]
  misc_feature (1)..(220): NCBI GI: 145609325 Blast Desc: MGG_07511 [Magnaporthe grisea 70-15] gi|145016708|gb|EDK01138.1| MGG_07511 [Magnaporthe grisea 70-15]
  misc_feature (1)..(256): NCBI GI: 156052172 Blast Desc: SS1G_07495 [Sclerotinia sclerotiorum 1980] gi|154705271|gb|EDO05010.1| SS1G_07495 [Sclerotinia sclerotiorum 1980]
  misc_feature (1)..(198): NCBI GI: 238482369 Blast Desc: transformer-SR ribonucleoprotein, [Aspergillus flavus NRRL3357] gi|220700473|gb|EED56811.1| transformer-SR ribonucleoprotein, [Aspergillus flavus NRRL3357]
  misc_feature: Useful for introducing or modulating the production of volatile compounds
MDYETANGDRYDDDGPRYERDQRSASPRASRDDGIDDSRRRSASPGHAQPDRAPKEDSGRDEDGSVNPGSNLFVTGIHPRLSEAEVTRLFEKYGEVEKCQIMKDPHTKESRGFGFVKMVTSDQADAARDGLQGEVIEGRTLSIEKARRARPRTPTPGKYFGPPKREGGRPGFDDRRRGGRFGGGGYGGGYGRDDPYRYRGGGGGGYDRNYRDDRGGDRGYREDRGYDRNYRDDRGGFSGGGREDRGYDRGYERRERNDGGFGREDRYASGGREDRDRGYSGRGASGAGGEERRGGGGGYDRSERYERSDRGGDRARDPAASGYADTGARPDARESYAGAP

SEQ ID NO: 24067 - DNA, 3014 bp, Muscodor strobelii
  misc_feature: SGI EST ID NO. CUFF.57623.0
  misc_feature: Variant of the nucleotide sequence at SEQ ID NO 24065
cagtcatcgccttcctttccttccgctaccagcgcgcggtgcattaaccttcttccactcaacatcacccgttgcaacgctgacaatacaagcatccactgcctctgtgtgtgctgcatcctttgttccctttctttttccaacaacgcagctccccatccacatccacagcttgaccaaccggacagagaagaaggtgcgtacttcttatttgacaatttcgctcgctgcgcgcctcccttgtctccagctcgccatttgcacccgttgtttcccttgtcctttcttctggacagctcatcctcaaaacgcgagaaaaaagctgcagagccttgtgtctctgctgtgtttctgcctgcctccatccattcaatcagccattcaccaatgtacacttaatattcgaccattgccgctgcattctgctcaatcttcaacaccatttccctctgcgcctgcagtcagcaccacacgcgccgcattataagcaacatctgatatttcacatcatcgcgcctggttatcgcccaccagcacgcggcttccttgcgtctatcgtccaacacaacttccacacattcatccatcgcgctgcgctcggtcatagggaataatccaactcaccaccatcaatagtgcaaacaagcttaccagccatggcgaccaccgcaatggactacgagaccgccaacggcgatcgctatgacgatgacggtcctcgctacgagcgtgaccagcgcagcgcctcacctcgtgcttcccgggatgacggcatcgacgactctcgccgtcgctctgcctctcccggccacgcccagcccgatcgtgcccccaaagaagacagcggccgagacgaggatggctctgtcaatcctggctccaacctcttcgtcaccggaatccacccccgccttagtgaagcggaggtaacccgtctgttcgagaagtacggtgaagttgagaagtgccagatcatgaaggacccgcataccaaggagtctcgcggcttcggctttgtcaagatggtcacttcggaccaggcagacgctgccagggacggtctccagggcgaggtcatagagggccgtacccttagtatcgagaaggcccgccgtgctagaccccgaacgccgactccgggcaagtacttcggccctcccaagagagaaggaggtcgccccggctttgacgaccgtcgtcgtggtggccgcttcggtggcggtggctacggcggtggctacggtcgcgacgacccttaccgctaccgtggcggaggtggcggcggctacgatcgcaactatcgtgacgaccgcggcggagaccgaggctaccgtgaggatcgcggatatgatcgcaactaccgtgatgaccgcggcggcttcagtggtggcggccgcgaggaccgtggctacgatcgcggctacgagcgtcgagagcgcaacgacggtggcttcggccgtgaagaccgctatgcaagtggtggccgtgaggatcgtgaccgaggatacagtggccgtggtgccagcggtgccggcggcgaggagcgacgtggaggaggtggcggctatgatcgcagcgagcgttacgaacgatctgatcgtggtggtgaccgtgctcgcgatcctgctgcgtccggatatgctgacactggtgctcgacctgacgctcgcgagtcatatgccggtgcgccttgatcggcttgacgacagatgccatcgacgctgctaatgcttcgttcagggagcaatcgtcggatgcattaggcgtctcggtctccatctttcaccatcggtcatacgacacgatttcgtcttgcagggctgccgttcgtagtctccttgacgttgtactcttctgggcatgcgaagtcggcccactcaccaccaaaagctgcgacgtctggagttacattgcggcaggtatacagggaagggaaaaaggttccgactagttctttgattttctttcgtcttgttttcttgcgtttctgttttgcgggtctgaagctcaggcattctcgtatgtgcataggggcaaaagagtgagagagagtgatcgggtttcggcgtatgttgccttggcttcttgtgcggttctcaggtttgctcatccttgcaggatcaggagtgttggaggtgaaccaggtcaacttgcacacagcacatccaccccttggatcgcccgtcgccatctaccttttcgtcgtgggatcggagtcggcctcccaacctttcacacgtgtatcattatttcttccggtgtttcttttcgagcatgagacgagcttgacgactgagccagacttcagcagcattttgccagagcagatattcgagacagctctgcaatggtggtccgcagaatgcaacacgtaattgatcgcaaattcccatagaggtgcaacatatgattcgactcgactttaataccgtaaactaccatgaatacgctcgacataagtcgcttcacccagacactaccaaatctcgccttcttcagcacgctgcataaatgtatgacacggtttggtcgtaacaactaggctcagctttgcgagaattctcgacatatttgacgccattcagctagtttacatcactggtttcgagaagctttcatagaatcaccgcctagtttctagttgctgaacgactgaaccatcacccatgagcaggtaaagtcatttctccttcccactttgagcagctgacaaggacttgtgtggctattcaggtctcaatacagtggtggatctgccagacttccacgtgcgtgttctcgcgaatgttttgtgcacaggcaatcaaagtgcattccttgtctagcacggtcaagccctctaatatgggtgatatcccacccgagacatagtacagataggggatgctttgaccttacaggtatgtcagtgcgtacatagattgactgctatctcgggaacatcagcagcttccatctactatagcaatacaaggccatatttgatgctaacttctgcatcgtgttaccttgcg

SEQ ID NO: 24068 - DNA, 3210 bp, Muscodor strobelii
  misc_feature: SGI cDNA ID NO. 568201
  misc_feature: Encodes the peptide sequence at SEQ ID NO 24069
atggcgcctccagcacctgaccaaggatggactagggaggaggagttggaggaggagttgaggcgtgttaatacgtatttgaatgcggcgaaatttgcacttaagcagaagggtattgagattgaggcgtacaagaaagaaggatgggtcagtaaacgtgccagaagtcgccgagagaggaagatagtcgtcgaggctgatgccgcagcgaaggtacaagaactagacgacgacaaccaatttgtacggaacgagcgtgaaaggctggggttccgggtctcgccagagccgcacgtcgttgttaaggaacggtgggatagggtggatgcccgagagaggctgaacaatctcgttaggaggacgagtaatcagttgcttcttgctgctgccgtgggatatactgccaatggattaccgcctgggttttatgacggggagaagaatgagatgagacactggatggatagactgaggccgaggcggaaccagcgtcagtttcaagctcagggagggccttctcaaggagagggactcgctccaggccaggctgggggaaaggggaaatatatctttgggagaaagtttgggagaggaaagactgcggatattgctggtgttgctggtgttgcgaatatggctactgttaccgaagagcttgtggagaatgatccggattcccatgaggactttggctttgacgatttccccgaggagatccaagagactgcgaagaagatgatgaatgctgcgatggcagcgagcgaggaggaaaaggtcggcgattggattgataagattgcgtctgacttcctcagggcatccgatgaggatacgctggtgaattctgactctgatagcgaggacgacagcgcaagtattgctgcgactgttgcgacttctgcaacctcgtggagttcagcgccatccgttcgttctcagtccactggtccttctgtgcgtcagcgtccgcttccgcctgtacccacccctacgattcgagttcaccctccggcttccgacaccagcccgcctctcagcgatggggacggcggtactactttggtcggttcctcatcctccgatggccttagtggtactactgcagtcgattcgcagcaagactggaccgaccctgttggtgctccagctgatcctatggcggctgctcgtcgatatctacggaatcgtcgacggcagctgaattccgtaccgcctagaagaacaaggggtgttcaacaaggcaacattagtggcgagaactatgataatggactcggaccatccggcagactgccaaatcgacccagacgcccgaatcgaaatatctacgatcccaggaagtggcggatcctcactgaccagaatgacgggcaacgtgttcgaaatgtgccaaatttgacgcaaactaaaatgccacatacctgtatggagaccggttggatcacgtggaaggaacaacagagacgcttcccttccctgaagaggcgtcttcatctccatgatgcttcccccagaggagctgctgtctgggaacccgagagagaccaggtcgaggtttgggaccctatcaataggattgttgcggagcatagcatgggacagagaaaacctatgaagttgaatcccatcaccctacacgctctcgcgagatacgtccccacggatcgtgctgcgaatcattctgtagacccaatacaactccctgataatcccacgacggacaccaagacacgacctatgtcgtcgacacggacctgggctgggagacgcagggtacagaagaagcagaagaagacccagaagaaaggaggcaagaaaactgagaagaaggttaagtttgctgctgcgccgatggctgggttggcattcatgggatatcccgcaccagacaacgctgaatactctcctgagctttcgccttcgaagtcgacaccgcctctgacaccaatggacatcgacagtgctccaccatccccaacagtagcagaagtgcactacccattgaaatcaccgcggacgacatcaatcacatacccctccttaccggaagctggaaccagtttctacgccgctggttcgccgaaaagcccagcagcaccaccgactccgttcgcataccaggcaacgtttcccgatacaccaacggtagctctataccagaacccctttccaggaattcccgagttcccctcaacaccacggagcgcctctagcgatagcgtagaattcgttctcgactccgcgccgaagaaatcagataatccatacacgcccaccactactccctctcgatcacgcacacgcaaacgaccagcaaacctcgacctcgggacctcctacccaacacccacatcccccctatccaaaccccgcaatcccttcggcctcacaggaagcgacagcgaaaaagaaaacagcctatccgtctcccctccttccacctccacaccctcctccaccatcgccaatccaccccgtacagctgttatatcacaatcgcaccccttcgcaccccccacactaccacataacgaataccccctaaccgcatacgacgatgaagaactctccagtcgacatcctgctttgatggcagagtataaggaggcaagggatgaattgcgagtcgtagacaagcaatacagagaagcagctgaattcgggggtgtcgggttaggggtgtataaagagaagtttgagcgtgtggaggacaggtttaaaggcctggaacgcatggtgaagagtgttatttctgaggagacgcagagcaggatcgaggaagtctctaccatcaaagattttgcttatccgacacttcccgtgcttcctactacgattcatctaaatagtggtatgagcgccagtgtgaaggggaagggtgcggactacgattctgtctccgggagtctgggaaaagtgggtagacatctggaacggacacagacgaagacgcagacgcagacgcgtggaagtagggaaatgggggaggagaggatcattagaccgaagagagatagcgctagaatcgttaaggagaaacgggctgagagtaggcagttcgggaagtctgggaagtttgcgaaggagggtgttatgggaaagaagagcgttaggtttgatgaggggccgagcgatgtcatgctcttcgaggcccagcgcgctgtgggacggtatgatgggatgaggaagagaaggggtggtttgaggtag

SEQ ID NO: 24069 - protein, 1069 aa, Muscodor strobelii
  misc_feature: SGI Peptide ID NO. 568201
MAPPAPDQGWTREEELEEELRRVNTYLNAAKFALKQKGIEIEAYKKEGWVSKRARSRRERKIVVEADAAAKVQELDDDNQFVRNERERLGFRVSPEPHVVVKERWDRVDARERLNNLVRRTSNQLLLAAAVGYTANGLPPGFYDGEKNEMRHWMDRLRPRRNQRQFQAQGGPSQGEGLAPGQAGGKGKYIFGRKFGRGKTADIAGVAGVANMATVTEELVENDPDSHEDFGFDDFPEEIQETAKKMMNAAMAASEEEKVGDWIDKIASDFLRASDEDTLVNSDSDSEDDSASIAATVATSATSWSSAPSVRSQSTGPSVRQRPLPPVPTPTIRVHPPASDTSPPLSDGDGGTTLVGSSSSDGLSGTTAVDSQQDWTDPVGAPADPMAAARRYLRNRRRQLNSVPPRRTRGVQQGNISGENYDNGLGPSGRLPNRPRRPNRNIYDPRKWRILTDQNDGQRVRNVPNLTQTKMPHTCMETGWITWKEQQRRFPSLKRRLHLHDASPRGAAVWEPERDQVEVWDPINRIVAEHSMGQRKPMKLNPITLHALARYVPTDRAANHSVDPIQLPDNPTTDTKTRPMSSTRTWAGRRRVQKKQKKTQKKGGKKTEKKVKFAAAPMAGLAFMGYPAPDNAEYSPELSPSKSTPPLTPMDIDSAPPSPTVAEVHYPLKSPRTTSITYPSLPEAGTSFYAAGSPKSPAAPPTPFAYQATFPDTPTVALYQNPFPGIPEFPSTPRSASSDSVEFVLDSAPKKSDNPYTPTTTPSRSRTRKRPANLDLGTSYPTPTSPLSKPRNPFGLTGSDSEKENSLSVSPPSTSTPSSTIANPPRTAVISQSHPFAPPTLPHNEYPLTAYDDEELSSRHPALMAEYKEARDELRVVDKQYREAAEFGGVGLGVYKEKFERVEDRFKGLERMVKSVISEETQSRIEEVSTIKDFAYPTLPVLPTTIHLNSGMSASVKGKGADYDSVSGSLGKVGRHLERTQTKTQTQTRGSREMGEERIIRPKRDSARIVKEKRAESRQFGKSGKFAKEGVMGKKSVRFDEGPSDVMLFEAQRAVGRYDGMRKRRGGLR

SEQ ID NO: 24070 - DNA, 2667 bp, Muscodor strobelii
  misc_feature: SGI cDNA ID NO. 568202
  misc_feature: Encodes the peptide sequence at SEQ ID NO 24071
atgacggcttccctgtcgccggcccaagtcgtcttgctggctgccaacttcgcctccaaatccgacgtccagagcttgaccacactcgcccaacaccactccaacgtcctccgatccgatctcatactgagaatactgctcacctgtctccccgaacgacttccctccagcgactatgcaggcatcatacacgccatagagtccgatactctgcattccgatccccgcccatcctcggaaatcgatgcctcttctatagacgatattaccgaccgcgaggccgccagaaagatcaagaagctgcgcttgataccgttagcatgggatggcgcccctcaagatgcgctggatgatcccgtctctctcttcttgatacaccgcgcccatcgtgttgatcaggagattggagggctcgctgaactgcccagtttgatcgtgcccttcctccgccactcgccctgcatccggacatggatgatatccagtctactgcctttgctgcgtcgcaaccacgaatactaccccgacaatcccatcccttacacgctcgaagccttcgagaatctagacagtggtgtcgcagttgcctcactgctctcgcagactggtgctcgccccgaggacttacggcatgtggggagggacttgcgtgggctgatcggaccatggctgtataacgacgcgagatggaaaggacaatccgatcgtctatcttgtccggcgtgggagcacgtactcgaatggctcacggcacaggcatccacgtcttggaaagtggccgtcagagcgatcgagcagtgggatggtcccagcgatgtcgacctcggcggctatgagtccacctggcttggcgacgacgagcaaggccatctggagcagagatatgctcgggctgccatggcttcagcctatctcatctcagaagcctcgactgatgctctctcgggtgccaatagtattcttaccaagatcatgggtctcatagatctggatccgtgccaaccactacagatagctgcctcgatgctctcccctttcataatccccgacgctgatgatggcggcatattctctcacaggagcgcttctttgctacgtaatgacctgcttagcgaagcaaactacctcaccactcccaacaatcaatccacccagcttctgcatactttactactgagtgccttcattctcaccaaagcgggcacgccttgcactattcggagggcaggagaactggccttcttgcaagacgagcgagagcagaaagctgaggccatgagatttatccgctccctcggctctaacggaccgaagaacgacgataaatactggatacgcgctagaaacgagttgctgtggcttcgagactggggcgctgaggaggcagggttatctggtccccgtgtgcacggcgtcttcaacctgctcaagaaagaattccttgagattgaatgcttaaaatcattcttatcgaacacacgttactctctcgcaaggtccatatacgaagattcgcctgaaaagcccttggacgaagatgcgttgcgagatactgtcgtaactgcagcgatggaagcctatgacaacgcgacaaatcctcaccgtggtcgcggtgggcttctcaaatgtgatgacattattcacgcgtttcctttaaccctgccggagacacactcagcatcgaaacgcattgaagctttgctaaaagcaacacacgctctaggcgaataccgcctcgtactcaaaaagggagagccttttacaccggtcgtattgagagttcacacagaccccatctccatcattggaaaagtgttggaacagaacccgaaaagctatacaaacatacaagacttccttgacattggatctaacatgattgtcgcggatcttcacacgaacgacaagaaaacgcaaccatcaccggcctccaaagggtctgtcgaccagcatacggtcgctcaacgaaggataacagcaatgtgtgtagacgctgcattaaatgaagatgacttcgaaacggcatactcgtacgtcgtcaaccggctatcatcagataacaacgccttccacccagcagacgaatattcctggaaagctgcgctccaggccggcaagtaccggcgcaccaccaagacgatcaggccaacacatatcggcacagcaagcgggaatatggatataagacacttggaacagagaatcgagtgtctatcaacggctctgcgcatggcaccagcagcaacactacaggagatcctcaacgtctttaggaaatgcgaagaggaactcaacgctgccgtagaagccgaggctaagcaggaatcagcatgggacgatcaaggagatctacagaccatgcccggcgcattcagtagcacggtccctgcgggcgtggtcaggagtggggcaagacagtctaggcaggcggaagaagcgcctatgtctctgtttgatctgagtcgagctactatggcgagggcgcagacgaatttgtcggcgctgtcgaaattacagaggagtgagagggatagggaagaggtggagggtgaaccgaggacgaggaagagagatcagctcagggaggctgctgtagggacgctagctagtggggtgggctggttgattggggctcagcctgttgatcggagccaggaccgggaatag

SEQ ID NO: 24071 - protein, 888 aa, Muscodor strobelii
  misc_feature: SGI Peptide ID NO. 568202
  misc_feature (10)..(779): Pfam Id: PF08314 Pfam Desc: Secretory pathway protein Sec39
  misc_feature (1)..(840): NCBI GI: 85099079 Blast Desc: NCU01361 [Neurospora crassa OR74A] gi|28922231|gb|EAA31477.1| NCU01361 [Neurospora crassa OR74A]
  misc_feature (1)..(840): NCBI GI: 7635840 Blast Desc: conserved [Neurospora crassa]
  misc_feature (5)..(881): NCBI GI: 256728469 Blast Desc: NECHADRAFT_50879 [Nectria haematococca mpVI 77-13-4]
  misc_feature (3)..(880): NCBI GI: 46110058 Blast Desc: FG01911.1 [Gibberella zeae PH-1]
  misc_feature (1)..(797): NCBI GI: 171693497 Blast Desc: protein product [Podospora anserina] gi|170946697|emb|CAP73500.1| protein product [Podospora anserina]
  misc_feature (1)..(808): NCBI GI: 261360821 Blast Desc: conserved [Verticillium albo-atrum VaMs.102]
  misc_feature (5)..(884): NCBI GI: 156052190 Blast Desc: SS1G_07504 [Sclerotinia sclerotiorum 1980] gi|154705280|gb|EDO05019.1| SS1G_07504 [Sclerotinia sclerotiorum 1980]
  misc_feature (3)..(881): NCBI GI: 189188338 Blast Desc: conserved [Pyrenophora tritici-repentis Pt-1C-BFP] gi|187972114|gb|EDU39613.1| conserved [Pyrenophora tritici-repentis Pt-1C-BFP]
  misc_feature (3)..(884): NCBI GI: 121702621 Blast Desc: conserved [Aspergillus clavatus NRRL 1] gi|119397718|gb|EAW08149.1| conserved [Aspergillus clavatus NRRL 1]
  misc_feature (1)..(884): NCBI GI: 70990964 Blast Desc: protein transport protein Sec39 [Aspergillus fumigatus Af293] gi|66847963|gb|EAL88293.1| protein transport protein Sec39, [Aspergillus fumigatus Af293]
MTASLSPAQVVLLAANFASKSDVQSLTTLAQHHSNVLRSDLILRILLTCLPERLPSSDYAGIIHAIESDTLHSDPRPSSEIDASSIDDITDREAARKIKKLRLIPLAWDGAPQDALDDPVSLFLIHRAHRVDQEIGGLAELPSLIVPFLRHSPCIRTWMISSLLPLLRRNHEYYPDNPIPYTLEAFENLDSGVAVASLLSQTGARPEDLRHVGRDLRGLIGPWLYNDARWKGQSDRLSCPAWEHVLEWLTAQASTSWKVAVRAIEQWDGPSDVDLGGYESTWLGDDEQGHLEQRYARAAMASAYLISEASTDALSGANSILTKIMGLIDLDPCQPLQIAASMLSPFIIPDADDGGIFSHRSASLLRNDLLSEANYLTTPNNQSTQLLHTLLLSAFILTKAGTPCTIRRAGELAFLQDEREQKAEAMRFIRSLGSNGPKNDDKYWIRARNELLWLRDWGAEEAGLSGPRVHGVFNLLKKEFLEIECLKSFLSNTRYSLARSIYEDSPEKPLDEDALRDTVVTAAMEAYDNATNPHRGRGGLLKCDDIIHAFPLTLPETHSASKRIEALLKATHALGEYRLVLKKGEPFTPVVLRVHTDPISIIGKVLEQNPKSYTNIQDFLDIGSNMIVADLHTNDKKTQPSPASKGSVDQHTVAQRRITAMCVDAALNEDDFETAYSYVVNRLSSDNNAFHPADEYSWKAALQAGKYRRTTKTIRPTHIGTASGNMDIRHLEQRIECLSTALRMAPAATLQEILNVFRKCEEELNAAVEAEAKQESAWDDQGDLQTMPGAFSSTVPAGVVRSGARQSRQAEEAPMSLFDLSRATMARAQTNLSALSKLQRSERDREEVEGEPRTRKRDQLREAAVGTLASGVGWLIGAQPVDRSQDRE

SEQ ID NO: 24072 - DNA, 3004 bp, Muscodor strobelii
  misc_feature: SGI EST ID NO. CUFF.56748.0
  misc_feature: Variant of the nucleotide sequence at SEQ ID NO 24070
cacgtcgaagctatctcgatatgcctgcccctccaaattaatcttgtgaaataaatatactccatttcgccattgatagactcgtgacccatcgctcatacaattccatccataaatgcgcttggctatccagcaatgacggcttccctgtcgccggcccaagtcgtcttgctggctgccaacttcgcctccaaatccgacgtccagagcttgaccacactcgcccaacaccactccaacgtcctccgatccgatctcatactgagaatactgctcacctgtctccccgaacgacttccctccagcgactatgcaggcatcatacacgccatagagtccgatactctgcattccgatccccgcccatcctcggaaatcgatgcctcttctatagacgatattaccgaccgcgaggccgccagaaagatcaagaagctgcgcttgataccgttagcatgggatggcgcccctcaagatgcgctggatgatcccgtctctctcttcttgatacaccgcgcccatcgtgttgatcaggagattggagggctcgctgaactgcccagtttgatcgtgcccttcctccgccactcgccctgcatccggacatggatgatatccagtctactgcctttgctgcgtcgcaaccacgaatactaccccgacaatcccatcccttacacgctcgaagccttcgagaatctagacagtggtgtcgcagttgcctcactgctctcgcagactggtgctcgccccgaggacttacggcatgtggggagggacttgcgtgggctgatcggaccatggctgtataacgacgcgagatggaaaggacaatccgatcgtctatcttgtccggcgtgggagcacgtactcgaatggctcacggcacaggcatccacgtcttggaaagtggccgtcagagcgatcgagcagtgggatggtcccagcgatgtcgacctcggcggctatgagtccacctggcttggcgacgacgagcaaggccatctggagcagagatatgctcgggctgccatggcttcagcctatctcatctcagaagcctcgactgatgctctctcgggtgccaatagtattcttaccaagatcatgggtctcatagatctggatccgtgccaaccactacagatagctgcctcgatgctctcccctttcataatccccgacgctgatgatggcggcatattctctcacaggagcgcttctttgctacgtaatgacctgcttagcgaagcaaactacctcaccactcccaacaatcaatccacccagcttctgcatactttactactgagtgccttcattctcaccaaagcgggcacgccttgcactattcggagggcaggagaactggccttcttgcaagacgagcgagagcagaaagctgaggccatgagatttatccgctccctcggctctaacggaccgaagaacgacgataaatactggatacgcgctagaaacgagttgctgtggcttcgagactggggcgctgaggaggcagggttatctggtccccgtgtgcacggcgtcttcaacctgctcaagaaagaattccttgagattgaatgcttaaaatcattcttatcgaacacacgttactctctcgcaaggtccatatacgaagattcgcctgaaaagcccttggacgaagatgcgttgcgagatactgtcgtaactgcagcgatggaagcctatgacaacgcgacaaatcctcaccgtggtcgcggtgggcttctcaaatgtgatgacattattcacgcgtttcctttaaccctgccggagacacactcagcatcgaaacgcattgaagctttgctaaaagcaacacacgctctaggcgaataccgcctcgtactcaaaaagggagagccttttacaccggtcgtattgagagttcacacagaccccatctccatcattggaaaagtgttggaacagaacccgaaaagctatacaaacatacaagacttccttgacattggatctaacatgattgtcgcggatcttcacacgaacgacaagaaaacgcaaccatcaccggcctccaaagggtctgtcgaccagcatacggtcgctcaacgaaggataacagcaatgtgtgtagacgctgcattaaatgaagatgacttcgaaacggcatactcgtacgtcgtcaaccggctatcatcagataacaacgccttccacccagcagacgaatattcctggaaagctgcgctccaggccggcaagtaccggcgcaccaccaagacgatcaggccaacacatatcggcacagcaagcgggaatatggatataagacacttggaacagagaatcgagtgtctatcaacggctctgcgcatggcaccagcagcaacactacaggagatcctcaacgtctttaggaaatgcgaagaggaactcaacgctgccgtagaagccgaggctaagcaggaatcagcatgggacgatcaaggagatctacagaccatgcccggcgcattcagtagcacggtccctgcgggcgtggtcaggagtggggcaagacagtctaggcaggcggaagaagcgcctatgtctctgtttgatctgagtcgagctactatggcgagggcgcagacgaatttgtcggcgctgtcgaaattacagaggagtgagagggatagggaagaggtggagggtgaaccgaggacgaggaagagagatcagctcagggaggctgctgtagggacgctagctagtggggtgggctggttgattggggctcagcctgttgatcggagccaggaccgggaatagggggatttaatgagggtgtaatgaaaggagatgatgggataatatgatgagggtattggtggtgagatggcgatgcaggtgttggcaatgcgagagtctgctgtgctgccggaggatgcagttcgctaagtagagaagcaattcgctaagtagatgtgacaataatatgaacgagtacttgtggtaggcagagcctcgtcgg

SEQ ID NO: 24073 - DNA, 312 bp, Muscodor strobelii
  misc_feature: SGI cDNA ID NO. 568203
  misc_feature: Encodes the peptide sequence at SEQ ID NO 24074
atggcctctggatacggcttacacggaggccccggccgatgctttcccttctggcaggaggtcctcgcctgctacgtcgtcaacaccaccgccgaggatgactcgggcaagaagaagtgctcccccatgcttgaggactactacgagtgcctgcaccacaagaaggaggctgccagagtagcacagttgcaacatgcctacaggaaagccgaggccgcgtcaccgcgagacaatgccccgacggctggtcagatacggaatctaggcttactggacaaggaggaagataccaagaaggtgctgggccgatga

SEQ ID NO: 24074 - protein, 103 aa, Muscodor strobelii
  misc_feature: SGI Peptide ID NO. 568203
  misc_feature (1)..(103): NCBI GI: 145609319 Blast Desc: MGG_13410 [Magnaporthe grisea 70-15] gi|145016704|gb|EDK01134.1| MGG_13410 [Magnaporthe grisea 70-15]
  misc_feature (1)..(102): NCBI GI: 154312844 Blast Desc: BC1G_05123 [Botryotinia fuckeliana B05.10] gi|150849825|gb|EDN25018.1| BC1G_05123 [Botryotinia fuckeliana B05.10]
  misc_feature (1)..(102): NCBI GI: 116206336 Blast Desc: CHGG_02461 [Chaetomium globosum CBS 148.51] gi|88183058|gb|EAQ90526.1| CHGG_02461 [Chaetomium globosum CBS 148.51]
  misc_feature (1)..(103): NCBI GI: 46110060 Blast Desc: FG01912.1 [Gibberella zeae PH-1]
  misc_feature (1)..(102): NCBI GI: 85099074 Blast Desc: NADH:ubiquinone oxidoreductase 11.5kD subunit [Neurospora crassa OR74A] gi|11544687|emb|CAB88645.2| conserved [Neurospora crassa] gi|28922230|gb|EAA31476.1| NADH:ubiquinone
  misc_feature (1)..(103): NCBI GI: 256728654 Blast Desc: [Nectria haematococca mpVI 77-13-4]
  misc_feature (1)..(102): NCBI GI: 171693499 Blast Desc: protein product [Podospora anserina] gi|170946698|emb|CAP73501.1| protein product [Podospora anserina]
  misc_feature (1)..(102): NCBI GI: 154284688 Blast Desc: [Ajellomyces capsulatus NAm1] gi|150406780|gb|EDN02321.1| [Ajellomyces capsulatus NAm1] gi|240281556|gb|EER45059.1| NADH-ubiquinone oxidoreductase kD
  misc_feature (1)..(102): NCBI GI: 225556695 Blast Desc: NADH-ubiquinone oxidoreductase [Ajellomyces capsulatus G186AR]
  misc_feature (10)..(102): NCBI GI: 156052188 Blast Desc: SS1G_07503 [Sclerotinia sclerotiorum 1980] gi|154705279|gb|EDO05018.1| SS1G_07503 [Sclerotinia sclerotiorum 1980]
MASGYGLHGGPGRCFPFWQEVLACYVVNTTAEDDSGKKKCSPMLEDYYECLHHKKEAARVAQLQHAYRKAEAASPRDNAPTAGQIRNLGLLDKEEDTKKVLGR

SEQ ID NO: 24075 - DNA, 767 bp, Muscodor strobelii
  misc_feature: SGI EST ID NO. CUFF.56964.0
  misc_feature: Variant of the nucleotide sequence at SEQ ID NO 24073
gcccactatagctcagtgcatagccaatgaaacgcagagcataggcaaacacgccctgtcgtgagtgtaacagcacagcgacctctgctccaatatccactcaggtgcatcccaattccaacctccagagcacgacctctgagcactcgacgacgacctcccgagctccaattgagcacctatctgcgcctgtccacatccactcacctgttgccagatcctcttcatcccgccatggcctctggatacggcttacacggaggccccggccgatgctttcccttctggcaggaggtcctcgcctgctacgtcgtcaacaccaccgccgaggatgactcgggcaagaagaagtgctcccccatgcttgaggactactacgagtgcctgcaccacaagaaggaggctgccagagtagcacagttgcaacatgcctacaggaaagccgaggccgcgtcaccgcgagacaatgccccgacggctggtcagatacggaatctaggcttactggacaaggaggaagataccaagaaggtgctgggccgatgatgggatgagccacggacgatcgatcactatataccagcctaccccgaccgataccaacgtgtacatatattagattgggtcaatgcgtagaattgatggcctgggcagtgagaataagaatattccattctgtcaatcggcaattactgctacatactttgtgattagggttttcaagatcctatcacgtatttcaggcaaatgacttgtgacagacgatg

SEQ ID NO: 24076 - DNA, 1758 bp, Muscodor strobelii
  misc_feature: SGI cDNA ID NO. 568204
  misc_feature: Encodes the peptide sequence at SEQ ID NO 24077
atgcctcatttccgaggaattcagatctctgttattgctagcaatgatgctaagcaactgcctgaatatccccatcccgatggctcttctgtccgcctccgaaggatgacggccgctgccgcaggtcaccagactaacatgggccacgaccgaacctccgcgtctccaaccaattccgaaccttatgacccaactcttcagaaaaaggagaacccccgcgtgtctgtttacatttcatccttacccggcgagcaattctggttgcgctatgtaatcgccaagtctccaaccccctcgaagtgcatgttcttcaagatgatcatgaacggccgccatatcacttcgtggggtatcgacaccaaatcccgcaccgcaggcaatgtgatgagagcactgtacgagcccggaggaggtcccggcggcctgcgcgatcctgatggctcgacatatcccggcatcgagacacgctacttccacttcacgaccggcctcacccatttatctgctgctgaagatggtggtctcattgaagtccaagtctttcgatccaaggggcgaaagcgcgttgcccctgtcctcggtgcttaccgaagccaggataagtttggaatcacttctccaagtggaggcctcgtcgacaatcctcaggatgcgacatattacaattattatcttgttgaccccaaggatgagccctatgccacattcctgtttcattacagatccatgaagtggctccagcaactgagtctcattccccagcgaggtcttagcccttcgcctgcgccggtgagccctgtcaccaatgtccgatcaagtaaagtgtcagctaccaagactactacctctccaccgacacagccatttattttctacaatcattccaatcagccatcctctgaggttgacggcagccatgacgacagcgacaaacaactatccagtagaaaagtcagagagcatccggagagtatgtttgaagatcactttcaggacaatttgatggatgctttgcctgagggagcctcaccctcgaactccttgacctacgcggttccaaaaagcgagcagagaaatggatcgctgcagttgtaccgcccgctaccagagattcctcctagatctctttcgcgaccttcatcagcatcgtccttacgctcgaactgcccgtcactgacaccttcgctggcccgctatgtcgaaagcgacgacttcgagaatgaagagattcgtcttagtacggcacaaccattagtcatctcgccgtcgatgcaggcactgcaactaggtgacgataaggacgaggagaattcaggttccgattacgcagattcaccaggctcagtggaaggttgccattcgtcaaaactaccttcgcctgaggattatgtcgccaccacgggcagtactctcgagcgccacatgaatcaattcgattcccatgccgccttttccaccccgactcggggccgaagcaatggtagagcctctctggagccgagttcttccatgctcagtctgactgaggcggaatggctcaagcattctccatcaccaccgtgccagaagaagaaacttacgccgcgccggtggagccctcgcccaggtagcaaatcgcctagatcatcgcgagacatggacatagaggaacgaaatcacgacaggcactcacagatgcggatcattccctcgatcgagcgcgatccctacgagaatgttgatgagaccgaaaatgcacctgttggtaactggatctga

SEQ ID NO: 24077 - protein, 585 aa, Muscodor strobelii
  misc_feature: SGI Peptide ID NO. 568204
  misc_feature (1)..(585): NCBI GI: 85099065 Blast Desc: NCU01358 [Neurospora crassa OR74A] gi|16415993|emb|CAB88646.3| [Neurospora crassa] gi|28922228|gb|EAA31474.1| NCU01358 [Neurospora crassa OR74A]
  misc_feature (1)..(585): NCBI GI: 171693501 Blast Desc: protein product [Podospora anserina] gi|170946699|emb|CAP73502.1| protein product [Podospora anserina]
  misc_feature (1)..(253): NCBI GI: 156052186 Blast Desc: SS1G_07502 [Sclerotinia sclerotiorum 1980] gi|154705278|gb|EDO05017.1| SS1G_07502 [Sclerotinia sclerotiorum 1980]
  misc_feature (1)..(253): NCBI GI: 256728653 Blast Desc: NECHADRAFT_51108 [Nectria haematococca mpVI 77-13-4]
  misc_feature (1)..(254): NCBI GI: 46110062 Blast Desc: FG01913.1 [Gibberella zeae PH-1]
  misc_feature (1)..(233): NCBI GI: 154312846 Blast Desc: BC1G_05124 [Botryotinia fuckeliana B05.10] gi|150849826|gb|EDN25019.1| BC1G_05124 [Botryotinia fuckeliana B05.10]
  misc_feature (85)..(257): NCBI GI: 145609317 Blast Desc: MGG_13409 [Magnaporthe grisea 70-15] gi|145016703|gb|EDK01133.1| MGG_13409 [Magnaporthe grisea 70-15]
  misc_feature (1)..(212): NCBI GI: 261360818 Blast Desc: conserved [Verticillium albo-atrum VaMs.102]
  misc_feature (1)..(205): NCBI GI: 116206334 Blast Desc: CHGG_02460 [Chaetomium globosum CBS 148.51] gi|88183057|gb|EAQ90525.1| CHGG_02460 [Chaetomium globosum CBS 148.51]
  misc_feature (1)..(264): NCBI GI: 169617025 Blast Desc: SNOG_11689 [Phaeosphaeria nodorum SN15] gi|111059613|gb|EAT80733.1| SNOG_11689 [Phaeosphaeria nodorum SN15]
MPHFRGIQISVIASNDAKQLPEYPHPDGSSVRLRRMTAAAAGHQTNMGHDRTSASPTNSEPYDPTLQKKENPRVSVYISSLPGEQFWLRYVIAKSPTPSKCMFFKMIMNGRHITSWGIDTKSRTAGNVMRALYEPGGGPGGLRDPDGSTYPGIETRYFHFTTGLTHLSAAEDGGLIEVQVFRSKGRKRVAPVLGAYRSQDKFGITSPSGGLVDNPQDATYYNYYLVDPKDEPYATFLFHYRSMKWLQQLSLIPQRGLSPSPAPVSPVTNVRSSKVSATKTTTSPPTQPFIFYNHSNQPSSEVDGSHDDSDKQLSSRKVREHPESMFEDHFQDNLMDALPEGASPSNSLTYAVPKSEQRNGSLQLYRPLPEIPPRSLSRPSSASSLRSNCPSLTPSLARYVESDDFENEEIRLSTAQPLVISPSMQALQLGDDKDEENSGSDYADSPGSVEGCHSSKLPSPEDYVATTGSTLERHMNQFDSHAAFSTPTRGRSNGRASLEPSSSMLSLTEAEWLKHSPSPPCQKKKLTPRRWSPRPGSKSPRSSRDMDIEERNHDRHSQMRIIPSIERDPYENVDETENAPVGNWI

SEQ ID NO: 24078 - DNA, 1017 bp, Muscodor strobelii
  misc_feature: SGI EST ID NO. CUFF.56633.0
  misc_feature: Variant of the nucleotide sequence at SEQ ID NO 24076
atcagatctgatgttcacagggccataattaaggtgaaatgtgtcatggctcaaagcctgagatccaagggcattggatttttgtgttcgttcaatctgcctggtgtaccagatcacatgctcgccgtctccagctgacccgtcaatggtcgtttgtatagaaagcaccacccgcctctgacatgacctgacagcgactgcctcaacaagctctcaggctcgctgtcccattgtctttcctcattatatcacggcctttcattcgccgtcttcccccactcctcactcttcctctcaccattcacctctccatctatctcgccgtccacatgttgcaagtcggtgcatttgtttgctgcaaccatccaacatacacggcttatctcgcccaccacagcatcgcggtcaaggttatctcatgattgtgagcggatgactgtctgtgctaccgatacccaacatcgaatatccaacctgacatgctttgtgcgccggtccccgtggcctcacatcatccgtcaacatgcctcatttccgaggaattcagatctctgttattgctagcaatgatgctaagcaactgcctgaatatccccatcccgatggctcttctgtccgcctccgaaggatgacggccgctgccgcaggtcaccagactaacatgggccacgaccgaacctccgcgtctccaaccaattccgaaccttatgacccaactcttcagaaaaaggagaacccccgcgtgtctgtttacatttcatccttacccggcgagcaattctggttgcgctatgtaatcgccaagtctccaaccccctcgaagtgcatgttcttcaagatgatcatgaacggccgccatatcacttcgtggggtatcgacaccaaatcccgcaccgcaggcaatgtgatgagagcactgtacgagcccggaggaggtcccggcggcctgcgcgatcctgatggctcgacatatcccggcatcgagacacgctacttccacttcacgaccggcctcac

SEQ ID NO: 24079 - DNA, 2496 bp, Muscodor strobelii
  misc_feature: SGI cDNA ID NO. 568205
  misc_feature: Encodes the peptide sequence at SEQ ID NO 24080
atgagttccctaaagcagttcatccgcaacgtgcgagccgctaagaccatcgccgacgagcgtgctgtcatccagaaggagagtgccgccatccgagccagctttcgcgaagagagccatgatcataatgtgaggcggaacaatgtcgccaagctgctatacctcttcactctgggcgagagaacacatttcggccagatagaatgcatcaagctcctcgcctcgcctcgcttcgccgacaagcgcctgggtcatctggcaactagtcttctgctggatgagaaccaggaggtgctcaccctcgttaccaactccctcaaaaatgatctcggccactcgaatcagtatgtcgtcggactagctctctgcacactcggcaacatcgcctccgttgaaatgtccagggacctattccccgaaatcgagaccctcatatccaccgccaacccttacatacgccggaaggccgctctctgtgccatgcgcatatgccggaaagtccccgatctgcacgagcactttgttgagaaggcctcgcagttgctgtcagaccggaatcacggtgtggctctctgtggtctcactctcatcaccagcttgtgcgaggccgaggaagaaggggagaccgacgagggtgtcatcgacaacttcaagcaatatgtgccactactggtgaggacgttgaaaggcttggccacctcgggctacgcacctgaacatgacgttaccggcatcaccgatcccttcttgcaggtcaagatcctccgtcttcttcgcgtcctcgtccgtggcgacccagaggggacagagcaaatcaacgacattatcgcacaggtggccactaataccgactcgactaagaatgtcggcaactccattctttacgaagctgtgcgcaccatcctcgacatcgaggctgattccggcttgagagtgcttggcgtcaatatccttggcaaattcctgaccaacagggataacaacattcgatatgttgccctcaacactttgatcaaggtcgttgcaatcgagccaaatgctgttcagcgtcaccgaaacaccatcctcgactgtttacgagaccccgatatcagcataaggagacgtgctcttgatctcagcttcactctcatcaacgagagtaacgttcgtgtgctcattcgcgagctgcttgccttcctcgagggtgccgacaacgagttcaagccgagcatgaccagtcagattggaattgctgccgacaaatattctccaaacaagcggtggcatgtcgacaccatgttacgcgtactttctcttgctggaaattatgtcaaagagcccatcttggcatcatttgtccgcttagtcgccacctcaccagaactccagacatatgccgtacagaaactatacaccaatctaaagaaagacatcacgcaagaaagcttgacgcaatgtggcgcttggtgtatcggagagtatggagactcattactgcgcggcggccagtatgaagaggaagagctcgtgcaagaagtgaaggaacatgaagttattgacttatttacaaccatcttgaacagcagctatgcgaaccaaatcactacagaatatatcgtcacggcactcattaaactcagcacccggttatccgataggtcccaggtggagcgggtacagagattattacagacgcaccaaacgagcttagatgtcgaagtgcagcagcgtgctgttgaatacggtaaccttttcgcctacgaggagatccgccgaggcgtactcgagaagatgccaccaccacagatcaaggaagagtcaagagttcttggtgaggctactaagaagacaaagaaggctggaaaccgcaagtccaagcttattgccaagcccacgaccgatcaagatctgctcgatcttatgggagacaccaccacctcgccgccccttacttcacctacgaacggaggacagagcaacaccgatttgcttgccgacatactcggtggtgacacttccccagtatcgtcgtcttctgcacctcagtcctccaacaccgcatccatcatggacctcttctcccaaggttcagcaccgacaacgcaaagtcctgcgcctccgagctctacaatgggcatgtttggatcacccccgccacaacagcaagccgccgcggcgccaccttcgggactcccatgttatgacaacaatgggctgaacgtgacattgcaattacagcggaatgccgagggtgcgatccaggtcatggcacgattcataaataattcaggtgcccaactttcgaatgtcggtttgcaagctgctgttcccaagactcagaagctacagctcttgagtatatccagttcagacattggtccaggagctgaagcaacccagatgatgaggattctgggaagcaaaggtcctttgagattaatgttacgagtagggtatactcatccctcggctgggcagataatggaccaggtcaaatggacggagccatcatag

SEQ ID NO: 24080 - protein, 831 aa, Muscodor strobelii
  misc_feature: SGI Peptide ID NO. 568205
  misc_feature (20)..(583): Pfam Id: PF01602 Pfam Desc: Adaptin N terminal region
  misc_feature (717)..(831): Pfam Id: PF02883 Pfam Desc: Adaptin C-terminal domain
  misc_feature (1)..(829): NCBI GI: 46110022 Blast Desc: FG01893.1 [Gibberella zeae PH-1]
  misc_feature (1)..(831): NCBI GI: 145605744 Blast Desc: MGG_11801 [Magnaporthe grisea 70-15] gi|145013546|gb|EDJ98187.1| MGG_11801 [Magnaporthe grisea 70-15]
  misc_feature (1)..(831): NCBI GI: 16944429 Blast Desc: gamma-adaptin precursor [Neurospora crassa]
  misc_feature (1)..(829): NCBI GI: 261360816 Blast Desc: AP-1 complex subunit gamma-1 [Verticillium albo-atrum VaMs.102]
  misc_feature (3)..(831): NCBI GI: 256728661 Blast Desc: NECHADRAFT_123234 [Nectria haematococca mpVI 77-13-4]
  misc_feature (3)..(830): NCBI GI: 154302048 Blast Desc: BC1G_10261 [Botryotinia fuckeliana B05.10] gi|150855653|gb|EDN30845.1| BC1G_10261 [Botryotinia fuckeliana B05.10]
  misc_feature (3)..(831): NCBI GI: 171694239 Blast Desc: protein product [Podospora anserina] gi|170947068|emb|CAP73873.1| protein product [Podospora anserina]
  misc_feature (1)..(806): NCBI GI: 156051930 Blast Desc: SS1G_07372 [Sclerotinia sclerotiorum 1980] gi|154705150|gb|EDO04889.1| SS1G_07372 [Sclerotinia sclerotiorum 1980]
  misc_feature (1)..(831): NCBI GI: 164426546 Blast Desc: AP-1 complex subunit gamma-1 [Neurospora crassa OR74A] gi|157071379|gb|EAA32041.2| AP-1 complex subunit gamma-1 [Neurospora crassa OR74A]
  misc_feature (1)..(831): NCBI GI: 189188150 Blast Desc: AP-1 complex subunit gamma-1 [Pyrenophora tritici-repentis Pt-1C-BFP] gi|187972020|gb|EDU39519.1| AP-1 complex subunit gamma-1 [Pyrenophora tritici-repentis Pt-1C-BFP]
MSSLKQFIRNVRAAKTIADERAVIQKESAAIRASFREESHDHNVRRNNVAKLLYLFTLGERTHFGQIECIKLLASPRFADKRLGHLATSLLLDENQEVLTLVTNSLKNDLGHSNQYVVGLALCTLGNIASVEMSRDLFPEIETLISTANPYIRRKAALCAMRICRKVPDLHEHFVEKASQLLSDRNHGVALCGLTLITSLCEAEEEGETDEGVIDNFKQYVPLLVRTLKGLATSGYAPEHDVTGITDPFLQVKILRLLRVLVRGDPEGTEQINDIIAQVATNTDSTKNVGNSILYEAVRTILDIEADSGLRVLGVNILGKFLTNRDNNIRYVALNTLIKVVAIEPNAVQRHRNTILDCLRDPDISIRRRALDLSFTLINESNVRVLIRELLAFLEGADNEFKPSMTSQIGIAADKYSPNKRWHVDTMLRVLSLAGNYVKEPILASFVRLVATSPELQTYAVQKLYTNLKKDITQESLTQCGAWCIGEYGDSLLRGGQYEEEELVQEVKEHEVIDLFTTILNSSYANQITTEYIVTALIKLSTRLSDRSQVERVQRLLQTHQTSLDVEVQQRAVEYGNLFAYEEIRRGVLEKMPPPQIKEESRVLGEATKKTKKAGNRKSKLIAKPTTDQDLLDLMGDTTTSPPLTSPTNGGQSNTDLLADILGGDTSPVSSSSAPQSSNTASIMDLFSQGSAPTTQSPAPPSSTMGMFGSPPPQQQAAAAPPSGLPCYDNNGLNVTLQLQRNAEGAIQVMARFINNSGAQLSNVGLQAAVPKTQKLQLLSISSSDIGPGAEATQMMRILGSKGPLRLMLRVGYTHPSAGQIMDQVKWTEPS

SEQ ID NO: 24081 - DNA, 3062 bp, Muscodor strobelii
  misc_feature: SGI EST ID NO. CUFF.57045.1
  misc_feature: Variant of the nucleotide sequence at SEQ ID NO 24079
atcaccacagctttattagactggaccactgcccccttcttgcggctgcgaatgtcatgatattgtacgattgagcgacttcgctttgggcaatcatcggctcaacactatttacagccttctcatcgaattgtcagctaatccgcagccatatcgaaacttaggccgacacaactctggtcatccattcgcaagcggcccgcctgagggcccgaccctgccaccatgagttccctaaagcagttcatccgcaacgtgcgagccgctaagaccatcgccgacgagcgtgctgtcatccagaaggagagtgccgccatccgagccagctttcgcgaagagagccatgatcataatgtgaggcggaacaatgtcgccaagctgctatacctcttcactctgggcgagagaacacatttcggccagatagaatgcatcaagctcctcgcctcgcctcgcttcgccgacaagcgcctgggtcatctggcaactagtcttctgctggatgagaaccaggaggtgctcaccctcgttaccaactccctcaaaaatgatctcggccactcgaatcagtatgtcgtcggactagctctctgcacactcggcaacatcgcctccgttgaaatgtccagggacctattccccgaaatcgagaccctcatatccaccgccaacccttacatacgccggaaggccgctctctgtgccatgcgcatatgccggaaagtccccgatctgcacgagcactttgttgagaaggcctcgcagttgctgtcagaccggaatcacggtgtggctctctgtggtctcactctcatcaccagcttgtgcgaggccgaggaagaaggggagaccgacgagggtgtcatcgacaacttcaagcaatatgtgccactactggtgaggacgttgaaaggcttggccacctcgggctacgcacctgaacatgacgttaccggcatcaccgatcccttcttgcaggtcaagatcctccgtcttcttcgcgtcctcgtccgtggcgacccagaggggacagagcaaatcaacgacattatcgcacaggtggccactaataccgactcgactaagaatgtcggcaactccattctttacgaagctgtgcgcaccatcctcgacatcgaggctgattccggcttgagagtgcttggcgtcaatatccttggcaaattcctgaccaacagggataacaacattcgatatgttgccctcaacactttgatcaaggtcgttgcaatcgagccaaatgctgttcagcgtcaccgaaacaccatcctcgactgtttacgagaccccgatatcagcataaggagacgtgctcttgatctcagcttcactctcatcaacgagagtaacgttcgtgtgctcattcgcgagctgcttgccttcctcgagggtgccgacaacgagttcaagccgagcatgaccagtcagattggaattgctgccgacaaatattctccaaacaagcggtggcatgtcgacaccatgttacgcgtactttctcttgctggaaattatgtcaaagagcccatcttggcatcatttgtccgcttagtcgccacctcaccagaactccagacatatgccgtacagaaactatacaccaatctaaagaaagacatcacgcaagaaagcttgacgcaatgtggcgcttggtgtatcggagagtatggagactcattactgcgcggcggccagtatgaagaggaagagctcgtgcaagaagtgaaggaacatgaagttattgacttatttacaaccatcttgaacagcagctatgcgaaccaaatcactacagaatatatcgtcacggcactcattaaactcagcacccggttatccgataggtcccaggtggagcgggtacagagattattacagacgcaccaaacgagcttagatgtcgaagtgcagcagcgtgctgttgaatacggtaaccttttcgcctacgaggagatccgccgaggcgtactcgagaagatgccaccaccacagatcaaggaagagtcaagagttcttggtgaggctactaagaagacaaagaaggctggaaaccgcaagtccaagcttattgccaagcccacgaccgatcaagatctgctcgatcttatgggagacaccaccacctcgccgccccttacttcacctacgaacggaggacagagcaacaccgatttgcttgccgacatactcggtggtgacacttccccagtatcgtcgtcttctgcacctcagtcctccaacaccgcatccatcatggacctcttctcccaaggttcagcaccgacaacgcaaagtcctgcgcctccgagctctacaatgggcatgtttggatcacccccgccacaacagcaagccgccgcggcgccaccttcgggactcccatgttatgacaacaatgggctgaacgtgacattgcaattacagcggaatgccgagggtgcgatccaggtcatggcacgattcataaataattcaggtgcccaactttcgaatgtcggtttgcaagctgctgttcccaagactcagaagctacagctcttgagtatatccagttcagacattggtccaggagctgaagcaacccagatgatgaggattctgggaagcaaaggtcctttgagattaatgttacgagtagggtatactcatccctcggctgggcagataatggaccaggtcaaatggacggagccatcatagatcacgcaaataggtgtgcgcatcgaaaggcgagccgatagtcctcggctcagtcgttagccatgagttctgagcatcctcttgcgcctatagctcatgtacttaaaaaggcttgagacatagccactatgcataccttgaactcgctcagcaggatatatcaagatatatgtaggcaagggtggcgaaaatggaacggatagagatgagataaatccaaaacatttcatgttcagatgaaatgagctataacggctcctagtctttgggcatctatgaggcttattgcccaacattccctcgtctagacattataatggattgtagaaagacaatgtgaa

SEQ ID NO: 24082 - DNA, 924 bp, Muscodor strobelii
  misc_feature: SGI cDNA ID NO. 568206
  misc_feature: Encodes the peptide sequence at SEQ ID NO 24083
atgccatctctccgagcgctcctcgcttacgcgagcaatttcctctcgcccatcccatttctaggcgacctatccacaactctatcaggaaaccttccctcgcaagcagattcacagcatttcccgccctcaaccgactcagattatacccaacatcccatcatcagcgacttcataacgccctacgatcctctaagcggtgccccgacatgtccactcgacgggcccgtatcttgtaacaaccagactgcagccgatgcctgctgcttcatatatcccgggggcagactactgctgacgcaattctgggacgaagagatccatgtcggtggcggagaggaagactggacgttacatggtctttggcccgatctatgcgatggatcgtatgatcagtattgtggcatggcgccgcggtttaataatatttcggccgtgttgaaacattatgggcaggaggaacttattgattttatgaatcggtattgggttgctaattacggaacaaacgaacacctatgggctcacgaatacaacaagcacgcaacttgtatcaacacactcgcaccatcctgttacgacgagtcatacaagcccggggtagaagtagtagactatttcgtgcgcgccttcggtctcttccggatgctagacacataccgcgcactcgaacaagccggcatcgaaccggattcctccaaaacgtacgcactatctgatatccaggaaacgctcgagaaattcagcggtggccgcgtcatcctcaagtgttctcgaggcggcgcgctgcatgaggcttggtatgtgtactttgttaaggggagcttgcagagtggtgagttcgtcccggctagggatagctttaagggtgatcatgggaattgtccgaaggaggttaggtatttacctaagaggaggaagtaa

SEQ ID NO: 24083 - protein, 307 aa, Muscodor strobelii
  misc_feature: SGI Peptide ID NO. 568206
  misc_feature (85)..(290): Pfam Id: PF00445 Pfam Desc: Ribonuclease T2 family
  misc_feature (85)..(265): Pfam Id: PF00445 Pfam Desc: Ribonuclease T2 family
  misc_feature (2)..(305): NCBI GI: 171692463 Blast Desc: protein product [Podospora anserina] gi|170946180|emb|CAP72981.1| protein product [Podospora anserina]
  misc_feature (3)..(307): NCBI GI: 39940860 Blast Desc: MGG_05342 [Magnaporthe grisea 70-15] gi|145021970|gb|EDK05990.1| MGG_05342 [Magnaporthe grisea 70-15]
  misc_feature (3)..(304): NCBI GI: 261360863 Blast Desc: ribonuclease T2 [Verticillium albo-atrum VaMs.102]
  misc_feature (63)..(307): NCBI GI: 258565717 Blast Desc: ribonuclease Trv [Uncinocarpus reesii 1704] gi|237907304|gb|EEP81705.1| ribonuclease Trv [Uncinocarpus reesii 1704]
  misc_feature (71)..(304): NCBI GI: 240111069 Blast Desc: Ribonuclease Trv , [Coccidioides posadasii C735 delta SOWgp]
  misc_feature (70)..(304): NCBI GI: 119494409 Blast Desc: ribonuclease T2, [Neosartorya fischeri NRRL 181] gi|119412262|gb|EAW22203.1| ribonuclease T2, [Neosartorya fischeri NRRL 181]
  misc_feature (70)..(283): NCBI GI: 159131762 Blast Desc: ribonuclease T2, [Aspergillus fumigatus A1163]
  misc_feature (70)..(283): NCBI GI: 70996544 Blast Desc: ribonuclease T2 [Aspergillus fumigatus Af293] gi|66850662|gb|EAL90989.1| ribonuclease T2, [Aspergillus fumigatus Af293]
  misc_feature (70)..(285): NCBI GI: 115397457 Blast Desc: ribonuclease T2 precursor [Aspergillus terreus NIH2624] gi|114192511|gb|EAU34211.1| ribonuclease T2 precursor [Aspergillus terreus NIH2624]
  misc_feature (71)..(304): NCBI GI: 256730151 Blast Desc: NECHADRAFT_45551 [Nectria haematococca mpVI 77-13-4]
  misc_feature (69)..(307): SWISSPROT Homolog: EC 3.1.27.1 Ribonuclease T(2)
MPSLRALLAYASNFLSPIPFLGDLSTTLSGNLPSQADSQHFPPSTDSDYTQHPIISDFITPYDPLSGAPTCPLDGPVSCNNQTAADACCFIYPGGRLLLTQFWDEEIHVGGGEEDWTLHGLWPDLCDGSYDQYCGMAPRFNNISAVLKHYGQEELIDFMNRYWVANYGTNEHLWAHEYNKHATCINTLAPSCYDESYKPGVEVVDYFVRAFGLFRMLDTYRALEQAGIEPDSSKTYALSDIQETLEKFSGGRVILKCSRGGALHEAWYVYFVKGSLQSGEFVPARDSFKGDHGNCPKEVRYLPKRRK

SEQ ID NO: 24084 - DNA, 1322 bp, Muscodor strobelii
  misc_feature: SGI EST ID NO. CUFF.56664.0
  misc_feature: Variant of the nucleotide sequence at SEQ ID NO 24082
cgcgcatgacctcctgtcgtcagcttccttcaacctaactttgcttctctcttgcaatttacatctttcattatcctttctctatggatttggcagtttgattacaaagatagacattgaactgaacgacgggaagctcgtcgttagcttcaactaccgacgatatccgccgtttagatacccagacgtacaaccgcaaccggtgtaatactctcgaaatgccatctctccgagcgctcctcgcttacgcgagcaatttcctctcgcccatcccatttctaggcgacctatccacaactctatcaggaaaccttccctcgcaagcagattcacagcatttcccgccctcaaccgactcagattatacccaacatcccatcatcagcgacttcataacgccctacgatcctctaagcggtgccccgacatgtccactcgacgggcccgtatcttgtaacaaccagactgcagccgatgcctgctgcttcatatatcccgggggcagactactgctgacgcaattctgggacgaagagatccatgtcggtggcggagaggaagactggacgttacatggtctttggcccgatctatgcgatggatcgtatgatcagtattgtggcatggcgccgcggtttaataatatttcggccgtgttgaaacattatgggcaggaggaacttattgattttatgaatcggtattgggttgctaattacggaacaaacgaacacctatgggctcacgaatacaacaagcacgcaacttgtatcaacacactcgcaccatcctgttacgacgagtcatacaagcccggggtagaagtagtagactatttcgtgcgcgccttcggtctcttccggatgctagacacataccgcgcactcgaacaagccggcatcgaaccggattcctccaaaacgtacgcactatctgatatccaggaaacgctcgagaaattcagcggtggccgcgtcatcctcaagtgttctcgaggcggcgcgctgcatgaggcttggtatgtgtactttgttaaggggagcttgcagagtggtgagttcgtcccggctagggatagctttaagggtgatcatgggaattgtccgaaggaggttaggtatttacctaagaggaggaagtaagaaattggttagttgggttgtatagtaattgacttgtttggtacgatatttgtcgtgacttgacatgtatgattcaccacggtatcacacacgttgcctgaacttacaggaggaggataggatgggtacgcatttcgaataaagagaacacacacattgaatataagacttcaacataac

SEQ ID NO: 24085 - DNA, 870 bp, Muscodor strobelii
  misc_feature: SGI cDNA ID NO. 568207
  misc_feature: Encodes the peptide sequence at SEQ ID NO 24086
atggaccgattaccgacggcggagacagggccaaaacgatctcatgactcgaggaagctaccgccattaccgattttagtctctcagcggaagtgggatatcgcaaagctcgcccttcgatgtcttagcttgacgctctgcgtcgtagagctggccgagctcattgccctcgttacctcgtccaatagcgtacaatatgatgcatctgaggcgctcccagcaactgcggtcactatattctgggatgtgcttgagttggtcgttatattcgtacggcgcgacatatcgaatggcattcacccaggagcacatgtaggcgtcgagctcatattctggattgggtatgtcgctacgatcgccctcatagcgaccactgccggttggggtgatttaatcgcgagccccgattatctgatgtatcaggaaatatatgcctggactgaagttgccctgacttcatttgtgttcctcgttcttatatggttgatacgcttcatcttctttgtgcgggcctgcgtagaggtggaccggcggaagaaagatcggagggtaatggaactcgtgctcgcgatccaggaacaaggccgcaacccgcaagactaccccttaaagacatttaccaaggcgcgagacctagactacgcctcgtcatcaagaatgctgacggcactgtcggggacgtcgacacagaacacacagcggtcaaatggaacgctacaaagacctcgatctgcaccggaaagcgcgcggaatcgtgaattcgaacataaatataatcttcccctgactgtgccggaactaatggaatctggagtccacccggaggatgcacggaaccagaaggtcttgatcggggcatttccgagatag

SEQ ID NO: 24086 - protein, 289 aa, Muscodor strobelii
  misc_feature: SGI Peptide ID NO. 568207
  misc_feature (25)..(183): NCBI GI: 261352923 Blast Desc: VDBG_01460 [Verticillium albo-atrum VaMs.102]
  misc_feature (30)..(183): NCBI GI: 46116312 Blast Desc: FG03998.1 [Gibberella zeae PH-1]
  misc_feature (24)..(185): NCBI GI: 171677774 Blast Desc: protein product [Podospora anserina] gi|170936955|emb|CAP61614.1| protein product [Podospora anserina]
  misc_feature (22)..(184): NCBI GI: 85082505 Blast Desc: NCU04518 [Neurospora crassa OR74A] gi|28918010|gb|EAA27693.1| NCU04518 [Neurospora crassa OR74A]
  misc_feature (24)..(190): NCBI GI: 256723132 Blast Desc: NECHADRAFT_94095 [Nectria haematococca mpVI 77-13-4]
  misc_feature (72)..(194): NCBI GI: 145611794 Blast Desc: [Magnaporthe grisea 70-15] gi|145019044|gb|EDK03323.1| [Magnaporthe grisea 70-15]
  misc_feature (17)..(198): NCBI GI: 171678143 Blast Desc: protein product [Podospora anserina] gi|170937141|emb|CAP61798.1| protein product [Podospora anserina]
  misc_feature (36)..(139): NCBI GI: 116201393 Blast Desc: [Chaetomium globosum CBS 148.51] gi|88177099|gb|EAQ84567.1| [Chaetomium globosum CBS 148.51]
MDRLPTAETGPKRSHDSRKLPPLPILVSQRKWDIAKLALRCLSLTLCVVELAELIALVTSSNSVQYDASEALPATAVTIFWDVLELVVIFVRRDISNGIHPGAHVGVELIFWIGYVATIALIATTAGWGDLIASPDYLMYQEIYAWTEVALTSFVFLVLIWLIRFIFFVRACVEVDRRKKDRRVMELVLAIQEQGRNPQDYPLKTFTKARDLDYASSSRMLTALSGTSTQNTQRSNGTLQRPRSAPESARNREFEHKYNLPLTVPELMESGVHPEDARNQKVLIGAFPR

SEQ ID NO: 24087 - DNA, 1852 bp, Muscodor strobelii
  misc_feature: SGI EST ID NO. CUFF.56808.1
  misc_feature: Variant of the nucleotide sequence at SEQ ID NO 24085
cggcatagcacccctgacgttttttgaggctgtggagacggatctcaccatgggcccacgggtgccgaacgtgccaacttcgccaacagtttcgttttctaccaagtcatcatcgtcattctgattgccgtaacgactttcgcgtaatcatcagcgaaacgaaacgaaataatcatctagagtatcctaaaagagccaaacaagaccatacgatcgacttagatatcacaaaacgggtggtaccgtgttggactatcgaataggcatccacgaaagcgaacctcgatcgataagcaacgagtttgaagaggatattgaaggacgccaacgagctgattaaagtatttgccatcgacgaacccgtgtagcagggtatcaatcagatgtgccgtgagaacggcgtgtagcacgcgacataccagtgaaaaccaaataccagtcaagccactctttgacgagcggattttgcggccgactacgatccacacgccgtcgaggccgtttggccttgaccagatcttcgccatatctgccacctagtgccacgtgcctgcgaacgattttcatgcatcatggaccgattaccgacggcggagacagggccaaaacgatctcatgactcgaggaagctaccgccattaccgattttagtctctcagcggaagtgggatatcgcaaagctcgcccttcgatgtcttagcttgacgctctgcgtcgtagagctggccgagctcattgccctcgttacctcgtccaatagcgtacaatatgatgcatctgaggcgctcccagcaactgcggtcactatattctgggatgtgcttgagttggtcgttatattcgtacggcgcgacatatcgaatggcattcacccaggagcacatgtaggcgtcgagctcatattctggattgggtatgtcgctacgatcgccctcatagcgaccactgccggttggggtgatttaatcgcgagccccgattatctgatgtatcaggaaatatatgcctggactgaagttgccctgacttcatttgtgttcctcgttcttatatggttgatacgcttcatcttctttgtgcgggcctgcgtagaggtggaccggcggaagaaagatcggagggtaatggaactcgtgctcgcgatccaggaacaaggccgcaacccgcaagactaccccttaaagacatttaccaaggcgcgagacctagactacgcctcgtcatcaagaatgctgacggcactgtcggggacgtcgacacagaacacacagcggtcaaatggaacgctacaaagacctcgatctgcaccggaaagcgcgcggaatcgtgaattcgaacataaatataatcttcccctgactgtgccggaactaatggaatctggagtccacccggaggatgcacggaaccagaaggtcttgatcggggcatttccgagatagcattgggaacggttggaatttatgttgatgtccagcgcatcagactatgacacttgaacgctttacagattacagatttataatattagatacccacatacccagcttgtaggcaacacatgagacattcgatcctttcttccattgcttgttccctcggcttcctactcctcacgacagtaagcggcgtaccacttcgaagcttcgacaccaggtgacgttggatatgtaaagctagatgcaaagagctcagatagacattactgataacgtaattgaccaagtttacttctgagtctacatcaggagctttctttctcgccgagacttgattgacctagagaaaatctggttagaccggacgaactacatcatccttcaaaggcacgcattaatccgtcatacgcgac

SEQ ID NO: 24088 - DNA, 1428 bp, Muscodor strobelii
  misc_feature: SGI cDNA ID NO. 568208
  misc_feature: Reduced expression when VOC is produced
  misc_feature: Encodes the peptide sequence at SEQ ID NO 24089
atgtttttcgtgcggtttcttgtgttagcttcgagcgccgttcttgcgcaaacgctcccggggagtactgtatgttcccgaattgctaataacatcaccggcggtgtttattacccattgagtgttaactacatcgccgataatcactattactactttcagtcatcatctaataccccaacgtgcattgttgaggcagccagtccacaagatgtgtcaaacgccatgaaaatcattggttcgactcgcacgcctttcgcagtgaagtctggcggacatgcatcaaaccctgggttctccagtacttcaggtgtacagatctctctcgtccggatgaagcagattgtcttgggtgctgataataagacggtagaagttggaatgggaactatctggaccgatgtctacgaagcattggaaggttctggtgtcaatgtcgtgggaggcagagtcggtggtcctggaaccggcggcttcactttgggcggcggttactcttggaaaactcaacaatttggtctcactagcgacacagtacgagcattcaacatcgtccttcccaacggtaccattaccacagcagattcttctacaccggatttattctttgctctcaaaggcggactgaatcgtttcgggatcgtcacaagcatcgtctacgagacacatccccaagtacccatggtatacggcggtatacaagtattgagtggtatcgagactccgaaactcattgaagcgacagcggtgttccaacaacagaatacggatcccaaagcacaagtcatatcaacaattaatgggggtactatcccaaccgctcttgtcctctatttcttcgacggcccagagcgacccgcctccttcgatccattcaataacatcaccgccttgatcgatacagtcgcctctcaaacctacggctcgtttgcagagtccatcccttcccagatcgtggctggtgctggtcgtggcgcatttaccaccatgatgaccaccgggctgactccaggtttcctcaatgccgtgtacaatgagagtctctactggggaacactcgcagccgctcatgccggtgtgctactgtcctacgacgtcgaacctttcaaaggctacgggcagtacgcaaccgattcggcgttcccacatgctgactctccgttgccactgaacttgtattacttctgggagctggaggcagaagactcttactggcgtggggttatgcagcagagcattgacgccctagctgaggttgcgaagcaggagggcatatacactgatgccccggtataccccaattatgctctggacacctactcgagtgagcaaatatatggagcgacaaacgccgccaggttgagagccatcaaggccgcatatgaccctgaaggtgtgatgcaactcactggaggcttttctctttga

SEQ ID NO: 24089 - protein, 475 aa, Muscodor strobelii
  misc_feature: SGI Peptide ID NO. 568208
  misc_feature (60)..(195): Pfam Id: PF01565 Pfam Desc: FAD binding domain
  misc_feature (446)..(466): Pfam Id: PF08031 Pfam Desc: Berberine and berberine like
  misc_feature (1)..(475): NCBI GI: 154309175 Blast Desc: BC1G_07482 [Botryotinia fuckeliana B05.10] gi|150852525|gb|EDN27717.1| BC1G_07482 [Botryotinia fuckeliana B05.10]
  misc_feature (17)..(475): NCBI GI: 156049875 Blast Desc: SS1G_08645 [Sclerotinia sclerotiorum 1980] gi|154693043|gb|EDN92781.1| SS1G_08645 [Sclerotinia sclerotiorum 1980]
  misc_feature (16)..(475): NCBI GI: 171681032 Blast Desc: protein product [Podospora anserina] gi|170940474|emb|CAP65702.1| protein product [Podospora anserina]
  misc_feature (24)..(475): NCBI GI: 85091792 Blast Desc: NCU09165 [Neurospora crassa OR74A] gi|28920473|gb|EAA29839.1| [Neurospora crassa OR74A]
  misc_feature (3)..(472): NCBI GI: 116191403 Blast Desc: CHGG_05419 [Chaetomium globosum CBS 148.51] gi|88181332|gb|EAQ88800.1| CHGG_05419 [Chaetomium globosum CBS 148.51]
  misc_feature (36)..(475): NCBI GI: 71009684 Blast Desc: UM02157.1 [Ustilago maydis 521] gi|46098046|gb|EAK83279.1| UM02157.1 [Ustilago maydis 521]
  misc_feature (52)..(475): NCBI GI: 242207895 Blast Desc: FAD dependent oxidoreductase [Postia placenta Mad-698-R] gi|220731220|gb|EED85067.1| FAD dependent oxidoreductase [Postia placenta Mad-698-R]
  misc_feature (49)..(475): NCBI GI: 169861794 Blast Desc: CC1G_01443 [Coprinopsis cinerea okayama7#130] gi|116501552|gb|EAU84447.1| CC1G_01443 [Coprinopsis cinerea okayama7#130]
  misc_feature (46)..(475): NCBI GI: 242220841 Blast Desc: [Postia placenta Mad-698-R] gi|220724597|gb|EED78628.1| [Postia placenta Mad-698-R]
  misc_feature (76)..(475): NCBI GI: 242221455 Blast Desc: [Postia placenta Mad-698-R] gi|220724274|gb|EED78329.1| [Postia placenta Mad-698-R]
  misc_feature: Useful for introducing or modulating the production of volatile compounds
MFFVRFLVLASSAVLAQTLPGSTVCSRIANNITGGVYYPLSVNYIADNHYYYFQSSSNTPTCIVEAASPQDVSNAMKIIGSTRTPFAVKSGGHASNPGFSSTSGVQISLVRMKQIVLGADNKTVEVGMGTIWTDVYEALEGSGVNVVGGRVGGPGTGGFTLGGGYSWKTQQFGLTSDTVRAFNIVLPNGTITTADSSTPDLFFALKGGLNRFGIVTSIVYETHPQVPMVYGGIQVLSGIETPKLIEATAVFQQQNTDPKAQVISTINGGTIPTALVLYFFDGPERPASFDPFNNITALIDTVASQTYGSFAESIPSQIVAGAGRGAFTTMMTTGLTPGFLNAVYNESLYWGTLAAAHAGVLLSYDVEPFKGYGQYATDSAFPHADSPLPLNLYYFWELEAEDSYWRGVMQQSIDALAEVAKQEGIYTDAPVYPNYALDTYSSEQIYGATNAARLRAIKAAYDPEGVMQLTGGFSL

SEQ ID NO: 24090 - DNA, 1854 bp, Muscodor strobelii
  misc_feature: SGI EST ID NO. CUFF.56672.0
  misc_feature: Variant of the nucleotide sequence at SEQ ID NO 24088
cccagatggtcctggagattagagaatgtttctttgcaaaagctccaagaatgtttttcgtgcggtttcttgtgttagcttcgagcgccgttcttgcgcaaacgctcccggggagtactgtatgttcccgaattgctaataacatcaccggcggtgtttattacccattgagtgttaactacatcgccgataatcactattactactttcagtcatcatctaataccccaacgtgcattgttgaggcagccagtccacaagatgtgtcaaacgccatgaaaatcattggttcgactcgcacgcctttcgcagtgaagtctggcggacatgcatcaaaccctgggttctccagtacttcaggtgtacagatctctctcgtccggatgaagcagattgtcttgggtgctgataataagacggtagaagttggaatgggaactatctggaccgatgtctacgaagcattggaaggttctggtgtcaatgtcgtgggaggcagagtcggtggtcctggaaccggcggcttcactttgggcggcggttactcttggaaaactcaacaatttggtctcactagcgacacagtacgagcattcaacatcgtccttcccaacggtaccattaccacagcagattcttctacaccggatttattctttgctctcaaaggcggactgaatcgtttcgggatcgtcacaagcatcgtctacgagacacatccccaagtacccatggtatacggcggtatacaagtattgagtggtatcgagactccgaaactcattgaagcgacagcggtgttccaacaacagaatacggatcccaaagcacaagtcatatcaacaattaatgggggtactatcccaaccgctcttgtcctctatttcttcgacggcccagagcgacccgcctccttcgatccattcaataacatcaccgccttgatcgatacagtcgcctctcaaacctacggctcgtttgcagagtccatcccttcccagatcgtggctggtgctggtcgtggcgcatttaccaccatgatgaccaccgggctgactccaggtttcctcaatgccgtgtacaatgagagtctctactggggaacactcgcagccgctcatgccggtgtgctactgtcctacgacgtcgaacctttcaaaggctacgggcagtacgcaaccgattcggcgttcccacatgctgactctccgttgccactgaacttgtattacttctgggagctggaggcagaagactcttactggcgtggggttatgcagcagagcattgacgccctagctgaggttgcgaagcaggagggcatatacactgatgccccggtataccccaattatgctctggacacctactcgagtgagcaaatatatggagcgacaaacgccgccaggttgagagccatcaaggccgcatatgaccctgaaggtgtgatgcaactcactggaggcttttctctttgaggcctcacttggagacttggtactttgtaggcatgaggagctcaccaagtgaacctcaaggctgcccaaggagttgccagcgctagctgtgaaagttcaagtgcaagtgtcgtatatacgcaccactatgattggtcatcccacgaaagaagggtataatctaagcttctagatctacagtccttagcgattatgttttcctataacaagataaaagctagttcaacaaactttgaatatttgtcgcctttggatgatcgcgagagctccgagtaagtttatggtcgttagtcactctcccatatctccgacaagcaattggcgtcaataccagtgatagccgaacacgattttttgaatggtcatgagatctgct

SEQ ID NO: 24091 - DNA, 1800 bp, Muscodor strobelii
  misc_feature: SGI cDNA ID NO. 568209
  misc_feature: Encodes the peptide sequence at SEQ ID NO 24092
atgtggaacccgctcgccgcatttcagagaggctgtgaaagcctggttagctgtatggggagtctggaggaaagaatcaatcggtccactttcggtcgagtcttccgtctagatggctcgggtcatccaaaaactattcgaggcgctacattcttcacagagcttcgcgccggcatgacaacctttgccacgatggcctacataattgctgtcaattccgcggttcttatggactcaggaggcacttgcgtatgcccacccgggtcaaagccgggctgcccggaggatccagactatattctgtgtctgacaggtctgaagcacgacctcatcacagcgacctcagctcttgcaggtctctcgagtattgctttcggattcttgaccaatctccctgttgctcttggaccgggtatgggtctgaacgcgtatttcacctatcaggttgttggttggcatgctaccggctccgtaccttatcgcattgcattgaccgccatcttcgtggaggggttcatcttcatgtttttagcactgaccggaatgcgacaatggttggtccgcatgatacccgcaacaatcaagacagcttgcggagttggtattggactctttctcaccgagataggcttgtcgtactctgcaggtataggtgcaattaccggaggatacacaacaccgctggcgattggaggatgcccatccgagaagctgaacgagtcccaggaatgcactggagacatcatgtcgaaccccgccatgtggatagggatcttcatcggaggtatcttcgtggcgttcttgatggcgttcaaggtgaaaagcgcaatcgtcataggcatcgggctcgtatcgattctgtcctggccgcgcaatactccatttacatatttcccctatacacctaacggcgaggccagatacgatttcttcagccaggtgatcgccttccatccaatcgagtctaccctgggtgtccaacagtggaacctaggaggggcgagcggaacgcaattcgctcttgcgctggtcaccttcctctatgtcgatatcattgattgcacagccactttatattccatggccaagttctgtggtgttgttgatgaaactggcgatttccctcgttctactatcgcgtattgcactgacgccgcatgcatctctatcggttcactcttaggatgttcgccggttacctgctttatcgagagcggtgcaggcattgcccagggcggacgaactggattaacagcaatctcagctggcgtatgcttcctcctcagccttttctttgccccgattctcgcttctgtacctccttgggcaacaggtgcgacgctgattcttgttggttgtttgatgatccgccaagtcaccaacatcaactggaactatatcggtgacgccgtcccatcctttgtaacactggctttcatgccatttagttacagcgtagcatacggacttatcgcaggcatgatggtttacatcgtcttgaacactatgatatgggccgtggtcaagtttacaggtgaaaaagtaacaccgtctaattggcacgagaaggaggtatatcacttcggtttcggcgctcgagacgtcccgaaatggatccgtctgctgtaccgcaaaatgggtggcggaaatgtcaccgaggttgtccggaaagatggtatagagctggtggactgcgacagcaccataaatcacaactcgcgaagtgcctcggctgagggcaaggggattcaagtaatggcaacgccaacgcgcccacattatctcccttctctcgactga

SEQ ID NO: 24092 - protein, 599 aa, Muscodor strobelii
  misc_feature: SGI Peptide ID NO. 568209
  misc_feature (52)..(492): Pfam Id: PF00860 Pfam Desc: Permease family
  misc_feature (390)..(456): Pfam Id: PF00860 Pfam Desc: Permease family
  misc_feature (118)..(219): Pfam Id: PF00860 Pfam Desc: Permease family
  misc_feature (14)..(572): NCBI GI: 156051700 Blast Desc: SS1G_07257 [Sclerotinia sclerotiorum 1980] gi|154705035|gb|EDO04774.1| SS1G_07257 [Sclerotinia sclerotiorum 1980]
  misc_feature (37)..(572): NCBI GI: 154312676 Blast Desc: BC1G_05039 [Botryotinia fuckeliana B05.10] gi|150849741|gb|EDN24934.1| BC1G_05039 [Botryotinia fuckeliana B05.10]
  misc_feature (24)..(589): NCBI GI: 116198281 Blast Desc: CHGG_07296 [Chaetomium globosum CBS 148.51] gi|88178575|gb|EAQ86043.1| CHGG_07296 [Chaetomium globosum CBS 148.51]
  misc_feature (65)..(579): NCBI GI: 39977711 Blast Desc: MGG_06740 [Magnaporthe grisea 70-15] gi|145013740|gb|EDJ98381.1| MGG_06740 [Magnaporthe grisea 70-15]
  misc_feature (26)..(580): NCBI GI: 225556475 Blast Desc: purine transporter [Ajellomyces capsulatus G186AR]
  misc_feature (65)..(577): NCBI GI: 256728670 Blast Desc: NECHADRAFT_96853 [Nectria haematococca mpVI 77-13-4]
  misc_feature (44)..(575): NCBI GI: 189193907 Blast Desc: purine transporter [Pyrenophora tritici-repentis Pt-1C-BFP] gi|187978856|gb|EDU45482.1| purine transporter [Pyrenophora tritici-repentis Pt-1C-BFP]
  misc_feature (19)..(542): NCBI GI: 189191058 Blast Desc: purine transporter [Pyrenophora tritici-repentis Pt-1C-BFP] gi|187973474|gb|EDU40973.1| purine transporter [Pyrenophora tritici-repentis Pt-1C-BFP]
  misc_feature (21)..(539): NCBI GI: 156048879 Blast Desc: SS1G_08146 [Sclerotinia sclerotiorum 1980] gi|154692545|gb|EDN92283.1| SS1G_08146 [Sclerotinia sclerotiorum 1980]
  misc_feature (21)..(573): NCBI GI: 225681742 Blast Desc: purine transporter [Paracoccidioides brasiliensis Pb03]
MWNPLAAFQRGCESLVSCMGSLEERINRSTFGRVFRLDGSGHPKTIRGATFFTELRAGMTTFATMAYIIAVNSAVLMDSGGTCVCPPGSKPGCPEDPDYILCLTGLKHDLITATSALAGLSSIAFGFLTNLPVALGPGMGLNAYFTYQVVGWHATGSVPYRIALTAIFVEGFIFMFLALTGMRQWLVRMIPATIKTACGVGIGLFLTEIGLSYSAGIGAITGGYTTPLAIGGCPSEKLNESQECTGDIMSNPAMWIGIFIGGIFVAFLMAFKVKSAIVIGIGLVSILSWPRNTPFTYFPYTPNGEARYDFFSQVIAFHPIESTLGVQQWNLGGASGTQFALALVTFLYVDIIDCTATLYSMAKFCGVVDETGDFPRSTIAYCTDAACISIGSLLGCSPVTCFIESGAGIAQGGRTGLTAISAGVCFLLSLFFAPILASVPPWATGATLILVGCLMIRQVTNINWNYIGDAVPSFVTLAFMPFSYSVAYGLIAGMMVYIVLNTMIWAVVKFTGEKVTPSNWHEKEVYHFGFGARDVPKWIRLLYRKMGGGNVTEVVRKDGIELVDCDSTINHNSRSASAEGKGIQVMATPTRPHYLPSLD

SEQ ID NO: 24093 - DNA, 1131 bp, Muscodor strobelii
  misc_feature: SGI EST ID NO. CUFF.56676.0
  misc_feature: Variant of the nucleotide sequence at SEQ ID NO 24091
caacagtggaacctaggaggggcgagcggaacgcaattcgctcttgcgctggtcaccttcctctatgtcgatatcattgattgcacagccactttatattccatggccaagttctgtggtgttgttgatgaaactggcgatttccctcgttctactatcgcgtattgcactgacgccgcatgcatctctatcggttcactcttaggatgttcgccggttacctgctttatcgagagcggtgcaggcattgcccagggcggacgaactggattaacagcaatctcagctggcgtatgcttcctcctcagccttttctttgccccgattctcgcttctgtacctccttgggcaacaggtgcgacgctgattcttgttggttgtttgatgatccgccaagtcaccaacatcaactggaactatatcggtgacgccgtcccatcctttgtaacactggctttcatgccatttagttacagcgtagcatacggacttatcgcaggcatgatggtttacatcgtcttgaacactatgatatgggccgtggtcaagtttacaggtgaaaaagtaacaccgtctaattggcacgagaaggaggtatatcacttcggtttcggcgctcgagacgtcccgaaatggatccgtctgctgtaccgcaaaatgggtggcggaaatgtcaccgaggttgtccggaaagatggtatagagctggtggactgcgacagcaccataaatcacaactcgcgaagtgcctcggctgagggcaaggggattcaagtaatggcaacgccaacgcgcccacattatctcccttctctcgactgacgatgtcataacgaggcgaacggctaaccattgtttcgataacaaggcgaagctgcaaagaggtgtgctctgcgcaagaaatgatctgttgttagtgtctatgaaccgattatatcatgggagatccacgagagttgtatcagaaaaaatcagttgtcatagatagaatactggggttgctaatgtctgtcgctgtatgatatcgtgggatatcaagaagaccgaaagcttgagcgtcgcttacaaaaagtgtacgtagtctcacgaccatgtgtcttcatagaggatgataatgtcagcaaatcgtgc

SEQ ID NO: 24094 - DNA, 1896 bp, Muscodor strobelii
  misc_feature: SGI cDNA ID NO. 568210
  misc_feature: Encodes the peptide sequence at SEQ ID NO 24095
atgttcgacgtcatctggaccgaccccaaccgggagttggtggggcagcggatcatcaggaaggaaaaggagcaggagcagaaggagaaggacaagaggaagcatgacagcagccagcagtctgtttccacttccagttcgtactccaacaacagacgactatctttgcttcaagcagctaagaacaaactgaaaggttccaagagttcgctacgatcgagaccaggaacaggtaacaccgtcgaagagaacaacaacgacatcaaggcgaatcacacttcgatgtacggtgtagacgctgcactcaagagcccacagaactccgacgcctctcagagacccgtcgagagacctgtcgagagccctttctcgtccgccccgctccccgagtcttgcgacatctactcgtcctcgcacagagattcacttctttccagatgggcacatcaagcggcagttgctactggcgcgtttgatagaatcactgcctctgagaatgctgtgtctccaggctccgccactaccacatcggaaacttttgtgcagacgctggactcggagtccttcgtaacacagacaaaggaagtcaccgtctccttgcgcactcctgagatcgatattggtcaattccaaacacacgtccatatctcgtctgacggtgtcaagaccaagggctccattttgccagacttggctgaggatgtgagcccatcagctatcgagaacggcgaagttaatcaccctgcttatttgtcgcctcagacgccacctcccatcgagcatcgcatcactccaatcttgtccccagcaagctaccaaaaccgcgatcgccttggtagtgctgatgcgtggaagccgccacacgagtgggattgcagcccaactagggcatcaggagcagtcactgttgatgaagccttgcacatgtcgcccgcgagtgcctcgtctgacaacgatctgtttccaagtctggcagcagtacagagggacatccgaatgatgatggcagcgagctctgagttgatgctggccaatatgaagtccgacatgggcagttcttcggatgcaatggtgtacaaagagcatgagatggttaagaagcgttggatgttctccgggttgaggaaatacagtggatatgccgagcgcatcgagcgcatacacgtcaatggaaatcttgagagctcaactagcccaagacagcctaagattttggccttgtatgaatcaccagcctctgcctcatatctggcggctctccatcctaacgttcctgttaatcatctttcgccgaagccgatcccgcctatcttgtttccgaacgtccagccactctgcgttcccgttgtgtcagccgcagcggcatccagggccctcgcccctcgactatactcgactgtgacgtgcctgaatatgccggcactctttccctccaccgatattcccccattcctcggtcacatcaatcgatgcttggcatctggcggcgcgcttcatctcaccattatagacccgcagcccgtgtccgcatcgatgggcccaagattgaggagctggctgttcaacaagcttctagtcaacttggagcagtctttcaggaccaccatgcctagcgaaactttccccgtgtggttgcagttcgcacagcttcgtggaagaggaagcacaatctcaaccacggcagtccctgctattccccagagaagtgagggagctaacgttgggtctgagcttcgttgcttgatcatgagacagctgtggcaagaagtctggggatcatttgttcacgccacgaaatggtggtgggaagagggtgagatcgttgaggaatgcaatgagcttggtacttactgggagtactcgcacatcatcgccgccaaaggagagaaagattga

SEQ ID NO: 24095 - protein, 631 aa, Muscodor strobelii
  misc_feature: SGI Peptide ID NO. 568210
  misc_feature (1)..(627): NCBI GI: 39977709 Blast Desc: MGG_06739 [Magnaporthe grisea 70-15] gi|145013741|gb|EDJ98382.1| MGG_06739 [Magnaporthe grisea 70-15]
  misc_feature (1)..(627): NCBI GI: 261360837 Blast Desc: conserved [Verticillium albo-atrum VaMs.102]
  misc_feature (131)..(631): NCBI GI: 256728500 Blast Desc: NECHADRAFT_51012 [Nectria haematococca mpVI 77-13-4]
  misc_feature (1)..(627): NCBI GI: 256724266 Blast Desc: NECHADRAFT_97614 [Nectria haematococca mpVI 77-13-4]
  misc_feature (1)..(629): NCBI GI: 46109960 Blast Desc: FG01862.1 [Gibberella zeae PH-1]
  misc_feature (263)..(631): NCBI GI: 171694211 Blast Desc: protein product [Podospora anserina] gi|170947054|emb|CAP73859.1| protein product [Podospora anserina]
  misc_feature (1)..(627): NCBI GI: 154312678 Blast Desc: BC1G_05040 [Botryotinia fuckeliana B05.10] gi|150849742|gb|EDN24935.1| BC1G_05040 [Botryotinia fuckeliana B05.10]
  misc_feature (270)..(627): NCBI GI: 46115360 Blast Desc: FG03522.1 [Gibberella zeae PH-1]
  misc_feature (277)..(627): NCBI GI: 85089417 Blast Desc: NCU04624 [Neurospora crassa OR74A] gi|21622518|emb|CAD37065.1| [Neurospora crassa] gi|28919229|gb|EAA28706.1| [Neurospora crassa OR74A]
  misc_feature (455)..(627): NCBI GI: 156051698 Blast Desc: SS1G_07256 [Sclerotinia sclerotiorum 1980] gi|154705034|gb|EDO04773.1| SS1G_07256 [Sclerotinia sclerotiorum 1980]
MFDVIWTDPNRELVGQRIIRKEKEQEQKEKDKRKHDSSQQSVSTSSSYSNNRRLSLLQAAKNKLKGSKSSLRSRPGTGNTVEENNNDIKANHTSMYGVDAALKSPQNSDASQRPVERPVESPFSSAPLPESCDIYSSSHRDSLLSRWAHQAAVATGAFDRITASENAVSPGSATTTSETFVQTLDSESFVTQTKEVTVSLRTPEIDIGQFQTHVHISSDGVKTKGSILPDLAEDVSPSAIENGEVNHPAYLSPQTPPPIEHRITPILSPASYQNRDRLGSADAWKPPHEWDCSPTRASGAVTVDEALHMSPASASSDNDLFPSLAAVQRDIRMMMAASSELMLANMKSDMGSSSDAMVYKEHEMVKKRWMFSGLRKYSGYAERIERIHVNGNLESSTSPRQPKILALYESPASASYLAALHPNVPVNHLSPKPIPPILFPNVQPLCVPVVSAAAASRALAPRLYSTVTCLNMPALFPSTDIPPFLGHINRCLASGGALHLTIIDPQPVSASMGPRLRSWLFNKLLVNLEQSFRTTMPSETFPVWLQFAQLRGRGSTISTTAVPAIPQRSEGANVGSELRCLIMRQLWQEVWGSFVHATKWWWEEGEIVEECNELGTYWEYSHIIAAKGEKD

SEQ ID NO: 24096 - DNA, 1302 bp, Muscodor strobelii
  misc_feature: SGI cDNA ID NO. 568211
  misc_feature: Encodes the peptide sequence at SEQ ID NO 24097
atgacggaaatactcacaccaagcgtgcttcacgctatcgttgttatcgagagacttggatcggttctttctttactgggatgccttctcatcatcatcacgttttcgacctcccgtgctttccataagccgatcaatcgactggtattttacgcatcatttggcaatatcttaacgaatgttggaacactcatcgccatggcatatctaaaacaagaaaactcatttgggtgccagttccaaggctttttgatccagacattcttaccagcagatgcgttatggactcttgctatggctttcaatgtttacttgacattttactgcaaatacgatgccgccaagttaaggaagatggaaaaatggtatttattgatttgttatggggttccatttgtacctggcctggcgttcatctttatctcgagcgagccgagtgggaggatctatggtaatgcaactttgtggtgctgggtcagctctggctgggacattcttcgcgttgcgacattttacgggcccgtctggctcgtcattatctgcacattctttatctacattagagccggtcgagagatctatcgaaaacgcaagcagttacgaaacttcgggttgagcagcagcagcgtgaacgatcccgaaacgcttgttggcgaggatcccgtaatgacgaccgagatacacgttacttcggaatcagtcgagccacctatcaacctggacgtcctcgaggcaggcacatcatcaagcactacatctgaaacgaaacgcgcacctgcctattccgtatctatttcggcagaccgcagagcccagctcgcttctagcgccccgaaacagtcgtcggcagcgagaatgcaagccaaagccagacgaaagaacttgatggaacttaatagggctgcatggtcgtacaccaaatgtgcccttctcttcttcattgctttactagtcacttgggttccatcatcagcgaacagagtatacagcctcgtaaacccgggcgaaatctcggtccctttagaggtaatgtcggcactagtgcttcctcttcagggtacgtggaatgcacttatctacgtcgtcacgtcatgggctgcgttcaagatgtactggtcggacacgttcggtggaaacagtcaccctaagtcacctcagtatccacaacactctagcgacagacggaatttctccttcactgctcgattacagcaccgcaagatagacgattcggatagcgtgaccgagttaaccgggaacgcgcggcccatatccaatgagagcaaagagaccagagcataa

SEQ ID NO: 24097 - protein, 433 aa, Muscodor strobelii
  misc_feature: SGI Peptide ID NO. 568211
  misc_feature (4)..(310): Pfam Id: PF05462 Pfam Desc: Slime mold cyclic AMP receptor
  misc_feature (4)..(180): Pfam Id: PF05462 Pfam Desc: Slime mold cyclic AMP receptor
  misc_feature (15)..(428): NCBI GI: 171694213 Blast Desc: protein product [Podospora anserina] gi|170947055|emb|CAP73860.1| protein product [Podospora anserina]
  misc_feature (1)..(417): NCBI GI: 126360625 Blast Desc: G-protein coupled receptor [Trichoderma atroviride]
  misc_feature (10)..(376): NCBI GI: 39977707 Blast Desc: MGG_06738 [Magnaporthe grisea 70-15] gi|145013742|gb|EDJ98383.1| MGG_06738 [Magnaporthe grisea 70-15]
  misc_feature (5)..(430): NCBI GI: 261360836 Blast Desc: G-protein coupled receptor [Verticillium albo-atrum VaMs.102]
  misc_feature (5)..(402): NCBI GI: 171678836 Blast Desc: protein product [Podospora anserina] gi|170937488|emb|CAP62146.1| protein product [Podospora anserina]
  misc_feature (6)..(378): NCBI GI: 85089421 Blast Desc: NCU04626 [Neurospora crassa OR74A] gi|28919231|gb|EAA28708.1| [Neurospora crassa OR74A]
  misc_feature (6)..(378): NCBI GI: 21622520 Blast Desc: related to G protein coupled receptor like protein [Neurospora crassa]
  misc_feature (2)..(430): NCBI GI: 256728673 Blast Desc: NECHADRAFT_50734 [Nectria haematococca mpVI 77-13-4]
  misc_feature (4)..(369): NCBI GI: 85089519 Blast Desc: NCU09427 [Neurospora crassa OR74A] gi|28919286|gb|EAA28751.1| [Neurospora crassa OR74A]
  misc_feature (1)..(374): NCBI GI: 126256568 Blast Desc: G-protein coupled receptor [Trichoderma atroviride]
MTEILTPSVLHAIVVIERLGSVLSLLGCLLIIITFSTSRAFHKPINRLVFYASFGNILTNVGTLIAMAYLKQENSFGCQFQGFLIQTFLPADALWTLAMAFNVYLTFYCKYDAAKLRKMEKWYLLICYGVPFVPGLAFIFISSEPSGRIYGNATLWCWVSSGWDILRVATFYGPVWLVIICTFFIYIRAGREIYRKRKQLRNFGLSSSSVNDPETLVGEDPVMTTEIHVTSESVEPPINLDVLEAGTSSSTTSETKRAPAYSVSISADRRAQLASSAPKQSSAARMQAKARRKNLMELNRAAWSYTKCALLFFIALLVTWVPSSANRVYSLVNPGEISVPLEVMSALVLPLQGTWNALIYVVTSWAAFKMYWSDTFGGNSHPKSPQYPQHSSDRRNFSFTARLQHRKIDDSDSVTELTGNARPISNESKETRA

SEQ ID NO: 24098 - DNA, 2843 bp, Muscodor strobelii
  misc_feature: SGI EST ID NO. CUFF.56718.0
  misc_feature: Variant of the nucleotide sequence at SEQ ID NO 24096
aagtacccttgactcaggccgtataccgtttcattatggtttaaccatctcgggctggacttggtgggttgtcaactcacacactcacgcgatccccatgttggaaaaccgaccttaatttcaatgaactacaactagttctagtagtccgttcctctacctgtagggcactccctgtcaggctgctcttttgcattcgtatcctagctaccatgtccttgcatgttccctagggcggtgctactggctgaccccatgcccataagtctgagctaatccatggccgtcattatgttgaccaacgaaaatcaattatagtacatggacttcataaagactcgagagatcgacctactgaggaaattctctatctgatatgttcttctacggtgatatcgttccccagttattttgatactactgtccttggttccttatattaccgtcttgccgtttcgtctgatatatcttctgcccatagttcattcgaagaacatcacgacatatatacactctttatcccatccgaggtgccgtggagtttagccctgagacagcaaaacaggaatactcgatgccgtcgagggtataagtcaagatttgcacttgactgtttgatcgtcgtttcctcggaccgcaacttcatgaccatcttcctccagttttcggcaaaagctgtgccgcagtgtttctatagatgatcggacaaatgctattataatccatctcgccaatccgacttcgaacgacattttggttatttcgaggtcatccctggttttcagatagagggtctcgccgagaacagctgcgatgacggaaatactcacaccaagcgtgcttcacgctatcgttgttatcgagagacttggatcggttctttctttactgggatgccttctcatcatcatcacgttttcgacctcccgtgctttccataagccgatcaatcgactggtattttacgcatcatttggcaatatcttaacgaatgttggaacactcatcgccatggcatatctaaaacaagaaaactcatttgggtgccagttccaaggctttttgatccagacattcttaccagcagatgcgttatggactcttgctatggctttcaatgtttacttgacattttactgcaaatacgatgccgccaagttaaggaagatggaaaaatggtatttattgatttgttatggggttccatttgtacctggcctggcgttcatctttatctcgagcgagccgagtgggaggatctatggtaatgcaactttgtggtgctgggtcagctctggctgggacattcttcgcgttgcgacattttacgggcccgtctggctcgtcattatctgcacattctttatctacattagagccggtcgagagatctatcgaaaacgcaagcagttacgaaacttcgggttgagcagcagcagcgtgaacgatcccgaaacgcttgttggcgaggatcccgtaatgacgaccgagatacacgttacttcggaatcagtcgagccacctatcaacctggacgtcctcgaggcaggcacatcatcaagcactacatctgaaacgaaacgcgcacctgcctattccgtatctatttcggcagaccgcagagcccagctcgcttctagcgccccgaaacagtcgtcggcagcgagaatgcaagccaaagccagacgaaagaacttgatggaacttaatagggctgcatggtcgtacaccaaatgtgcccttctcttcttcattgctttactagtcacttgggttccatcatcagcgaacagagtatacagcctcgtaaacccgggcgaaatctcggtccctttagaggtaatgtcggcactagtgcttcctcttcagggtacgtggaatgcacttatctacgtcgtcacgtcatgggctgcgttcaagatgtactggtcggacacgttcggtggaaacagtcaccctaagtcacctcagtatccacaacactctagcgacagacggaatttctccttcactgctcgattacagcaccgcaagatagacgattcggatagcgtgaccgagttaaccgggaacgcgcggcccatatccaatgagagcaaagagaccagagcataatgcgcggaggatcggaatcaaaattccatgtcatgcgaccatcatttattgtcgctcgctattagtatgatatactaaaacttacatttgaatcttcttcatcacactattctgctacaaaactttaacttggactcggttcaggcgcaactgttcaataccccggcttatttgattttattggtggcaaaatcattgttcgatagctagcttcttgacgactataaagacaattcttccacgagatccaatgcactcattgctccatgactgtaccattctatcactcgtaaacacagatgaactcaagaaattgccgtttgctgagtatacaaaaatcaacatgcaagcgatccgatccttctagatctggcgttcataaaatgagatgaatgttactcaatgcgatcacctctgcaggcacgtccctggagagtgtggtagcgatgccacagcgtcgatgttctgcctaatttggaatgttgccgttgcattgtcaggcgtccaagactggggtactcccgtcctattgctctcattcggccctcaaattccttattagattacacactgcgacatatggcatagccttggcggcatatagtgctatgctgctctgacaccttgatgtcaattcacgattgggttctccgatacactcatcatgcatagtagttctattaacgcgattgactatatatgtacgtggatcttcatccaaacacgcg

SEQ ID NO: 24099 - DNA, 474 bp, Muscodor strobelii
  misc_feature: SGI cDNA ID NO. 568212
  misc_feature: Encodes the peptide sequence at SEQ ID NO 24100
atgtccatgccagccctgaccagcggcaccacagccggaatgactccggcagaggaagccatcgcccgtaccttaatcctaagcgtcgtctatcgctacgctgcccttgcgcgtgaagatggcgatatgaagcccatggcagaaatatttgaaccgggtgccattgtcaagttcggcaatggccgtgagttcgcacccacagatcttggcaaagtcatcagcaatcctccaccgtcgttcttgcgccaccacctcacaactatcgatatccaatttgactcgccagacgaggcgcgttgcgaagcccttatgtttgctcaatcacacctgaagccttacgatcactgggggcgctggaagtctgtcttgcgtaagcagccagatggacgttggctatttcgggaaaagacatcgatcatggacgggtacgatcctgatggttgggttgccctggccctgaaagctggcttctga

SEQ ID NO: 24100 - protein, 157 aa, Muscodor strobelii
  misc_feature: SGI Peptide ID NO. 568212
  misc_feature (4)..(157): NCBI GI: 242821451 Blast Desc: TSTA_001010 [Talaromyces stipitatus ATCC 10500] gi|218712604|gb|EED12029.1| TSTA_001010 [Talaromyces stipitatus ATCC 10500]
  misc_feature (42)..(150): NCBI GI: 254774663 Blast Desc: MaviaA2_08328 [Mycobacterium avium subsp. avium ATCC 25291]
  misc_feature (42)..(150): NCBI GI: 254822243 Blast Desc: MintA_20079 [Mycobacterium intracellulare ATCC 13950]
MSMPALTSGTTAGMTPAEEAIARTLILSVVYRYAALAREDGDMKPMAEIFEPGAIVKFGNGREFAPTDLGKVISNPPPSFLRHHLTTIDIQFDSPDEARCEALMFAQSHLKPYDHWGRWKSVLRKQPDGRWLFREKTSIMDGYDPDGWVALALKAGF

SEQ ID NO: 24101 - DNA, 824 bp, Muscodor strobelii
  misc_feature: SGI EST ID NO. CUFF.56726.0
  misc_feature: Variant of the nucleotide sequence at SEQ ID NO 24099
tcactttcgaataccaatcacctccgcgacgatgtccatgccagccctgaccagcggcaccacagccggaatgactccggcagaggaagccatcgcccgtaccttaatcctaagcgtcgtctatcgctacgctgcccttgcgcgtgaagatggcgatatgaagcccatggcagaaatatttgaaccgggtgccattgtcaagttcggcaatggccgtgagttcgcacccacagatcttggcaaagtcatcagcaatcctccaccgtcgttcttgcgccaccacctcacaactatcgatatccaatttgactcgccagacgaggcgcgttgcgaagcccttatgtttgctcaatcacacctgaagccttacgatcactgggggcgctggaagtctgtcttgcgtaagcagccagatggacgttggctatttcgggaaaagacatcgatcatggacgggtacgatcctgatggttgggttgccctggccctgaaagctggcttctgaatagactcaaggacataaaatggcttgaccggatcttggattgtcaattgaagctatgtctttcgacgaacggatattacgaacgcctgcatggcgtgcgtggctgcgtcttttgctctaaaatagcaataaaatctacatttcagtcattgcgatacgttccaataagcgataagtcgtgttcagcagattctagagaaccagagacttatctacgttcaaaggttaaaaagcatctgatgttgcggccgtgatggcaactacactgatccgaatccacttcttggatgatgaagacagaacgtgaacattgaaattg

SEQ ID NO: 24102 - DNA, 1041 bp, Muscodor strobelii
  misc_feature: SGI cDNA ID NO. 568213
  misc_feature: Reduced expression when VOC is produced
  misc_feature: Encodes the peptide sequence at SEQ ID NO 24103
atgtcgttcgcacgaggaggtcgtggcggtgctccccgcggaggccgtggtggatttggcggtggtgaccgtggtggacgtggtggtgcacgaggtggccgtggcggtggtcgcggtggatttggtgaccgtggaggtcgaggcggcggccgaggtggtgctcgtggtcgcggaggtccccctggccgtggtggtcgtggtggtggacgtggtggtgctatgggtaaaggaggtgctgccaagactgtcgtcgaacctcatcggcacgccggcatcttcgtatccagaggcaaggaggaccatcttttgaccaagtcgatcgcccccggtatcgaggtctacggcgagaagcgcatttccgtcgactcgcaaaccaaagacgatgacggcaaccctttggctgccggcgttatcggtggtcttgacaacatattcattgcccctggcaagaaggttctctaccttggtgctgccagtggtacctccgtctcccacgtcgccgatattgttggacctactggaactgtctacgccgtcgaattctcccaccgatctggcagagatctcaccactatggcccagagccgaaccaacgttgtccctatcgttgaggacgctcgtcaccctatgaagtaccgcatgctagtttcgatggtcgatgctatctttttggatgttgcccagcctgatcaagcccgtatcgccatccttaacgcccagatgttcctcaagattggaggcggtattgttatctctattaaagctaactgtatcgactctactgctgcaccagaagctgtattcgcacaggaagttcaaaaattgagagccggtggcttaaaacccctcgagcaattgacattagagcccccgaatcaagtaatagaaggcgaactgtcagtcgacaacacggaccccctaaccaactccccagaagcctgcctcttcctctccaagacaccaagtcccgtaccagcacacgctgtcgtcctcaaatcctcacgtctcggccaggagtggaaagcgctcgtctcagtgtaa

SEQ ID NO: 24103 - protein, 346 aa, Muscodor strobelii
  misc_feature: SGI Peptide ID NO. 568213
  misc_feature (81)..(301): Pfam Id: PF01269 Pfam Desc: Fibrillarin
  misc_feature (81)..(290): Pfam Id: PF01269 Pfam Desc: Fibrillarin
  misc_feature (81)..(290): NCBI GI: 156037538 Blast Desc: SS1G_12483 [Sclerotinia sclerotiorum 1980] gi|154697891|gb|EDN97629.1| SS1G_12483 [Sclerotinia sclerotiorum 1980]
  misc_feature (81)..(290): NCBI GI: 154316173 Blast Desc: BC1G_03672 [Botryotinia fuckeliana B05.10] gi|150846458|gb|EDN21651.1| BC1G_03672 [Botryotinia fuckeliana B05.10]
  misc_feature (81)..(290): NCBI GI: 169598998 Blast Desc: SNOG_02311 [Phaeosphaeria nodorum SN15] gi|160704517|gb|EAT90523.2| SNOG_02311 [Phaeosphaeria nodorum SN15]
  misc_feature (81)..(290): NCBI GI: 212531705 Blast Desc: fibrillarin [Penicillium marneffei ATCC 18224] gi|210071373|gb|EEA25462.1| fibrillarin [Penicillium marneffei ATCC 18224]
  misc_feature (81)..(290): NCBI GI: 255715781 Blast Desc: KLTH0E15906p [Lachancea thermotolerans] gi|238935554|emb|CAR23735.1| KLTH0E15906p [Lachancea thermotolerans]
  misc_feature (81)..(290): NCBI GI: 238844096 Blast Desc: rRNA 2'-O-methyltransferase fibrillarin [Microsporum canis CBS 113480]
  misc_feature (81)..(290): NCBI GI: 6320190 Blast Desc: Nop1p [Saccharomyces cerevisiae] gi|119857|sp|P15646.1|FBRL_YEAST RecName: Full=rRNA 2'-O-methyltransferase fibrillarin; AltName: Full=U3 small NOP1;
  misc_feature (81)..(290): NCBI GI: 240108666 Blast Desc: Fibrillarin, [Coccidioides posadasii C735 delta SOWgp]
  misc_feature (81)..(290): NCBI GI: 119186183 Blast Desc: fibrillarin [Coccidioides immitis RS]
  misc_feature (81)..(290): NCBI GI: 145230732 Blast Desc: An01g12230 [Aspergillus niger] gi|134055749|emb|CAK44122.1| protein product [Aspergillus niger]
  misc_feature: Useful for introducing or modulating the production of volatile compounds
MSFARGGRGGAPRGGRGGFGGGDRGGRGGARGGRGGGRGGFGDRGGRGGGRGGARGRGGPPGRGGRGGGRGGAMGKGGAAKTVVEPHRHAGIFVSRGKEDHLLTKSIAPGIEVYGEKRISVDSQTKDDDGNPLAAGVIGGLDNIFIAPGKKVLYLGAASGTSVSHVADIVGPTGTVYAVEFSHRSGRDLTTMAQSRTNVVPIVEDARHPMKYRMLVSMVDAIFLDVAQPDQARIAILNAQMFLKIGGGIVISIKANCIDSTAAPEAVFAQEVQKLRAGGLKPLEQLTLEPPNQVIEGELSVDNTDPLTNSPEACLFLSKTPSPVPAHAVVLKSSRLGQEWKALVSV

SEQ ID NO: 24104 - DNA, 811 bp, Muscodor strobelii
  misc_feature: SGI EST ID NO. CUFF.56742.0
  misc_feature: Variant of the nucleotide sequence at SEQ ID NO 24102
ggctgccggcgttatcggtggtcttgacaacatattcattgcccctggcaagaaggttctctaccttggtgctgccagtggtacctccgtctcccacgtcgccgatattgttggacctactggaactgtctacgccgtcgaattctcccaccgatctggcagagatctcaccactatggcccagagccgaaccaacgttgtccctatcgttgaggacgctcgtcaccctatgaagtaccgcatgctagtttcgatggtcgatgctatctttttggatgttgcccagcctgatcaagcccgtatcgccatccttaacgcccagatgttcctcaagattggaggcggtattgttatctctattaaagctaactgtatcgactctactgctgcaccagaagctgtattcgcacaggaagttcaaaaattgagagccggtggcttaaaacccctcgagcaattgacattagagccgtacgagcgtgaccacgccatagtaattggcagatacgagggcgcgaaatagagatgtgctcagatgtagaagtgtcaacaaaatgtgcgatgaatctgactcaaaccggctgggttctcatataaggtcaaaggcgactggcgttaagggttgaattcggcttgtggtaaattttgtcgcgtaccgggaattcttgatttatgactgataccactacggttggtctgttcccaacacaacatgttcatagtcaaacggaaatttgaaagagttcagaaatcctcattactcttggtaacaggaatgtcatgtgctactaaaattcagagccgaatttgc

SEQ ID NO: 24105 - DNA, 564 bp, Muscodor strobelii
  misc_feature: SGI cDNA ID NO. 568214
  misc_feature: Reduced expression when VOC is produced
  misc_feature: Encodes the peptide sequence at SEQ ID NO 24106
atggtccgatacgctgcccacgagatcgagtccgctaagtcggctcgcgcccgcggttcttacctgcgtgtgtccttcaagaacacccgcgagaccgcccaggccatcaatggctggaagttgacccgcgccgtcaagttcctcgagaacgtccaggagaagaccgaggccgtccccatgcgccgctacgccggcagcaccggccgcaccgcccaaggcaagcagttcggtgtctcccgcgcccgctggcccgtcaagtccgccgagttccttctcggtctcctcaagaacgccgagtccaacgccgatgctaagggtctcgacaccagcaacctgatcgtcaagcacatccaggtcaaccaggcccccaagcagcgccgccgcacataccgtgcccacggtcgtatcaacccctacatgtccaacccttgccatatcgagctcatccttaccgagggcgaagaggtcgttcagaagtccgaggctgttgccggccgtgacgtcgctcacttgagctcgagacagcgcggttcccgcatcaggaaggccattacctcgtcttag

SEQ ID NO: 24106 - protein, 187 aa, Muscodor strobelii
  misc_feature: SGI Peptide ID NO. 568214
  misc_feature (17)..(152): Pfam Id: PF00237 Pfam Desc: Ribosomal protein L22p/L17e
  misc_feature (1)..(187): NCBI GI: 156037578 Blast Desc: 60S ribosomal protein L17 [Sclerotinia sclerotiorum 1980] gi|154697911|gb|EDN97649.1| 60S ribosomal protein L17 [Sclerotinia sclerotiorum 1980]
  misc_feature (1)..(187): NCBI GI: 154316257 Blast Desc: 60S ribosomal protein L17 [Botryotinia fuckeliana B05.10] gi|150846500|gb|EDN21693.1| 60S ribosomal protein L17 [Botryotinia fuckeliana B05.10]
  misc_feature (1)..(187): NCBI GI: 223973323 Blast Desc: [Zea mays]
  misc_feature (1)..(187): NCBI GI: 261360833 Blast Desc: 60S ribosomal protein L17 [Verticillium albo-atrum VaMs.102]
  misc_feature (1)..(187): NCBI GI: 256728667 Blast Desc: [Nectria haematococca mpVI 77-13-4]
  misc_feature (1)..(187): NCBI GI: 46109978 Blast Desc: RL17_NEUCR 60S ribosomal protein L17 [Gibberella zeae PH-1]
  misc_feature (1)..(187): NCBI GI: 164426828 Blast Desc: 60S ribosomal protein L17 [Neurospora crassa OR74A] gi|14285718|sp|Q9HE25.1|RL17_NEUCR RecName: Full=60S ribosomal protein L17 gi|11595587|emb|CAC18189.1| ribosomal protein L17.e.A
  misc_feature (1)..(187): NCBI GI: 39957705 Blast Desc: 60S ribosomal protein L17 [Magnaporthe grisea 70-15] gi|59802993|gb|AAX07688.1| 60S ribosomal protein L17-like protein [Magnaporthe grisea] gi|145013372|gb|EDJ98013.1| 60S ribosomal
  misc_feature (1)..(187): NCBI GI: 116198285 Blast Desc: 60S ribosomal protein L17 [Chaetomium globosum CBS 148.51] gi|88178577|gb|EAQ86045.1| 60S ribosomal protein L17 [Chaetomium globosum CBS 148.51]
  misc_feature (1)..(187): NCBI GI: 119186293 Blast Desc: 60S ribosomal protein L17 [Coccidioides immitis RS] gi|240108622|gb|EER26796.1| 60S ribosomal protein L17, [Coccidioides posadasii C735 delta SOWgp]
  misc_feature: Useful for introducing or modulating the production of volatile compounds
MVRYAAHEIESAKSARARGSYLRVSFKNTRETAQAINGWKLTRAVKFLENVQEKTEAVPMRRYAGSTGRTAQGKQFGVSRARWPVKSAEFLLGLLKNAESNADAKGLDTSNLIVKHIQVNQAPKQRRRTYRAHGRINPYMSNPCHIELILTEGEEVVQKSEAVAGRDVAHLSSRQRGSRIRKAITSS

SEQ ID NO: 24107 - DNA, 1428 bp, Muscodor strobelii
  misc_feature: SGI EST ID NO. CUFF.56759.0
  misc_feature: Variant of the nucleotide sequence at SEQ ID NO 24105
tttacattgggtcgaccgtatctccgccaaaaacttcaatcaacaacgacactcactccgtctcactaacctcacagcacagcagccaaaatggtccgatacgctgcccacgagatcgagtccgctaagtcggctcgcgcccgcggttcttacctgcgtgtgtccttcaagaacacccgcgagaccgcccaggccatcaatggctggaagttgacccgcgccgtcaagttcctcgagaacgtccaggagaagaccgaggccgtccccatgcgccgctacgccggcagcaccggccgcaccgcccaaggcaagcagttcggtgtctcccgcgcccgctggcccgtcaagtccgccgagttccttctcggtctcctcaagaacgccgagtccaacgccgatgctaagggtctcgacaccagcaacctgatcgtcaagcacatccaggtcaaccaggcccccaagcagcgccgccgcacataccgtgcccacggtcgtatcaacccctacatgtccaacccttgccatatcgagctcatccttaccgagggcgaagaggtcgttcagaagtccgaggctgttgccggccgtgacgtcgctcacttgagctcgagacagcgcggttcccgcatcaggaaggccattacctcgtcttagattatgagacgggcgaggaatgtgacgatatgacggatggtcggtcggggtttcagttgcttttcactcctggtgtcaaggcggtacgtaaagcatagggtctgggtttctggcatgcaactcttttcgcgaacgaaattacatattcgtggattcccccaatacaaaaaagttccaaattcactcggtcttgtcccgaaaaaaggcgttatatatgctcaccacggagattaccggagttgagcacggaattgtcgtcgaccccaccgaccgtggaagcatagagacggatttgtgacgacgaacggaagattacgactttccagcggtctctactggcaagggcgtttggtcgtttgggcgaaaccaaaccgattcgccagggtactcacaatgaggtataatacatccagtgtatgggaagctttttatgtgaactcttggcgccgttcgtgattcataggctcgtttgaggagactgctcagtgtcattgcgtgtgtctgtgtgttgtcgtctgcgggtacccaagaatatgtcgcgattgtctcaatatgaagacctctctcgttgacttgccatttttctggagcaatgaccctcaaatcggatcttctcggccactgttccatattcgagcatctgcggttagagaatggcgaataatttctacacgtgacttccgtaactacgcttacaataacgtcctggccatacggtatacataatctaagtgatcaaaggttcattgtactttgatccttatttgaattgcg

SEQ ID NO: 24108 - DNA, 1899 bp, Muscodor strobelii
  misc_feature: SGI cDNA ID NO. 568215
  misc_feature: Encodes the peptide sequence at SEQ ID NO 24109
atgactgccgccattagctcgtcgacgccctcgctcgagtttgtggaacgcgacgtgtcggattcggatgacgactcttccatcccgtccgatgactatttcaccgacatttcacggcgctcccacctgccacctgtcctgccgcccggcgccatctcgcgcagcctcccacagaagctggcaccgggcatcatcgtgagtgggtctgcgcgcactgcgtcgccgcggagccattctgctcaccctcatatctcctttaaccatcgtgtcgtaacccggccacttccgcctctgggaccgcaacgccccgggacccagctccgtgacccgatcagacacacgggacagaggatcgggggcggggatggggtgtctgaaacactagaggtagactccgggtctgacagcgatggtcccgatcaacaggggccctcttccaaagagggccaacagccgagcagaaatgccagattggcagaagaaatccgtcgccaacgagtcaccgagtcctttctgtcggtgaaccacaaacagagagctttagcgaggacattcacgagcgttcggtctcgacgaacgcaacttgaagatgcacggagagcaagaatcgacgcggaggagaaattcatgttccaaatctataccatgatgcctcggttttccgcacctttaaaacaactatacgatctggttggggccgcacggcaacagtttgaggaagcagaggtacgcttcgatgaagttatcggtgaacttcaacgtgactgcgagggtatgcaatctgaacacaggaaattttacaatgcggccatctgggctaaggatgtatctttcaccgatgacaataccgggtcggataaagaatctgaggaatgcttagcgttacgtggaatatcgggtgatcgccctgagacaatccatcctctctatgaagacttacgtacagcttttggagaattgcagttggccaaggagttactagccaacacacagatgaaaagagaagctctccttatcagaaaatcacagccagtaggagaagatggcattaatcttctcgagacctatagccaacatggcgggtcatttggagtcctgcaccgagccggtatgacacagggtgaccgtgaacaacttcaagagtacgccgacctggagcagaccgcaattcatgacattgagctatatacccgaaaagttaaggacttaagggcagagtgtctggctagaggtgccctaccttctgactcaatatttcaaggagaagatcttgattttgacaacctcaaccgtgatgaaatccgccttgctgctgggccgtttgacagtgatgaatgcgatactttagcacacccagtcttcccgctactcctaactaatcctggacatctcctggaggtattcccacagacggctttgcagtcactgaaaactgccatatcgcttccttccgctgccccggcaaagcagaaacggattgctgaggcagcacgtgaggccaacatacattcactgatgagtcggacaaaagcagaagacaagactgattatatcaaccgttggcttctccacaagcttcatgaatcggccatggaagctgagctactctggacaacgtttcgatctcgactcaaaatattagatatcgaacgatggcaacgcgatgtcctccaattctggtggcgtgacgagcttttcaacccaccgtcggcctttgcagacagtgttgatattggcaaagcctccaactcagttgatccgagtttaggcactgcgccaaaggttcgaaccgagatcggatcttgggaagactacagcccaaggaatattgacttgaggaatattgactattcctcccccatgcaacgttcccagtcgtctatctggcataatagatag

SEQ ID NO: 24109 - protein, 632 aa, Muscodor strobelii
  misc_feature: SGI Peptide ID NO. 568215
  misc_feature (295)..(580): NCBI GI: 171694201 Blast Desc: protein product [Podospora anserina] gi|170947049|emb|CAP73854.1| protein product [Podospora anserina]
  misc_feature (192)..(564): NCBI GI: 261360891 Blast Desc: [Verticillium albo-atrum VaMs.102]
  misc_feature (224)..(569): NCBI GI: 39957740 Blast Desc: [Magnaporthe grisea 70-15] gi|145013369|gb|EDJ98010.1| [Magnaporthe grisea 70-15]
MTAAISSSTPSLEFVERDVSDSDDDSSIPSDDYFTDISRRSHLPPVLPPGAISRSLPQKLAPGIIVSGSARTASPRSHSAHPHISFNHRVVTRPLPPLGPQRPGTQLRDPIRHTGQRIGGGDGVSETLEVDSGSDSDGPDQQGPSSKEGQQPSRNARLAEEIRRQRVTESFLSVNHKQRALARTFTSVRSRRTQLEDARRARIDAEEKFMFQIYTMMPRFSAPLKQLYDLVGAARQQFEEAEVRFDEVIGELQRDCEGMQSEHRKFYNAAIWAKDVSFTDDNTGSDKESEECLALRGISGDRPETIHPLYEDLRTAFGELQLAKELLANTQMKREALLIRKSQPVGEDGINLLETYSQHGGSFGVLHRAGMTQGDREQLQEYADLEQTAIHDIELYTRKVKDLRAECLARGALPSDSIFQGEDLDFDNLNRDEIRLAAGPFDSDECDTLAHPVFPLLLTNPGHLLEVFPQTALQSLKTAISLPSAAPAKQKRIAEAAREANIHSLMSRTKAEDKTDYINRWLLHKLHESAMEAELLWTTFRSRLKILDIERWQRDVLQFWWRDELFNPPSAFADSVDIGKASNSVDPSLGTAPKVRTEIGSWEDYSPRNIDLRNIDYSSPMQRSQSSIWHNR

SEQ ID NO: 24110 - DNA, 3057 bp, Muscodor strobelii
  misc_feature: SGI EST ID NO. CUFF.56798.0
  misc_feature: Variant of the nucleotide sequence at SEQ ID NO 24108
cggctagcaggaggtagtcttggggtccgggatcctcatatgttttacgggccgtacctaggctagcctcagtgcgaccggacgctgaattggactagtagatatggtggaatggcctgctattcaaatatgaggcggaggacccaaacaatgcgataacgttactcgtacagaacccgtgtgtgtattaaccttcatctcaaactggttactcaactcggaaactcgtaattacatctgaccagtaccaattagaagctctctttccatatcgtctcatcatgactttcacaccagatcctgttccataaatacacctgatgtatcccagtgcccagacgaaagatttggattaataatgactggagcgggaacgcctcattcttgatcgggctggctgggaggatctgtgttgtttcgttggcctaagagtcaatgctgaacacacacgtagctgttcctatcacatattgctctccaaatacggtatcttttaagaccgttggcacagcagacgttcctacacaccgaaaactggcttgatccctttactccttcccccaactcccgctgatttactacatactacccgacgcccatttacttttccacgcatcctgagcgtcagattcccacttcagttcccactcccagaattgaaatttccgttgcacgtctccacacagcccacaacacactaggtggtccattccaaacatcactagatattgcgtctagtattctttgagtaatcgttgccaagggacggcccgagggttaagtcgtcgtctgcacgccatcgcagcgcgacgattgatccgcgttatcccagcttcgtcagctcaagaccggatgtggacgtgcaccttcacactctacccatgagattttcccctaacacagcgtgggtgagtatgtgctaaacatactcaccagagatcgctactgtgtgcagctatcagcttttcaaaatgaacaaaacttcgtcctcgagaccgccgagcagtccgtcgcctcctagtctctactcagaacgtcatgactgccgccattagctcgtcgacgccctcgctcgagtttgtggaacgcgacgtgtcggattcggatgacgactcttccatcccgtccgatgactatttcaccgacatttcacggcgctcccacctgccacctgtcctgccgcccggcgccatctcgcgcagcctcccacagaagctggcaccgggcatcatcgtgagtgggtctgcgcgcactgcgtcgccgcggagccattctgctcaccctcatatctcctttaaccatcgtgtcgtaacccggccacttccgcctctgggaccgcaacgccccgggacccagctccgtgacccgatcagacacacgggacagaggatcgggggcggggatggggtgtctgaaacactagaggtagactccgggtctgacagcgatggtcccgatcaacaggggccctcttccaaagagggccaacagccgagcagaaatgccagattggcagaagaaatccgtcgccaacgagtcaccgagtcctttctgtcggtgaaccacaaacagagagctttagcgaggacattcacgagcgttcggtctcgacgaacgcaacttgaagatgcacggagagcaagaatcgacgcggaggagaaattcatgttccaaatctataccatgatgcctcggttttccgcacctttaaaacaactatacgatctggttggggccgcacggcaacagtttgaggaagcagaggtacgcttcgatgaagttatcggtgaacttcaacgtgactgcgagggtatgcaatctgaacacaggaaattttacaatgcggccatctgggctaaggatgtatctttcaccgatgacaataccgggtcggataaagaatctgaggaatgcttagcgttacgtggaatatcgggtgatcgccctgagacaatccatcctctctatgaagacttacgtacagcttttggagaattgcagttggccaaggagttactagccaacacacagatgaaaagagaagctctccttatcagaaaatcacagccagtaggagaagatggcattaatcttctcgagacctatagccaacatggcgggtcatttggagtcctgcaccgagccggtatgacacagggtgaccgtgaacaacttcaagagtacgccgacctggagcagaccgcaattcatgacattgagctatatacccgaaaagttaaggacttaagggcagagtgtctggctagaggtgccctaccttctgactcaatatttcaaggagaagatcttgattttgacaacctcaaccgtgatgaaatccgccttgctgctgggccgtttgacagtgatgaatgcgatactttagcacacccagtcttcccgctactcctaactaatcctggacatctcctggaggtattcccacagacggctttgcagtcactgaaaactgccatatcgcttccttccgctgccccggcaaagcagaaacggattgctgaggcagcacgtgaggccaacatacattcactgatgagtcggacaaaagcagaagacaagactgattatatcaaccgttggcttctccacaagcttcatgaatcggccatggaagctgagctactctggacaacgtttcgatctcgactcaaaatattagatatcgaacgatggcaacgcgatgtcctccaattctggtggcgtgacgagcttttcaacccaccgtcggcctttgcagacagtgttgatattggcaaagcctccaactcagttgatccgagtttaggcactgcgccaaaggttcgaaccgagatcggatcttgggaagactacagcccaaggaatattgacttgaggaatattgactattcctcccccatgcaacgttcccagtcgtctatctggcataatagatagaatatgtatgatataataccataccggttttcttttgtttcaaggattagacctacctaggttgggggagaacagataccacaggatacccaaggtcaataaaattgtactagaatagcc

SEQ ID NO: 24111 - DNA, 1488 bp, Muscodor strobelii
  misc_feature: SGI cDNA ID NO. 568216
  misc_feature: Encodes the peptide sequence at SEQ ID NO 24112
atgcagaagcagaagcacagtaaaagtgattggagtgactggatttggtcccaagagcaaaactactattaccgttaccgctatgatcgccatggcaaaatcgaatatcaaaccaactcaggcagccagaacgttcctcgctccaccgaggatacggtgtatgatcacttagccgctggtatcaacgctgtcgatcttgagtccaccccttttgaggaatctcagaatcaatactcgaatcaagatacatatcagactggtggcgcagcccacgactcttccacatcatcccactatacacataatcccagtgtccagcaacatggcttcgcacaaacgcagccacactcatcgccatattcacaatcgcactcatcatcacacgcgcaactgcactcacagtcccactcatcgtcacactcgcatccgcactcacattcacacgcatcgtcacatgccccatcgcattcacattcacagtcctactcgcactcgggtaaggacaagggcaaaggcaaaagtaagggaaaggcagtagcggatacagtatactacgatgatgatcctgttgaagaacatgactaccagcatggttatactgaggcggcacacagctcgggcgcgcaaggttcctcttataacacaagaagtcagagctatgatgatgattactatcaagacacagaagatgctcaaatgcagcaagctatggccaacagtcgcaacgaacaatatggtcatcaaggcggtggagaatcatcgtattctgctggtgcttatagtgcagacaggttcgatcccagtatctatgtaccagactctcacccgaatcaagaaggtgatgccacacctcgtggaagtggtatggcaggtacttcgtatggctcaagttcagcgacccgaaacgcccctcaatattctatcagtggaacgcatggaatgtccgaacaagccgacccccgttttgttgtagaacactcttacaggttccagcctggagaggtattcaaaattctgtggtcggaaccaatgggtcaagttattggagatgacatttcagacatccaatcaattggtgctccaggcaaccgattttatgttgggtaccgacgatttatcattgtcagtacggatgaaagtcatcatagcacctgcgtgcctatcttaacttatgatcggagaggttgcttgaagaagggcgtaaaagaaagcaaacatggtattgtatatgcgatgggcaaacagcctcggcttcttaagaaagagccccatcttggttttgatccagtcgaagtcgaaatctacgccgaaggggagacactggcgaaagaatcccgagtcaactactcaaaattggtcacgattgaacataatgtgaaagtgttcttcattggacgtattcatcctgagtacttggacatcgttgcttacgctgttaacaaatgctgggaggacaaaatccacaaagccaaaaagtcaaagaaataa

SEQ ID NO: 24112 - protein, 495 aa, Muscodor strobelii
  misc_feature: SGI Peptide ID NO. 568216
  misc_feature (280)..(486): NCBI GI: 171694199 Blast Desc: protein product [Podospora anserina] gi|170947048|emb|CAP73853.1| protein product [Podospora anserina]
  misc_feature (200)..(486): NCBI GI: 116198307 Blast Desc: CHGG_07309 [Chaetomium globosum CBS 148.51] gi|88178588|gb|EAQ86056.1| CHGG_07309 [Chaetomium globosum CBS 148.51]
  misc_feature (308)..(492): NCBI GI: 256728503 Blast Desc: NECHADRAFT_101892 [Nectria haematococca mpVI 77-13-4]
  misc_feature (310)..(488): NCBI GI: 261360893 Blast Desc: conserved [Verticillium albo-atrum VaMs.102]
  misc_feature (221)..(486): NCBI GI: 164426824 Blast Desc: NCU03698 [Neurospora crassa OR74A] gi|16944564|emb|CAC18183.2| [Neurospora crassa] gi|157071492|gb|EAA32238.2| [Neurospora crassa OR74A]
  misc_feature (334)..(476): NCBI GI: 145605557 Blast Desc: MGG_09196 [Magnaporthe grisea 70-15] gi|145013370|gb|EDJ98011.1| MGG_09196 [Magnaporthe grisea 70-15]
  misc_feature (316)..(478): NCBI GI: 121716288 Blast Desc: ACLA_073620 [Aspergillus clavatus NRRL 1] gi|119403910|gb|EAW14327.1| ACLA_073620 [Aspergillus clavatus NRRL 1]
  misc_feature (304)..(467): NCBI GI: 255933217 Blast Desc: Pc12g12680 [Penicillium chrysogenum Wisconsin 54-1255] gi|211582698|emb|CAP80895.1| Pc12g12680 [Penicillium chrysogenum Wisconsin 54-1255]
  misc_feature (319)..(467): NCBI GI: 67540406 Blast Desc: AN6373.2 [Aspergillus nidulans FGSC A4] gi|40739567|gb|EAA58757.1| AN6373.2 [Aspergillus nidulans FGSC A4] gi|259479408|tpe|CBF69602.1| TPA: conserved [Aspergillus FGSC
  misc_feature (377)..(489): NCBI GI: 145603815 Blast Desc: MGG_13309 [Magnaporthe grisea 70-15] gi|145011963|gb|EDJ96619.1| MGG_13309 [Magnaporthe grisea 70-15]
MQKQKHSKSDWSDWIWSQEQNYYYRYRYDRHGKIEYQTNSGSQNVPRSTEDTVYDHLAAGINAVDLESTPFEESQNQYSNQDTYQTGGAAHDSSTSSHYTHNPSVQQHGFAQTQPHSSPYSQSHSSSHAQLHSQSHSSSHSHPHSHSHASSHAPSHSHSQSYSHSGKDKGKGKSKGKAVADTVYYDDDPVEEHDYQHGYTEAAHSSGAQGSSYNTRSQSYDDDYYQDTEDAQMQQAMANSRNEQYGHQGGGESSYSAGAYSADRFDPSIYVPDSHPNQEGDATPRGSGMAGTSYGSSSATRNAPQYSISGTHGMSEQADPRFVVEHSYRFQPGEVFKILWSEPMGQVIGDDISDIQSIGAPGNRFYVGYRRFIIVSTDESHHSTCVPILTYDRRGCLKKGVKESKHGIVYAMGKQPRLLKKEPHLGFDPVEVEIYAEGETLAKESRVNYSKLVTIEHNVKVFFIGRIHPEYLDIVAYAVNKCWEDKIHKAKKSKK

SEQ ID NO: 24113 - DNA, 3278 bp, Muscodor strobelii
  misc_feature: SGI EST ID NO. CUFF.56889.0
  misc_feature: Variant of the nucleotide sequence at SEQ ID NO 24111
ggctgagtggtggtacaaacgataagcatttcaatggttctttgcacattcttgtactctctccgcgaggagtacttgaatcagagccgcatctgttatgtcgctacaactcagctcctcccatccggccgggggtcagcagactcctcctcgaacccacccacggcgcgaaaacagtatagtcatgcatgtcggtagggtaaggttaagaaacacggcctggagtctgcagatgttccaacccacgccggccgttctggtaggagctagacctcatatggccatgtttctcatcatgggagatcattttttgactctcccacccctcgacgtcggcccgttggagcccttgtaatcggtcgaggtggggttagtcagtcttgccgccactgtcatcctgcgcgcattggcaattgacaatgataaggagagcttcgtgcccagctccgagcctatttcttcgctgtcgtgaaagtccggcgccttgggcaagtcggttatgctctagagggtgatttgataggaaccgcgtctaggcttgtaacatctttccgacattacgggcgaacacttcgcgacagtgtttggctagaaatcggaccaagtcattcgttgtcacttcatcttctcacgaggtatggacgcaacgaagagcattcgctagattcgcatggtccgacccatatgttgtggaggctgccgttcgacgagcatataatcaatcttcttcacagcggggcctgtcgacttgcccttttggaggctgcctgcgtgtgtccaatcccgagacgccctcgttatccagtttccccagccgaccatctggtgttctctgtctatacttgctctatgttttctttctgcctgacgactgcaccttttttgccgtgcgtttctgagaccaatcgtctgagctccggttgtaatcacaccgcaccatagtccgacgtcacgcctggcgaatcatttggatgaatgccacgagccgaaagatacaatcgtcttggcatagcctgcagtcagtttgaccagttctacaagcttggagtgattctaaattcaatcaaatcacggagcgcaacttaaagagccgcatcattattctaaagacttaaggcgagcaccagcggtccaccgcccagaattcgtggagccgatactgctcgtgcccccgaacaacacctgatggttcctgttccaatgacgggccgaggctacaacatgataaaatgcagaagcagaagcacagtaaaagtgattggagtgactggatttggtcccaagagcaaaactactattaccgttaccgctatgatcgccatggcaaaatcgaatatcaaaccaactcaggcagccagaacgttcctcgctccaccgaggatacggtgtatgatcacttagccgctggtatcaacgctgtcgatcttgagtccaccccttttgaggaatctcagaatcaatactcgaatcaagatacatatcagactggtggcgcagcccacgactcttccacatcatcccactatacacataatcccagtgtccagcaacatggcttcgcacaaacgcagccacactcatcgccatattcacaatcgcactcatcatcacacgcgcaactgcactcacagtcccactcatcgtcacactcgcatccgcactcacattcacacgcatcgtcacatgccccatcgcattcacattcacagtcctactcgcactcgggtaaggacaagggcaaaggcaaaagtaagggaaaggcagtagcggatacagtatactacgatgatgatcctgttgaagaacatgactaccagcatggttatactgaggcggcacacagctcgggcgcgcaaggttcctcttataacacaagaagtcagagctatgatgatgattactatcaagacacagaagatgctcaaatgcagcaagctatggccaacagtcgcaacgaacaatatggtcatcaaggcggtggagaatcatcgtattctgctggtgcttatagtgcagacaggttcgatcccagtatctatgtaccagactctcacccgaatcaagaaggtgatgccacacctcgtggaagtggtatggcaggtacttcgtatggctcaagttcagcgacccgaaacgcccctcaatattctatcagtggaacgcatggaatgtccgaacaagccgacccccgtaggttaatgccgagatatgtaatattgcaaaactaatcggaataggttttgttgtagaacactcttacaggttccagcctggagaggtattcaaaattctgtggtcggaaccaatgggtcaagttattggagatgacatttcagacatccaatcaattggtgctccaggcaaccgattttatgttgggtaccgacgatttatcattgtcagtacggatgaaagtcatcatagcacctgcgtgcctatcttaacttatgatcggagaggttgcttgaagaagggcgtaaaagaaagcaaacatggtattgtatatgcgatgggcaaacagcctcggcttcttaagaaagagccccatcttggttttgatccagtcgaagtcgaaatctacgccgaaggggagacactggcgaaagaatcccgagtcaactactcaaaattggtcacgattgaacataatgtgaaagtgttcttcattggacgtattcatcctgagtacttggacatcgttgcttacgctgttaacaaatgctgggaggacaaaatccacaaagccaaaaagtcaaagaaataagcaatgctgctcggccctgagacctttatctacttggcctcaacatagaagagaaaatgccgagtcgatttccagaggagaccattcgcctcaattacgttgaaagtagggatatctgcgtctatccccatccgttcaaaatcatccgtccgatattttgaacaacaatgttgctcgctgcaatgcgacgttcctgcagtttcatggtgtcaaaccattagaacttgtacgacatacccgccgcggcgtgataagggatagcgatagactgattatatcagcaaaaatgttacgatgctgtgccattctgcatcaatcgacagacggcataagatgccaatacgatgatacgattttacgactacagcacactagaggctgactcttcaacacttttctaagacggaaggtggaagaacgaagacatcaattttctcttcgaataattttcttgtatgagaatgatatcagtatttaatgataaagaatgagcaaaatgaaaattgcatctgag

SEQ ID NO: 24114 - DNA, 999 bp, Muscodor strobelii
  misc_feature: SGI cDNA ID NO. 568217
  misc_feature: Encodes the peptide sequence at SEQ ID NO 24115
atgactgaacgatctctacgtccgcaaaatctctcgggattgagaggcctggatcgaagtccatcaagaaggttcatcatatacacagacggaagaaaagtagaggtccaagacttcctatgccctcccgtacctccaactcctgatgagatcgaggcggagtgccttaaagtagggaaaacagtaccataccttgtatcgcattaccacgacaactgtgatcagaagatcaagaaatggtatttcggcatcgaaagtaaggacgcatttcgttatccttgccatgaaatgatctctaagttcgacttccttgaagcatcgcgagatcctcctgcattcgatttcgagaaatacgagtgtaagggcgagtgcggcggtaaggatcggctcataagagaattgagagagaagaaagagaggaacgagaaatatctcaaactgtatccgccggagtacaacgcgttgctatctaatgaaattgagtggttgagtttttgtctcgagatgctaggatgggaggacaaaggcgaaaaactcactgtcgatggtgatgatggcattgatagcgacgaccgaaggtgccccgtggcgggtaaacatgctgcaattgatgtcgccaaagacatcgaatggctacctattgatatcgctgagcgaattcctgaacagattgtcgcacatccggagcgtgtgtacaagcttgagcatgccaatcatggtctacttgatcctgatgaaaaacactgtaaatcagcgccgtctgaacttgatgctctgttgcctcgcttggagatctacaagctgagtattgactgggacaatgaactccggctggcaatgcggactggactgacgacggctcatacagacgacgttacgcctggccatttggcaattatgcgaagtcgtcctttgttggataaacttgtggtccattttcagacgattcctgttgaggaggactcgacggtgtcagcacagaataaaattgcggagtag

SEQ ID NO: 24115 - protein, 332 aa, Muscodor strobelii
  misc_feature: SGI Peptide ID NO. 568217
MTERSLRPQNLSGLRGLDRSPSRRFIIYTDGRKVEVQDFLCPPVPPTPDEIEAECLKVGKTVPYLVSHYHDNCDQKIKKWYFGIESKDAFRYPCHEMISKFDFLEASRDPPAFDFEKYECKGECGGKDRLIRELREKKERNEKYLKLYPPEYNALLSNEIEWLSFCLEMLGWEDKGEKLTVDGDDGIDSDDRRCPVAGKHAAIDVAKDIEWLPIDIAERIPEQIVAHPERVYKLEHANHGLLDPDEKHCKSAPSELDALLPRLEIYKLSIDWDNELRLAMRTGLTTAHTDDVTPGHLAIMRSRPLLDKLVVHFQTIPVEEDSTVSAQNKIAE

SEQ ID NO: 24116 - DNA, 587 bp, Muscodor strobelii
  misc_feature: SGI EST ID NO. CUFF.56768.0
  misc_feature: Variant of the nucleotide sequence at SEQ ID NO 24114
gtcgatggtgatgatggcattgatagcgacgaccgaaggtgccccgtggcgggtaaacatgctgcaattgatgtcgccaaagacatcgaatggctacctattgatatcgctgagcgaattcctgaacagattgtcgcacatccggagcgtgtgtacaagcttgagcatgccaatcatggtctacttgatcctgatgaaaaacactgtaaatcagcgccgtctgaacttgatgctctgttgcctcgcttggagatctacaagctgagtattgactgggacaatgaactccggctggcaatgcggactggactgacgacggctcatacagacgacgttacgcctggccatttggcaattatgcgaagtcgtcctttgttggataaacttgtggtccattttcagacgattcctgttgaggaggactcgacggtgtcagcacagaataaaattgcggagtagcatgaacgttcttggccttcaggcgtttttgaacgctggccgaggaaaacacttggcagattcactatgcgaggtacgtttcctgctgagcgcaaggaaagagcggtggctgacgtgataagtgatgc

SEQ ID NO: 24117 - DNA, 1386 bp, Muscodor strobelii
  misc_feature: SGI cDNA ID NO. 568218
  misc_feature: Reduced expression when VOC is produced
  misc_feature: Encodes the peptide sequence at SEQ ID NO 24118
atggcgcccctcctacccaccatcgcagctcacgcccgcaacctcttctcatctagctctcaagccgccgcaacccacttgtcccgtgctggaccccttgtcgcacgctccatcctcacagcccgaagtgacagcaacaatgacaagaacgatgacacgcagatgctcgacccctcagtcggtgttacggagcccggcgacataaacaacacattcatcttcgttctattcggtctaatcggcgtagcattcgtagtgacaggaatctggtttttcttctgggccaagaacggcggtttctacttcaagcaaaatgactgggacgactacaaatctactgtcctccgacgcaagggtcccaatgacactttactatccggtgctacgccgtcgacgaacttgggcggtggaagtatctacaaggatatcgacgacaacgccacggagtacaccggtggtctaaccgagatgacgggcgcaacgggcacgactgacgacactatgtcaacactcaccggcatcacggcaggcgcttcagatatcgcagggcgcgaacgcagacgcaaacaacgagagaagaaagagcgagagcacgagaagaagaaagacaagaagaaccgtaaatcccgccgaaagatgggcgaagacggtgcgcttgtcgacgaggaagatgaagaagccgcaaaacgccacctccgtgcctatcgctctgaacgccctgctcgtgtcggtggtctgaacaaagagtcggaggcaagcgaatgggatggatcgactaacccagagatgtcgagcttgggaggtagtttgttgagtggtcgacagagcacaccaactagtacgcctacgaagaaggagaaagagagacgcgtcgagaaagagtttgatgagaaggatttcgcgactactacgactaccgagaagaaagataaggagaaggagaaggagaagaaggcgggtggtattcgtaaagtgtacagtactgctgatcgtactgcgaagcacgagaatgatcgactgcgcgctgaggcacgacgacttgccgagaagggacgtagtgctgggtcgtcaagtgctgctgggtcgagcagacgggattatagctttcagcgtgcggatctgagagcccctattgaggaggagagtgcttcgatgttgagtgctgctgagcagcagcagcagagattcttaccccctggaggttggggcgagagcgatattggggatggaagtgatttggggactaagtcttatcgccatgtcattcctggattgtccgtctctagtggtgtgggcagtagcagtgaggtgggaagcagtgtggggacggattacgctgaggagaagagacggaagagaggcgctcagagatatcgtcgggagtaa

SEQ ID NO: 24118 - protein, 461 aa, Muscodor strobelii
  misc_feature: SGI Peptide ID NO. 568218
  misc_feature (4)..(436): NCBI GI: 39958090 Blast Desc: MGG_09227 [Magnaporthe grisea 70-15] gi|145013334|gb|EDJ97975.1| MGG_09227 [Magnaporthe grisea 70-15]
  misc_feature (1)..(425): NCBI GI: 46109938 Blast Desc: FG01851.1 [Gibberella zeae PH-1]
  misc_feature (56)..(423): NCBI GI: 256728680 Blast Desc: NECHADRAFT_26055 [Nectria haematococca mpVI 77-13-4]
  misc_feature (1)..(461): NCBI GI: 85103151 Blast Desc: NCU03679 [Neurospora crassa OR74A] gi|7635811|emb|CAB88616.1| [Neurospora crassa] gi|28923001|gb|EAA32219.1| [Neurospora crassa OR74A]
  misc_feature (4)..(454): NCBI GI: 171692383 Blast Desc: protein product [Podospora anserina] gi|170946140|emb|CAP72941.1| protein product [Podospora anserina]
  misc_feature (27)..(460): NCBI GI: 116198333 Blast Desc: CHGG_07322 [Chaetomium globosum CBS 148.51] gi|88178601|gb|EAQ86069.1| CHGG_07322 [Chaetomium globosum CBS 148.51]
  misc_feature (5)..(461): NCBI GI: 154292853 Blast Desc: BC1G_14460 [Botryotinia fuckeliana B05.10] gi|150845737|gb|EDN20930.1| BC1G_14460 [Botryotinia fuckeliana B05.10]
  misc_feature (5)..(461): NCBI GI: 156052509 Blast Desc: SS1G_06420 [Sclerotinia sclerotiorum 1980] gi|154704200|gb|EDO03939.1| SS1G_06420 [Sclerotinia sclerotiorum 1980]
  misc_feature (58)..(261): NCBI GI: 119481663 Blast Desc: NFIA_089200 [Neosartorya fischeri NRRL 181] gi|119409014|gb|EAW18963.1| conserved [Neosartorya fischeri NRRL 181]
  misc_feature (32)..(261): NCBI GI: 71002104 Blast Desc: conserved [Aspergillus fumigatus Af293] gi|66853371|gb|EAL93695.1| conserved [Aspergillus fumigatus Af293] gi|159129789|gb|EDP54903.1| conserved [Aspergillus A1163]
  misc_feature: Useful for introducing or modulating the production of volatile compounds
MAPLLPTIAAHARNLFSSSSQAAATHLSRAGPLVARSILTARSDSNNDKNDDTQMLDPSVGVTEPGDINNTFIFVLFGLIGVAFVVTGIWFFFWAKNGGFYFKQNDWDDYKSTVLRRKGPNDTLLSGATPSTNLGGGSIYKDIDDNATEYTGGLTEMTGATGTTDDTMSTLTGITAGASDIAGRERRRKQREKKEREHEKKKDKKNRKSRRKMGEDGALVDEEDEEAAKRHLRAYRSERPARVGGLNKESEASEWDGSTNPEMSSLGGSLLSGRQSTPTSTPTKKEKERRVEKEFDEKDFATTTTTEKKDKEKEKEKKAGGIRKVYSTADRTAKHENDRLRAEARRLAEKGRSAGSSSAAGSSRRDYSFQRADLRAPIEEESASMLSAAEQQQQRFLPPGGWGESDIGDGSDLGTKSYRHVIPGLSVSSGVGSSSEVGSSVGTDYAEEKRRKRGAQRYRRE

SEQ ID NO: 24119 - DNA, 2132 bp, Muscodor strobelii
  misc_feature: SGI EST ID NO. CUFF.56780.0
  misc_feature: Variant of the nucleotide sequence at SEQ ID NO 24117
ctgagccacacctccatgacaacaaccagacaacgggtacatcctgcttgctgtctcgtcttgtctagtcagtctccatcaactctgcattgaagcaacataccaccatcacgccacagctcaacaacaccgagcacatatcacagctttcaagtgtgcagacattcgtaacgactgtgctggttcaaatctttcagttttgacttggctgggttttccagcagagagtacccgccaagtccgaagaactctcaactgcaatcaccgcattccaaaccacacaaccattccatcgtcgatccaaatccatccgccattccaactgacaacatacaagatcaagatggcgcccctcctacccaccatcgcagctcacgcccgcaacctcttctcatctagctctcaagccgccgcaacccacttgtcccgtgctggaccccttgtcgcacgctccatcctcacagcccgaagtgacagcaacaatgacaagaacgatgacacgcagatgctcgacccctcagtcggtgttacggagcccggcgacataaacaacacattcatcttcgttctattcggtctaatcggcgtagcattcgtagtgacaggaatctggtttttcttctgggccaagaacggcggtttctacttcaagcaaaatgactgggacgactacaaatctactgtcctccgacgcaagggtcccaatgacactttactatccggtgctacgccgtcgacgaacttgggcggtggaagtatctacaaggatatcgacgacaacgccacggagtacaccggtggtctaaccgagatgacgggcgcaacgggcacgactgacgacactatgtcaacactcaccggcatcacggcaggcgcttcagatatcgcagggcgcgaacgcagacgcaaacaacgagagaagaaagagcgagagcacgagaagaagaaagacaagaagaaccgtaaatcccgccgaaagatgggcgaagacggtgcgcttgtcgacgaggaagatgaagaagccgcaaaacgccacctccgtgcctatcgctctgaacgccctgctcgtgtcggtggtctgaacaaagagtcggaggcaagcgaatgggatggatcgactaacccagagatgtcgagcttgggaggtagtttgttgagtggtcgacagagcacaccaactagtacgcctacgaagaaggagaaagagagacgcgtcgagaaagagtttgatgagaaggatttcgcgactactacgactaccgagaagaaagataaggagaaggagaaggagaagaaggcgggtggtattcgtaaagtgtacagtactgctgatcgtactgcgaagcacgagaatgatcgactgcgcgctgaggcacgacgacttgccgagaagggacgtagtgctgggtcgtcaagtgctgctgggtcgagcagacgggattatagctttcagcgtgcggatctgagagcccctattgaggaggagagtgcttcgatgttgagtgctgctgagcagcagcagcagagattcttaccccctggaggttggggcgagagcgatattggggatggaagtgatttggggactaagtcttatcgccatgtcattcctggattgtccgtctctagtggtgtgggcagtagcagtgaggtgggaagcagtgtggggacggattacgctgaggagaagagacggaagagaggcgctcagagatatcgtcgggagtaagagggtggtgataaggttctggggagagttgttgcgtctatgatcttacatgttgaccgatgggtcatggaatagggttagggcttggaaggcgtttgtttcaagtcttgacgtttttgtttgagtaattagctgcatgggcgtctacttgtttctgttatgatatggggctcgagcatgagatggcataggattgcaatcgctccctcacggcttcgataagggataaagacgaataggctgtacatgctagtattaggagactagtgctggccgagtgactatgaatatgaaaatgtagaatagacataatgattacgcgcaacaaacatcgcataggtttctcgggaagcattgaagatatcatgagtataggccagatgacccaaatggcacatacgcg

SEQ ID NO: 24120 - DNA, 1617 bp, Muscodor strobelii
  misc_feature: SGI cDNA ID NO. 568219
  misc_feature: Encodes the peptide sequence at SEQ ID NO 24121
atgggaagagtctcgccgcgctcctcacggatcgcgcacatggaagaatgcgatgaaaatggctccgtcatttcaggcgtagagcctacatatgcgaaatcagtagctccgggtagccctcgcaagcagctgcccaacacgagcaaatcacggaaagaatcacggcgaacagcatcatatgactcggacgactcatccgactcaactgctcaccctacagcaggaaagaagaagtcgaaatccaggcccaaggaggacagaagatcgagcgggccggtcgttgtgaaggataggagacctcctccccgatcttccaagaccgcccccatgccttaccgtgggatgccagaggatacgtattacacagtcccccagccgggactcgccagaccacgagcacagactcgtccaggatcctactatggccagagcccttcacggccgcctatacacggtgcttattttccaccacctgggccttcattccaccccccaccgtcaagctctttcggacctccatctttttccgggtcatatggagcgccgcccccaatgggtcctccacatgggcatatgccaccgccccctcatggtcaattccatccagatcttgcacagcgacttgccggacgtccttcatcagccatggggtaccgccaaccatccaatcatgacctattctacgaccacatctcagataagccatcccgcaaatcttctgtgtccagaaaagtcagcaaggacagcagagagaaggaagaccgcaagcggatgcctccaccaccccgccctaagtctactcgaccagaacgcgctccggagcgtgtcccagagcgtgtggttctcaggccgcaggcaccccatggagtttcgaggaggaagtcggtaggtttcgatgatactgagttttcagatgaggatctccattatacgtctaatcgtcgagagtcgggtgtcgagtatggttctagtccgttcaagaatcgtcgtcagagccaaagcttcgccgatgtccctattttcgattacgaggatgatgattatgatgcgcccgtacccgcccccaagcctcgatctcgcagtaggcgtgattcgcgcatgggattgggacttgaagacaaaatccgcgacgctgcccgataccaggacggccttacgagcgctccatcatctgctctgaccgctgaggcgctcagatacaagaatggtggaagtcaaccatccactcgaagcaccgaaagttgggacgaaagcgagtacaagcactcggcgaccactcacaccacaagatccagcagtggggaagacgacatcaccatcaaagttcctatgggtgcagtggtagaggtggctggtaccagaatcctctgtaaggatgggggcgatatcagtgttggtcgtaacaacacgagcatcaagggcagtgatcgaggaacagtctacggggatgatcgacggagccgttcagaccgcacgggcaatcgtctacgggccagctcccacgccgcttatgcacgagggctccctgctccggagcgacacagatacagccattctcccatgtacgcagactcttactacgacgacgatcgcgagcgatacgaccgctacgtgtga

SEQ ID NO: 24121 - protein, 538 aa, Muscodor strobelii
  misc_feature: SGI Peptide ID NO. 568219
  misc_feature (113)..(491): NCBI GI: 46109936 Blast Desc: FG01850.1 [Gibberella zeae PH-1]
  misc_feature (11)..(505): NCBI GI: 256728681 Blast Desc: NECHADRAFT_85874 [Nectria haematococca mpVI 77-13-4]
  misc_feature (9)..(468): NCBI GI: 85103160 Blast Desc: NCU03681 [Neurospora crassa OR74A] gi|7635809|emb|CAB88614.1| [Neurospora crassa] gi|28923003|gb|EAA32221.1| NCU03681 [Neurospora crassa OR74A]
  misc_feature (10)..(486): NCBI GI: 261360910 Blast Desc: [Verticillium albo-atrum VaMs.102]
  misc_feature (204)..(502): NCBI GI: 116198335 Blast Desc: CHGG_07323 [Chaetomium globosum CBS 148.51] gi|88178602|gb|EAQ86070.1| CHGG_07323 [Chaetomium globosum CBS 148.51]
  misc_feature (282)..(498): NCBI GI: 171692385 Blast Desc: protein product [Podospora anserina] gi|170946141|emb|CAP72942.1| protein product [Podospora anserina]
  misc_feature (341)..(486): NCBI GI: 145605519 Blast Desc: MGG_11761 [Magnaporthe grisea 70-15] gi|145013333|gb|EDJ97974.1| MGG_11761 [Magnaporthe grisea 70-15]
  misc_feature (370)..(479): NCBI GI: 156052505 Blast Desc: [Sclerotinia sclerotiorum 1980] gi|154704198|gb|EDO03937.1| [Sclerotinia sclerotiorum 1980]
MGRVSPRSSRIAHMEECDENGSVISGVEPTYAKSVAPGSPRKQLPNTSKSRKESRRTASYDSDDSSDSTAHPTAGKKKSKSRPKEDRRSSGPVVVKDRRPPPRSSKTAPMPYRGMPEDTYYTVPQPGLARPRAQTRPGSYYGQSPSRPPIHGAYFPPPGPSFHPPPSSSFGPPSFSGSYGAPPPMGPPHGHMPPPPHGQFHPDLAQRLAGRPSSAMGYRQPSNHDLFYDHISDKPSRKSSVSRKVSKDSREKEDRKRMPPPPRPKSTRPERAPERVPERVVLRPQAPHGVSRRKSVGFDDTEFSDEDLHYTSNRRESGVEYGSSPFKNRRQSQSFADVPIFDYEDDDYDAPVPAPKPRSRSRRDSRMGLGLEDKIRDAARYQDGLTSAPSSALTAEALRYKNGGSQPSTRSTESWDESEYKHSATTHTTRSSSGEDDITIKVPMGAVVEVAGTRILCKDGGDISVGRNNTSIKGSDRGTVYGDDRRSRSDRTGNRLRASSHAAYARGLPAPERHRYSHSPMYADSYYDDDRERYDRYV

SEQ ID NO: 24122 - DNA, 3743 bp, Muscodor strobelii
  misc_feature: SGI EST ID NO. CUFF.56786.0
  misc_feature: Variant of the nucleotide sequence at SEQ ID NO 24120
gtgacatcgcactacccacaagctggtacccgaagtaccttctgccagcgcgatcgtgggcctatcgatacctaaggctgctgcgttatagtgggcagcgcctggaacgcccctgcgacgacgctccagttagtcgtatcgataacccgtggcagcctgccctgcctgctggcccccgccgttcccgctcccaccgtctcttcccgtaccgcaacccaagggaccaaggaccaacctgaaagttgtcactgctggtctcctcctcctcttcttcccccgtcgtactgtcttccataccacacgaatactcccatatctgtctctctctgtgctcgctcggcctttgacatgcaacgacatgcttgagaccctcgcgcacatacactacatacactaaactacacaacgtaccagacgacgtctttatctatcacctcgttgctcgacaacaaccgcttccctgcagcgacaatccttcaacataacccaccatcgtcgccacagactcatcagatcttctcaccttggggtgcaccactacgcttccaccagccaaccacgactgctctctctctctctcacaggctgttgcacacccctcacggccaacggtcctcgtctccgccattctgcttacaccaatatatgtaccagcgtctgcggtgatctcgcagtctttttaccaaccgcatccttccacccacctgcttcacaccaaatacgccactacctcccgggcaacaccctgtcttccgcccgccctcctctcctcttattgtcgtctctattattgcaaccaccaccactaccgatgctgcatatcccccaaattatctctcaatctcttgcttcccgccccatccccttttcttcattgatttcctcatctatcaacccaaaattggatttcatcaatttcacccttcaccagaactaaaactagcggcgctctcaatagcgacaagctattgcaataaagttgaaactagtccgtctagtccaattcaattgcttattccaactcatatcctgacggctgggacgtctcgttttgcatccgcaagactgcgcagcagcttcaatcgaagcgcctgcgctttgtagcactcttcgcagtgcttgtcgaacatacacaactcgaggctcctcacttgctatcttaaactgtgctcaagatgggaagagtctcgccgcgctcctcacggatcgcgcacatggaagaatgcgatgaaaatggctccgtcatttcaggcgtagagcctacatatgcgaaatcagtagctccgggtagccctcgcaagcagctgcccaacacgagcaaatcacggaaagaatcacggcgaacagcatcatatgactcggacgactcatccgactcaactgctcaccctacagcaggaaagaagaagtcgaaatccaggcccaaggaggacagaagatcgagcgggccggtcgttgtgaaggataggagacctcctccccgatcttccaagaccgcccccatgccttaccgtgggatgccagaggatacgtattacacagtcccccagccgggactcgccagaccacgagcacagactcgtccaggatcctactatggccagagcccttcacggccgcctatacacggtgcttattttccaccacctgggccttcattccaccccccaccgtcaagctctttcggacctccatctttttccgggtcatatggagcgccgcccccaatgggtcctccacatgggcatatgccaccgccccctcatggtcaattccatccagatcttgcacagcgacttgccggacgtccttcatcagccatggggtaccgccaaccatccaatcatgacctattctacgaccacatctcagataagccatcccgcaaatcttctgtgtccagaaaagtcagcaaggacagcagagagaaggaagaccgcaagcggatgcctccaccaccccgccctaagtctactcgaccagaacgcgctccggagcgtgtcccagagcgtgtggttctcaggccgcaggcaccccatggagtttcgaggaggaagtcggtaggtttcgatgatactgagttttcagatgaggatctccattatacgtctaatcgtcgagagtcgggtgtcgagtatggttctagtccgttcaagaatcgtcgtcagagccaaagcttcgccgatgtccctattttcgattacgaggatgatgattatgatgcgcccgtacccgcccccaagcctcgatctcgcagtaggcgtgattcgcgcatgggattgggacttgaagacaaaatccgcgacgctgcccgataccaggacggccttacgagcgctccatcatctgctctgaccgctgaggcgctcagatacaagaatggtggaagtcaaccatccactcgaagcaccgaaagttgggacgaaagcgagtacaagcactcggcgaccactcacaccacaagatccagcagtggggaagacgacatcaccatcaaagttcctatgggtgcagtggtagaggtggctggtaccagaatcctctgtaaggatgggggcgatatcagtgttggtcgtaacaacacgagcatcaagggcagtgatcgaggaacagtctacggggatgatcgacggagccgttcagaccgcacgggcaatcgtctacgggccagctcccacgccgcttatgcacgagggctccctgctccggagcgacacagatacagccattctcccatgtacgcagactcttactacgacgacgatcgcgagcgatacgaccgctacgtgtgagcatgagaacgcacactttgtggacttagattgccatgattgatgtctgcattctcattcgattttaattctgcttcgacgcttcaaaatacggaaaagatgataccccagatttccggaatcgcataaaagcttctttcatacaaattcttctgcataccttatttgtttttccttatatcgccagattgatacaacgactagggaatacgcttaatcccttttatacgaggcatgaaataacgatatacacggctgatgacaaaccactcgacaaaaaaattgacggatacatatttaccatatacgcatggtcttgtttcatttttcatttcatttgccagggcttctttggccttttcctgtaatgatttcttttttttttgctttcctaatttacttctttcacgaagctatggctgggccatgttagcaagcgtgcgatacccatgtgctttaaagccgagttcttcgaatgacatcatagcatgcgaagaaatgttgaaccgatagatcacatctgtacagcgacgaagctcgcgcttcttctcgcatctggatatcaattccaccatagcccctcgagtggcataagaggctttgcctgagctagtccatggtgtggacttgagactcagtggcagacctgactatctgagggtgacagtggcttaatattacgttttgattggagaaatgatgaagaggatgatgggacgagcaagcatttgggacattggcattggatacaatcatagcgttatgatctgaaggatttaatgtaaccgtggaggagcacgttcaatcatgtcggccttcatcaaaagataatgataactctagcagcattgggctacttgatctgactgattttcactatctacgtgcaatacttgtaaagtcgtgctcgtagataaagagtttacatgtccagcttactactgacggaac

SEQ ID NO: 24123 - DNA, 756 bp, Muscodor strobelii
  misc_feature: SGI cDNA ID NO. 568220
  misc_feature: Reduced expression when VOC is produced
  misc_feature: Encodes the peptide sequence at SEQ ID NO 24124
atgtggccatcaagtcctagtcaatttccacccgcccttgatgaagacaaagatggtctatcgacagatgaggatgatgttgacgtatcgtctgcggagaatcccttgaaatatttcctgacgccggcgactcctcaagaggaggaggaagaactagatttcgattttgaattcgatgctggcatcgaagattcgaacagctcccgtcagattatgcgaagcatatcgccctcgactctcgatggtctcaagaagtacaaaccgaagagtaagaacccggactgcgccatcttagacgatgatgacgacgacgacgatgaggaagactacatccgcttctcacctcgcaaatcaaatttactccccttcagcttcgaagactattttgatcgacctcggcaaagctccgctcacaccactttatcacattctgctgaggcgctgctatcaccttcttcattccatgtcgggtcacctcgaggcagactagtcaagcggttcacgccaccgcctcgccgttcgttcccacgcggccgcccgcgtagtctttctctccagcgacgacactcatggcgcgagcctagccctgacgtttggtctatcgaggaggaaccggagaaagagacgatgagtgaaatgggtcttagcgtcgaagaccttgatgatggacaggagaagaagacacaacctatagacataccggctgcaaagccccgtctcaagagagttcggttcgttctgccagcgaaggagtaa

SEQ ID NO: 24124 - protein, 251 aa, Muscodor strobelii
  misc_feature: SGI Peptide ID NO. 568220
  misc_feature (2)..(251): NCBI GI: 256728509 Blast Desc: NECHADRAFT_96866 [Nectria haematococca mpVI 77-13-4]
  misc_feature (2)..(249): NCBI GI: 116198339 Blast Desc: [Chaetomium globosum CBS 148.51] gi|88178604|gb|EAQ86072.1| [Chaetomium globosum CBS 148.51]
  misc_feature (56)..(246): NCBI GI: 261360840 Blast Desc: VDBG_09378 [Verticillium albo-atrum VaMs.102]
  misc_feature (34)..(251): NCBI GI: 171692389 Blast Desc: protein product [Podospora anserina] gi|170946143|emb|CAP72944.1| protein product [Podospora anserina]
  misc_feature (23)..(251): NCBI GI: 85103172 Blast Desc: NCU03684 [Neurospora crassa OR74A] gi|7635806|emb|CAB88611.1| [Neurospora crassa] gi|28923006|gb|EAA32224.1| [Neurospora crassa OR74A]
  misc_feature (38)..(251): NCBI GI: 46109932 Blast Desc: FG01848.1 [Gibberella zeae PH-1]
  misc_feature (2)..(251): NCBI GI: 39958151 Blast Desc: [Magnaporthe grisea 70-15] gi|145013329|gb|EDJ97970.1| [Magnaporthe grisea 70-15]
  misc_feature (35)..(202): NCBI GI: 154298763 Blast Desc: [Botryotinia fuckeliana B05.10] gi|150857669|gb|EDN32861.1| [Botryotinia fuckeliana B05.10]
  misc_feature (20)..(201): NCBI GI: 156052387 Blast Desc: SS1G_06359 [Sclerotinia sclerotiorum 1980] gi|154704139|gb|EDO03878.1| SS1G_06359 [Sclerotinia sclerotiorum 1980]
  misc_feature: Useful for introducing or modulating the production of volatile compounds
MWPSSPSQFPPALDEDKDGLSTDEDDVDVSSAENPLKYFLTPATPQEEEEELDFDFEFDAGIEDSNSSRQIMRSISPSTLDGLKKYKPKSKNPDCAILDDDDDDDDEEDYIRFSPRKSNLLPFSFEDYFDRPRQSSAHTTLSHSAEALLSPSSFHVGSPRGRLVKRFTPPPRRSFPRGRPRSLSLQRRHSWREPSPDVWSIEEEPEKETMSEMGLSVEDLDDGQEKKTQPIDIPAAKPRLKRVRFVLPAKE

SEQ ID NO: 24125 - DNA, 2074 bp, Muscodor strobelii
  misc_feature: SGI EST ID NO. CUFF.56838.0
  misc_feature: Variant of the nucleotide sequence at SEQ ID NO 24123
gcaggatccccgcttgtgcatttcgatcttctaagacaaccgcgaatgacacgaaagctcacgagcctcaacagcgtcgcaaacatatgcacattcttgagcttgcctggagctctagggcaaaagagggtgtgcaaccatgtcagatgcctacctgaactagcggggggtggcctcatgtcttaccgagttcttcgtatccacgtccggatttcacatagggtcacccaccatacaatatgcgtgaatctgttttaggaataccaaatgccgtctcctcgctggagtcttgcggtattcctgttctttcgtcttaacaccggtgagtcgtcgcccgctgcgccctgtgatgtataggtacggcaagagaatgccgtccccgtcgcccttggggttctgcggagcttcaagtcctctcggcagctgagtgaccgacctagtggtggtcaatctactcacaaggcagcctctccaaataactggtgactaacgaatcaccagccacctctctgacaagtgtcttttgccttccatcttgtattagtatatataatccggccatgccgccatatttctcttctatctgtcctacctagtgtttcgcgatatatcacttttcgcttcgaggctttgggtcttcttcctccatctttctcagcttcatacacatccttccttgagccggctcaggcccggcacattattgtagggttctacaaaaggcgagaccttccattccgaatccaagaagttgttcttctctgtcattgtgaaatgacccctctggaggcttatcttccttaccaatatccgcctttcatccgaactcaaacttaactcattaccatgcctcttctttcacccagagatatgagccgagtgcacagggactcgtggcctccggccggaatgtggccatcaagtcctagtcaatttccacccgcccttgatgaagacaaagatggtctatcgacagatgaggatgatgttgacgtatcgtctgcggagaatcccttgaaatatttcctgacgccggcgactcctcaagaggaggaggaagaactagatttcgattttgaattcgatgctggcatcgaagattcgaacagctcccgtcagattatgcgaagcatatcgccctcgactctcgatggtctcaagaagtacaaaccgaagagtaagaacccggactgcgccatcttagacgatgatgacgacgacgacgatgaggaagactacatccgcttctcacctcgcaaatcaaatttactccccttcagcttcgaagactattttgatcgacctcggcaaagctccgctcacaccactttatcacattctgctgaggcgctgctatcaccttcttcattccatgtcgggtcacctcgaggcagactagtcaagcggttcacgccaccgcctcgccgttcgttcccacgcggccgcccgcgtagtctttctctccagcgacgacactcatggcgcgagcctagccctgacgtttggtctatcgaggaggaaccggagaaagagacgatgagtgaaatgggtcttagcgtcgaagaccttgatgatggacaggagaagaagacacaacctatagacataccggctgcaaagccccgtctcaagagagttcggttcgttctgccagcgaaggagtaatcggcatataaattgcatctttccttatttttactctacggagatcgatacttagctgcatgctatggagttggcagggggttcgtgaaatttcctcctcattcagcattcaatatcggcttcttattctcatacagcacatctagcattcacggcgtttggtcaagcatatgttggatgggtatacactggggggctcggaatagtggtaatttgatattcagatagctatagaagatggaaataccctcaattattccaatttttcttcaatttctgtgtcttgcgtgttcatgtgcgtcttgggcattccactatctattttcataccgtacaaagacatcacgatattgccatacaattgcaatttttgagaagctcaaaccttctctcgtttgatgcatgtctg

SEQ ID NO: 24126 - DNA, 819 bp, Muscodor strobelii
  misc_feature: SGI cDNA ID NO. 568221
  misc_feature: Encodes the peptide sequence at SEQ ID NO 24127
atgcctcttctttcacccagagatatgagccgagtgcacagggactcgtggcctccggccggaatgtggccatcaagtcctagtcaatttccacccgcccttgatgaagacaaagatggtctatcgacagatgaggatgatgttgacgtatcgtctgcggagaatcccttgaaatatttcctgacgccggcgactcctcaagaggaggaggaagaactagatttcgattttgaattcgatgctggcatcgaagattcgaacagctcccgtcagattatgcgaagcatatcgccctcgactctcgatggtctcaagaagtacaaaccgaagagtaagaacccggactgcgccatcttagacgatgatgacgacgacgacgatgaggaagactacatccgcttctcacctcgcaaatcaaatttactccccttcagcttcgaagactattttgatcgacctcggcaaagctccgctcacaccactttatcacattctgctgaggcgctgctatcaccttcttcattccatgtcgggtcacctcgaggcagactagtcaagcggttcacgccaccgcctcgccgttcgttcccacgcggccgcccgcgtagtctttctctccagcgacgacactcatggcgcgagcctagccctgacgtttggtctatcgaggaggaaccggagaaagagacgatgagtgaaatgggtcttagcgtcgaagaccttgatgatggacaggagaagaagacacaacctatagacataccggctgcaaagccccgtctcaagagagttcggttcgttctgccagcgaaggagtaa

SEQ ID NO: 24127 - protein, 272 aa, Muscodor strobelii
  misc_feature: SGI Peptide ID NO. 568221
  misc_feature (11)..(272): NCBI GI: 256728509 Blast Desc: NECHADRAFT_96866 [Nectria haematococca mpVI 77-13-4]
  misc_feature (23)..(270): NCBI GI: 116198339 Blast Desc: [Chaetomium globosum CBS 148.51] gi|88178604|gb|EAQ86072.1| [Chaetomium globosum CBS 148.51]
  misc_feature (77)..(267): NCBI GI: 261360840 Blast Desc: VDBG_09378 [Verticillium albo-atrum VaMs.102]
  misc_feature (11)..(272): NCBI GI: 46109932 Blast Desc: FG01848.1 [Gibberella zeae PH-1]
  misc_feature (55)..(272): NCBI GI: 171692389 Blast Desc: protein product [Podospora anserina] gi|170946143|emb|CAP72944.1| protein product [Podospora anserina]
  misc_feature (14)..(272): NCBI GI: 85103172 Blast Desc: NCU03684 [Neurospora crassa OR74A] gi|7635806|emb|CAB88611.1| [Neurospora crassa] gi|28923006|gb|EAA32224.1| [Neurospora crassa OR74A]
  misc_feature (10)..(272): NCBI GI: 39958151 Blast Desc: [Magnaporthe grisea 70-15] gi|145013329|gb|EDJ97970.1| [Magnaporthe grisea 70-15]
  misc_feature (56)..(223): NCBI GI: 154298763 Blast Desc: [Botryotinia fuckeliana B05.10] gi|150857669|gb|EDN32861.1| [Botryotinia fuckeliana B05.10]
  misc_feature (14)..(222): NCBI GI: 156052387 Blast Desc: SS1G_06359 [Sclerotinia sclerotiorum 1980] gi|154704139|gb|EDO03878.1| SS1G_06359 [Sclerotinia sclerotiorum 1980]
MPLLSPRDMSRVHRDSWPPAGMWPSSPSQFPPALDEDKDGLSTDEDDVDVSSAENPLKYFLTPATPQEEEEELDFDFEFDAGIEDSNSSRQIMRSISPSTLDGLKKYKPKSKNPDCAILDDDDDDDDEEDYIRFSPRKSNLLPFSFEDYFDRPRQSSAHTTLSHSAEALLSPSSFHVGSPRGRLVKRFTPPPRRSFPRGRPRSLSLQRRHSWREPSPDVWSIEEEPEKETMSEMGLSVEDLDDGQEKKTQPIDIPAAKPRLKRVRFVLPAKE

SEQ ID NO: 24128 - DNA, 2074 bp, Muscodor strobelii; identical to SEQ ID NO: 24125
  misc_feature: SGI EST ID NO. CUFF.56838.0
  misc_feature: Variant of the nucleotide sequence at SEQ ID NO 24126

SEQ ID NO: 24129 - DNA, 4821 bp, Muscodor strobelii
  misc_feature: SGI cDNA ID NO. 568222
  misc_feature: Encodes the peptide sequence at SEQ ID NO 24130
atgagacatcaactctcgtccccagttcaatggattaccacgcaagctgcgctgcacgcatcacggcagcatggtcagcgatatgtcgagatcggtccatcagacacactgcggtccatgttacagaagactctgtcacagtgtctaggcgctgatcatgaccatgcgtctgaatgtcttactttcggagagctgttagatgcagggaacgagactgttggagacgagtcagacgtcctgacagccgattcgaaggatgtgcttcagacccaaaaagctatcgagtctagccccgtggtgctgcccttaccacctgacgttgcatccccaccgcagcagtctagcaggacgcttactatagaagacgtatcaccttcagcagcagaggtagtgagagccattatcgctttcagacttcgggtgtctcaagacaacattgacacgactcgctctgtgagaactatggccaagggcaggtctgcggtccagaacgaaatcattggtaatatgacggctgaattcggccagcttccagacgcggctgaagacatgcctcttcttgagctcagccaggatctgcagcacactttcagcggcaagttcggtaaattcctcaacggctggctggtcaaaaaggttgaagcgaaacttgctccatctctcaatgtgtcgaaaatccgctcccacctcagcaatgctttcgggcttcgcgaaggccgtcaaaactcgttcttcttgggtgcggacttcgatgagatcctcttgcgtctaaataatgaacaggactcctggcaggccgtcgatcgttgggctagaacatacatgaaaatccacggtctggagcaagcgatcgactctttagacacacacagtggcacttctagtaggagaggtgcaacatcacgggaggttatgtttgctgatactcagctggctgagttcggacgcgaccttacaaaattaatggctaggtactttagctcggaaataagtaccgaagagtcgcaggctgcaggctcactaaaggaacagacgggagagcttgctgagcagaacacaagtcacttaaatgctgagctaggcgatgatttcatcaatggcacccgaccccttttcaagcctgagatggtatatcgatatcaatctggctggaactgggcagtgcaagatctgtacgtcaccctggcgaatctggtcatccatacacagacagaagatacacgagaatcccatatagcgtgcaaatcggttgatgatgcacttgagagacttcaacctcgtgctacagagcgtacatatgagtgtgctgagtacctgttggacaaatgggaacgaagttctgcgtcgtcggctcaggaacattgtctcttattccttcgccggctattacaaaagagtacttacgataaagccacaccgcccttgcctttatctgacgcaccaactcgcttcacagctccgcgcaccatcatcaccaagtctggcgacattacctatgaagaagtatcagtcacagacgcaaatattgaaagcaaaaatgatgtaacctccttaaggcgttctgagctcaactcgactgcttcggaaccagctaccatgaccacgctgccaccaacactactacttacacgagactctcaaagcaaccactgggagattgatactaagctcacagcacaactacatgaagctgagcgatgttttgttacggagggtgcttctggcgtgtgcgggactgctctagtcattggtgctggaccacaatctattgggtttcttgtcgtccggaggctgcttgaatcgggatgccgtgttgcgctatgtactacacgcttaacactggccagccgcaaaactatcgccaagctcttcgccgaggcagccaggtcaggagctgagcttgtattgctgccattcaaccaggccagcgtccaagatgtcaatagcgtagtagcttatatcaacgactctttagggtgggaaatcgatcatttagtcccgtttgcggctatgccagagccgggtagaactattcaagatatcgactcccagtcggagctcgcgcaccgtgcgatgctgaccaacacgttaaggcttatgggtagcattgccacatcaaagcagcggcgtcacgttctgaatcactccacccaagtgcttgtaccattatcccctaatcacggcgagttcggcagcgacgggctatacgccgaatctaagctagcgcttgagacgttactaaacagatggacatcggagccgtggtccgatcagctgtctatctgcgccgtccgcattggatggacgcgcggcacatccatcatggccgacaatgacatccttgcggaggaaatcgagaaacttggtgttcgcaccttctcggctctagaaatggcaaccctcctgacgcttgttatgtcgcctggcatagcagaagcttgcacgctacaaccgatactttgcgacttcgctgggggttctcagctgatgccagatatacggggtattcgggcttccatcgagagcactgccttattgcaaagaagactgaataatgaatctgaacagaatgatggttctacagcggctccggcgatggagcagagagctcgtcctcgaaatccattcccgctccttcctagacaacatgaaaacgcgacaaactgcaaaccccaagcactgttggacctagactccactgtcgttattaccggattcgcagagcttggtgcagctggtagttcacgaactcggtgggagctagaagcctacggagaatattctcttgaaggatgcgttgagttagcgtggatgacggggctgatccgatacataccgaaccgggtctatgagggcaaagacgatggccccggctgggtcgagtgcgagactggagctcctattcgggagatggacgtcaaaagcaaattcgagggccgaatacttgagcatacgggcattcgcatcctagacccagacgagtatgccaacccagatccgcacctccgcaacatgctacacgaggttggcgtacaggaagatctcggcccattcgagtgctcacccgaagcagccgaggccctcaaggcacgccatggcgatgccgtcgacatccttagcaacgacggtgttacggctgtggtccgtgtccgacgcggtgcctcgatttttattccgaaggcaatgaagacagacttcttcgtgggcgctcagatacctactggctggagtgccgagcgttacggcatcccgcccgaggtgataacacaggtcgaccagtcaaccctatacgtacttgtgtgtgttgtcgaagcttttctttgcgctggaatcaccgacgtttacgagctgtataagtatatacatgtgtcagagctagccaactgcatcggttcgagcgctggcggcggcacagcagcacaaaccttcatgaagcaacggctgctgggaaaagatgcacagagcgatcttttggccgagagcttcgtagggtctgcagccgcctgggtcaacatgttgctgctctcggcttccggtcccattaaaacagcggccggcacgtgtgctacatctattgagtcgctcgatacggcgtgtgacctgatcacaggcggccggtccaaggtgtgcctagtgggcggccatgatggtttcgtatcttcaatcttttacgagtttggcgaattgggtgctctcggcaatgcagctaacgcggcacgtggtgggcgtgagccccttgagatgtcgcggcccttcacgtcgacgcgcggcggatttgcattcggcgatggcgttggcatccaggtcgcatgtaccgccgcactagctctcgagatgggcctcccaatctacggtgtcgttgccatgacccatctggctggtgataagctaggtcgctcagtgcctgcacccggtcgcggtatactttcggcagctaagcagtcgcaatctgccacggctgtcatatcgccggttctgatgaacccgtcactgcgcgctgagcgcattcgctcatcacttgcacacattgagcgacgcgcagagatagatgaggcagcggttcgcgcagatgcacagcgagatggacacagcttagccatcacggaggcacttgtccagggtattcgcgaagctacacgccttgagaagaaggcgatactacgcacgctaggccacagctactgggtgggccatccaggcatctcacccattgtgggggctctgtctgtatttggtctcggggttgacgacattacatttgccagtctgcacggaacgggaacgaagctcaacgatgtcaacgagtgcgcaacgctcgacaggcaaatgcgccacctcgggcgccacgctggtaatccgctcttcacgattgcgcagaagtcagtcgttggccacggactcagtgcggcgggcgcgtgggcgattaacggggctctgcaggctatgcatgccggtgtaattcccggcaaccgtaacgctgacgacattgataaggagctcgagccttttgacaggctcctactgaccaacgaaaatatcgttgttcagcctgaggatatgaaggcgttctccgtcacttcctttggcatcggtcagaaaggcggacaagctatcattgtacacccgcgttacgtgtatgcggccctcacagaagagcagtaccaagcgtaccgcgtcaggcaaatcgctagagggcgtcaggctgctcgcgcacttgatcgagcgtttcatggtcaacccttattccaagctagagatgatacgccgtacaatcgtgacgagtacgacttcttgctagaccccctagctaggacctcttag

SEQ ID NO: 24130 - protein, 1606 aa, Muscodor strobelii
  misc_feature: SGI Peptide ID NO. 568222
  misc_feature (1021)..(1276): Pfam Id: PF00109 Pfam Desc: Beta-ketoacyl synthase, N-terminal domain
  misc_feature (1346)..(1494): Pfam Id: PF02801 Pfam Desc: Beta-ketoacyl synthase, C-terminal domain
  misc_feature (1404)..(1494): Pfam Id: PF02801 Pfam Desc: Beta-ketoacyl synthase, C-terminal domain
  misc_feature (506)..(1606): NCBI GI: 156848710 Blast Desc: Kpol_1002p24 [Vanderwaltozyma polyspora DSM 70294] gi|156117921|gb|EDO19378.1| Kpol_1002p24 [Vanderwaltozyma polyspora DSM 70294]
  misc_feature (1)..(1606): NCBI GI: 238506495 Blast Desc: fatty acid synthase alpha subunit FasA, [Aspergillus flavus NRRL3357] gi|220689162|gb|EED45513.1| fatty acid synthase alpha subunit FasA, [Aspergillus flavus NRRL3357]
  misc_feature (1)..(1604): NCBI GI: 145246070 Blast Desc: An12g01980 [Aspergillus niger] gi|134079996|emb|CAK48480.1| protein product [Aspergillus niger]
  misc_feature (519)..(1606): NCBI GI: 255938598 Blast Desc: Pc14g00750 [Penicillium chrysogenum Wisconsin 54-1255] gi|211584690|emb|CAP74216.1| Pc14g00750 [Penicillium chrysogenum Wisconsin 54-1255]
  misc_feature (502)..(1606): NCBI GI: 259149926 Blast Desc: Fas2p [Saccharomyces cerevisiae EC1118]
  misc_feature (502)..(1606): NCBI GI: 151942570 Blast Desc: fatty acid synthase alpha subunit [Saccharomyces cerevisiae YJM789] gi|190407733|gb|EDV10998.1| fatty acid synthase alpha subunit [Saccharomyces cerevisiae RM11-1a]
  misc_feature (502)..(1606): NCBI GI: 6325025 Blast Desc: Alpha subunit of fatty acid synthetase, which catalyzes the synthesis of long-chain saturated fatty acids; contains beta-ketoacyl reductase and beta-ketoacyl synthase acid
  misc_feature (502)..(1606): NCBI GI: 256270458 Blast Desc: Fas2p [Saccharomyces cerevisiae JAY291]
  misc_feature (510)..(1606): NCBI GI: 169778598 Blast Desc: [Aspergillus oryzae RIB40] gi|238499007|ref|XP_002380738.1| fatty acid synthase alpha subunit FasA [Aspergillus flavus NRRL3357] protein product fatty
  misc_feature (1)..(1604): NCBI GI: 189212048 Blast Desc: fatty acid synthase subunit alpha reductase [Pyrenophora tritici-repentis Pt-1C-BFP] gi|187979550|gb|EDU46176.1| fatty acid synthase subunit alpha
  misc_feature (3)..(1606): SWISSPROT Homolog: EC 1.1.1.100 3-oxoacyl-[acyl-carrier-protein] reductase
  misc_feature (3)..(1606): SWISSPROT Homolog: EC 2.3.1.86 Fatty-acyl-CoA synthase
  misc_feature (3)..(1606): SWISSPROT Homolog: EC 2.3.1.41 Beta-ketoacyl-acyl-carrier-protein synthase I
  misc_feature: Useful for fungicidal and/or biocontrol applications
MRHQLSSPVQWITTQAALHASRQHGQRYVEIGPSDTLRSMLQKTLSQCLGADHDHASECLTFGELLDAGNETVGDESDVLTADSKDVLQTQKAIESSPVVLPLPPDVASPPQQSSRTLTIEDVSPSAAEVVRAIIAFRLRVSQDNIDTTRSVRTMAKGRSAVQNEIIGNMTAEFGQLPDAAEDMPLLELSQDLQHTFSGKFGKFLNGWLVKKVEAKLAPSLNVSKIRSHLSNAFGLREGRQNSFFLGADFDEILLRLNNEQDSWQAVDRWARTYMKIHGLEQAIDSLDTHSGTSSRRGATSREVMFADTQLAEFGRDLTKLMARYFSSEISTEESQAAGSLKEQTGELAEQNTSHLNAELGDDFINGTRPLFKPEMVYRYQSGWNWAVQDLYVTLANLVIHTQTEDTRESHIACKSVDDALERLQPRATERTYECAEYLLDKWERSSASSAQEHCLLFLRRLLQKSTYDKATPPLPLSDAPTRFTAPRTIITKSGDITYEEVSVTDANIESKNDVTSLRRSELNSTASEPATMTTLPPTLLLTRDSQSNHWEIDTKLTAQLHEAERCFVTEGASGVCGTALVIGAGPQSIGFLVVRRLLESGCRVALCTTRLTLASRKTIAKLFAEAARSGAELVLLPFNQASVQDVNSVVAYINDSLGWEIDHLVPFAAMPEPGRTIQDIDSQSELAHRAMLTNTLRLMGSIATSKQRRHVLNHSTQVLVPLSPNHGEFGSDGLYAESKLALETLLNRWTSEPWSDQLSICAVRIGWTRGTSIMADNDILAEEIEKLGVRTFSALEMATLLTLVMSPGIAEACTLQPILCDFAGGSQLMPDIRGIRASIESTALLQRRLNNESEQNDGSTAAPAMEQRARPRNPFPLLPRQHENATNCKPQALLDLDSTVVITGFAELGAAGSSRTRWELEAYGEYSLEGCVELAWMTGLIRYIPNRVYEGKDDGPGWVECETGAPIREMDVKSKFEGRILEHTGIRILDPDEYANPDPHLRNMLHEVGVQEDLGPFECSPEAAEALKARHGDAVDILSNDGVTAVVRVRRGASIFIPKAMKTDFFVGAQIPTGWSAERYGIPPEVITQVDQSTLYVLVCVVEAFLCAGITDVYELYKYIHVSELANCIGSSAGGGTAAQTFMKQRLLGKDAQSDLLAESFVGSAAAWVNMLLLSASGPIKTAAGTCATSIESLDTACDLITGGRSKVCLVGGHDGFVSSIFYEFGELGALGNAANAARGGREPLEMSRPFTSTRGGFAFGDGVGIQVACTAALALEMGLPIYGVVAMTHLAGDKLGRSVPAPGRGILSAAKQSQSATAVISPVLMNPSLRAERIRSSLAHIERRAEIDEAAVRADAQRDGHSLAITEALVQGIREATRLEKKAILRTLGHSYWVGHPGISPIVGALSVFGLGVDDITFASLHGTGTKLNDVNECATLDRQMRHLGRHAGNPLFTIAQKSVVGHGLSAAGAWAINGALQAMHAGVIPGNRNADDIDKELEPFDRLLLTNENIVVQPEDMKAFSVTSFGIGQKGGQAIIVHPRYVYAALTEEQYQAYRVRQIARGRQAARALDRAFHGQPLFQARDDTPYNRDEYDFLLDPLARTS

SEQ ID NO: 24131 - DNA, 450 bp, Muscodor strobelii
  misc_feature: SGI cDNA ID NO. 568223
  misc_feature: Encodes the peptide sequence at SEQ ID NO 24132
atggttaaacacgtcttcagcgccttctcccacgacggatttgcgcaatctggcgatcaccagcacgaggcactagcccaactccttgactcggtcgctacaccagacggcaaattccgcgttatcggccaggacttccatctcggcactgaaatcaaaggcagagagaacgtgaaagagttcctcaagactacttttgtcccggccttctacgacaacatcgacacgagccaggcgcccgtctcagaccctcctcaggttatcggcaacccagacgcccccaactcgtcgtttgccatagttttccatagtgaacttgtttccaagactggccagccttggatcaacgatgctgcattcattgtgaataccgacagccagtcgaagtgggcggatgtcaagttgttcatggacacgcagcacttgcacaaacatatgacgggttcttga

SEQ ID NO: 24132 - protein, 149 aa, Muscodor strobelii
  misc_feature: SGI Peptide ID NO. 568223
  misc_feature (23)..(146): NCBI GI: 238842067 Blast Desc: conserved [Microsporum canis CBS 113480]
  misc_feature (29)..(146): NCBI GI: 119194975 Blast Desc: [Coccidioides immitis RS]
MVKHVFSAFSHDGFAQSGDHQHEALAQLLDSVATPDGKFRVIGQDFHLGTEIKGRENVKEFLKTTFVPAFYDNIDTSQAPVSDPPQVIGNPDAPNSSFAIVFHSELVSKTGQPWINDAAFIVNTDSQSKWADVKLFMDTQHLHKHMTGS

SEQ ID NO: 24133 - DNA, 867 bp, Muscodor strobelii
  misc_feature: SGI EST ID NO. CUFF.56845.0
  misc_feature: Variant of the nucleotide sequence at SEQ ID NO 24131
cggggattccttgcacgaccatgagcgccttcgtggccgaagtatatacaacggagattgtctcatatactaattctttttcgttttcttccaccccataaacttatctaacttagcaattgactagcaagttctttgccatcaattatcattttcatttgccggcagctcgatctcgcgcaaaaaagacgccatggttaaacacgtcttcagcgccttctcccacgacggatttgcgcaatctggcgatcaccagcacgaggcactagcccaactccttgactcggtcgctacaccagacggcaaattccgcgttatcggccaggacttccatctcggcactgaaatcaaaggcagagagaacgtgaaagagttcctcaagactacttttgtcccggccttctacgacaacatcgacacgagccaggcgcccgtctcagaccctcctcaggttatcggcaacccagacgcccccaactcgtcgtttgccatagttttccatagtgaacttgtttccaagactggccagccttggatcaacgatgctgcattcattgtgaataccgacagccagtcgaagtgggcggatgtcaagttgttcatggacacgcagcacttgcacaaacatatgacgggttcttgagcctcctccgatttgctacttcgtggaatgactattctccgccgagcctcgcatgcctctggcttctatcactgcggttgggttccaaccactgtaatcacattcgttttagcgtagaacactatatgacactcgtttctcttctgcgcgtgatcggcaattcgaagtgattagataacagactccaatgtgtgaacaacttgtagttctaacggaattcaaag

SEQ ID NO: 24134 - DNA, 9261 bp, Muscodor strobelii
  misc_feature: SGI cDNA ID NO. 568224
  misc_feature: Encodes the peptide sequence at SEQ ID NO 24135
atgctagtcacgacacatagtactactagccctccttataggccatgtcaggaggaggaattgccctatcgtgagctggaagacgcgctgagagaggcttgggccgatgtactagatatagaccccgatgatgttgtggccgattcacactttttcaagctcgggggcgactcaatcgcagcagccgagttagcagtcctggcggagcaacgtggtctgagccttactcgtccgatgatctttcgagagcccgtctttactgctatggtggctcttgtttccgtgtctaaccagccgtggaaagcaaccgccgtcgccgcggcgtcgcagccattaccattttcattagtgagcaaagaagaagctgcgcttgcaatagagcagtgccatctaagcccagaagatgcggcaatagttcaggatgtatatccggccacgccactacaatctgggcttatggcacattccattagccagcctggcacctatgtgtcttcgtgggtatttcgcctaagcaagaaatccggtcttgaccccgagtggctatgcgcgatactcagtcgcgttgcacaaaaactgcccatcctcagaaccgcgatggcgacctcggctgagcatggctttgtccaagtggttttggcacgcccatcgcctatcacgatcgtccgctttgcttcgatgcgtgaccttgaccccaacacacggcgacccccggtggctataggcaagccacttgtgaatatcaaggtagctgtcaacgaggacggcggagaccagcttgcgattctttggcatactcatcatgccgtttatgacatggcaacctttgccctgatcgccgagcatataagcgacatagccttaggtctgaataggattcctgagccgccgccattcgcgtcctttgtttcgtatgtccttgaccagatccactacagctccgagtggcggcacttttggtcggaacatctacgagactctccaatatctcgtttcccatacaacatgtataagtccaaggtcacagaccaggacctcgagaagcggatagcacagccgatagatgccgaaattacgtatcgcactgacgctctatacacgcatactctctcatgcgccaataccaatcagtcaggctttactctcgccaatgtcttcaaagcgacatgggcatatcttttaagctactacgaacactcggacaacgttgtattcggtgtcacgagcagcggacgtcatgcgcctgtgccaggttgttccgatatggttgccccgacagttgccacgacgcctatgcatgttaagctagataaagttgaccctatggcgactatcgtcgatctcctgcagcatgtcaccatgctagccgcggaatcaagcgtttgggaacaggttggcttgccacagatccggaagctaggcgccgacgaacgccgagcgtgtacttttcgaactatggtaaacgtacagactacggacgccctaaacagtgttagcgaggtttcggatatgcttgtacagacgcctatgggagaaaaacaggtcgagcccgtcggttatgtactcgtactggaactatgcgcacgccagggggatacggcgcccttctgtctttcctacgacagtcgggtgttgcagtctgaccaggttgttcagatcgccgaacagtttgaaaagacattcagtctcttcctggaaagtcctagccaaacactggatagtatacaaacaatttcttcgatgcctgatgagcgtatcgaggattcgttcgacaccttttgggcaaacaagctccttagctatgtcggcactgcttttcctgaaattcccaaggagcacaagccgctcacggacgcctacatgaatagtgaaatcggcctgattgttgaccaggaagtgatggttacaacagtacttcaagcagcctgggctttgaccttgagtcagtattgcgaaaacagcgatgtcgtcttcggcatcgatttgcacagtaattgtgatgatcataattccgttattggcccggccgttgcacacgctctgccgcaacgcattgtaatagataaacctgacgcacttgtagtggagctcttgacagaagtgcaagcgctgacacatgaagttgctatcaacgcgcagtttgatttatcaagaattagagaccttaacagctcatcaagtgctgccgctgattttcagaacgtcctcatcatccattctgcaattcctgctgatattgacaacctcactaccactaaagtccgccaagcttacagtttcggtctagtggttgagattacccctattcctcaaagttcaacactcaagatatgcatcaacttcgatagtgctatgatagagcaggcccaggtccggcgacttatagagcactatgagcatgtccttggccaaattagcaacatgagctccttaccagggctccgagtcaaggacattaatcatcttccagacgcacatcgcgacgagctttttacctggaatagcgatgtgccagcaccactcgaacgcctggtccacgcaatgtttgaggagcaagttagtttgcaacccgatgcgccagccatatgtgcacgcgacggcgaatggacatatgcagagctggatcgcgacgcagagaaacttgcccggtggttgcgcagccttggaacgggcccgggcaagtttgtgctattgctattcgagaagtgcggcctagcagctgtggtcatgttaggcatcctcaaggccggcggtacgagctctgcactcgatcccgagactcccccggagcaattgcgcagccttatcaagaccttcggagatgcgtgcgccgtcatcatcagcagcgccaaaaatcgcgacctggccctcaacttacagacaggcaagcgaacagagttcgtagatactaagtcactagaacgcatttcaacaggggctccgtgccccttccgtatcaccgaaggccctgacatccatgacaaggccgcaccgagtgacattgcttttgtccagttcacgtcgggttcaaccggcgcacccaaagggattcttgtcccacacaaggctttcgctagcagtatccgtgcccgttctcatgtcatgcgctactcgacaggtgccggctcacgcaattatcagtttgcagcgtacacgtcagatgtgagcacaagcgatatattcacttccctagcagtcggttcttgtgtgtgtgtcccgtctgaatgggatcgaataaacaacctagccgggtcgatgcgagatctgaaagtaaaccgggccttcttcacgcctagcgtggcaaccctattagagcctgttgaggtcccattacttcgcacacttctcctgggtggcgaaacggcttcgcctgagaacattcagacctgggggccagcgttacatctcattaattgctacggaccgactgaatgttcggtcctgacgcattgtacatcacgtcctatgatgcctggcgatgctggcagcaatgttggctacggtgttggctgtgcgacttggatcgttgatccgaccaactaccatcagctacgacccattggggccgttggtgagatactcatagagggcccaaacgtgactgacggctatctcaacgaacctgccaaaaccgctgacgccttcgtattggatccagcctggaaaccacccaatcgtcacgggctaatgcggctctatcgaaccggagatctggcgcgttaccttccgaatggtatggtccaattccttggccgatgtgacagtcaagtcaaacgaaatggcctgatgattgatcttgtcgagatcgagcaccaaatacgacggctccttccagacgatatgcttgtcgctgtcgagctagtaactccccgtgggacgggcgtacgaccacagcagcttctatcagcatttgttgccctaaagaagctgccagttgcccagagaagaagtgacgctgacgtcaatacgatgcgagttgcaaatgcagccgacctcacgtatctactattacaatcgagcaccccgcggatggaggaatctctacaaggccttgagacagccatagaggcggttctgcctcggcacatggtaccgtctgcatatgtgcctctatcccgaatgcccttgacagcgtcactaggcaagacggaccgtcgagtcctcaaacagctcgcaagcatgctgtcagccgaagaactgatgcaaattagaggttccgctgcaggtcagcaggaaacgctgcaggagacaaggactgttatggagcacctccttgcgcggctttgggccactactctcggccttcataaagaaactagctttagtgtgcgagacaacttctttaagataggaggcgattctctagctgccatgcgtctagtatcgctggctagaagggacaatgtgcggctgtcagtggagcaaatctttacgttacctatattacaagatatggcagaggcggcgttacttttggagcagccgcagcagatatctcctgctgtctatcacgaggctgcatcagaacaaatgaccggcttttcgatgcttggggaggccacgatgaacgctttgcattcagcatccgagcagctagggatgagcaaggccgacatcgaggatgtctacccttgcatccctcttcaggagggtctgctcgccctgtcgcaagatagtcaaggtagttacgtcgcgcagatggtgcatgagctaccgtcgaatgttgatctcaaacgctttgaattggcctggaacatagtaatcgagcactggccaatcttgcgcacaagattctttgagtggcacgagccagatggcacttctagactaatgcaggccgtgatcaaagaatcgacggtaaattggctgcgctcgaactgtcttgcggactacttagacctggaccgatgcgatcatatgcaacttggtagctacatggttcgcttggccctatttcgtgatgaaaccctggatgcgagaccagtctacttcgtagtgactgcgcatcatgctgtctacgacgggtggatgttaggtcttttactggactcagttcgccatgcatatgctggtctagctcctgttgagacgattccatatcgagctttcatcgctcatcttgagtcccgagataccgaacagagccggctgttctggaaaaattacattggcgatgctccacgattagtatggcctgaactccctaagttgggcttccgaccgcgaccgacctcggtatctcgtagaacattaatcttgcccacgggcagtgtcgagcaggcaaacggcttcacttcaaccgcttggatacgtgcagcattcgctatcttgctgagtgcttattcagacagtaatgatatggtgttcgcctcgaccgtttatggccgcgctgctatgttaaggcaaggctcagcggagagggtagccggaccaacccttgctaccgtgccggtccgtatccgcgtcctccaagagcaatcactgcgtgaactcatagcctcagttcaatcagatgctgccgcaatgctcgtccacgaacaagaagggatgcaaaacatccgcaagcttaatctcgaggccttagcaacgatcgatgcacaggctttgctcgtaatacaaatagacagtggcgtaatcacagagaacaaagacggcgtagcgcccgagctggtgctggagtccaggcccgtagatggcttagttgacggttttctcaccagcgttttagtgcttgaagcgacagtatatagtgatagagtgcatttgaaggctacccacgatccccgcgtcatcacatctcgtcacgctgagcgttttctgcgtcagctatctcatattatgttacaattatatggaatcggcacccaggcaacagcagatcaacgcgtggccgacctggaacttattccacctgaggactttgacgagatgatggcctggaatgcaagcgttcctgcgccagcacagaggctggttcacgagctcttctctgcgcaggccattgaacagcccagcgctgaggcgctcgtctcgcgggaggggtccctcacgtaccaggaacttgataagctgtcagacgagctggccgctcatctgtggacacagcatagcctccgcggtggcgtgcatgttctgttggtgtttgagaaaagcatgtgggctgtggtcgctatgcttgctattgttaagattggtgctgcttttgcagcgatgaacccagcagacggtccagaaaagctgcaagagttggcagccgctattgacgccaggttcgtggtctgtagcgagaagcatcaggccgtaggctgccagatcggtctacctgcgttatgtattgggccaagcatacgcctcccgggtcgtcttcacggctgcaatggagaatacggcacaattaccccggctcatacagccttcctgttgttcactagcggtagcactggccagcctaaagctatcgtgatcgaccatgaagcattctgcagcagtatcaagggccacggcgagactctgtgttatcagagaggctccagaaatttgcagtttacggcatatacgtcggatgtcagcatgggtgaaatcttcacgtcgctcagccgtggtgccacagtatgcattccgtctgatcaggagcgtatggatgatattgcgggagcaataaggcgaatgcaggtcgattgggctttccttacccccagcgttgcgtcgttgctacacccagatcaagtgccgtcgctcaagacactgttgtttggtggagagacggcgaccgtggtcaatgtaaagacgtgggcatctaagctgcatctcgtcaatagcttcggtccggcagagacatccatctggtgccatgcgcacccgcacttccaagaaacggacgatggttctgacatcggttggtctatgggctgtgcaacttggatcgtcgacccagagaacttcaccagactcatgccaattggcgccatcggcgagcttgtggtcgaaggacccaatgtagcggctggttattataacaaccccgtcaaaactcaggcagctttcttaaagggcgagcaactcctctggctgccagctgagcggcaaagtaatcgcgtgttccgccttggtgacttagctcgatggatgcccgacggacgggtacagttcctaggccgtagagatacgcaagtaaaactgcgtgggtttaaggtggacgtcggcgaggttgagaattcgatccgagccaccttggaggacaatatggctgaggtagctgtcgagatagtgcgtagctctgaagaagcagaaatctcgcgcctcgtaggtttcataagctgcactccagcaaacctgccacaagaccgcgagcaccctgctatagtcgaggacgaaaagacgctccaagactttgctttacgtactgcgaatctacgcacccacttaaccacgcgcctagccgctttcaaggtccccagcttcttcgttccactgacggctatgccgctgagcgcctcggccaagacagacagaaagctccttcgtgctctgctcacgggcccgggcggcttttcacgacttgcctgcttcacaatccactctcggaacgagatggggccacccacaacccagatggaaaaggcaatccacgacatttggagtgtggtcatggtaatggaccccaaagacttggatgtcggggccgatttctttgagtgtggcggcgactcaattattgccatgaagatggcatcaatagctcgtgcatctggtgtctcgctctccgtacacgatatatatgatcacccacgtctctgcaccttagccagagtacttgctcaacgatcttctttggagcatgacactgacgaggtacaagctgaaagcattgcaccgttctctattttaggaacgccctttcaggcacgaatagatgagctgacaggcaaggccgccgaggtttgtcgagtattgccaacagatatccttgacatctacccttgcacgcctatgcagcgcttcattatcaatagatcaatggctcacccagctgtatggtggttacctattgtcttcgatgtctcggccgaggttgatctagcactcttcgaagctacttggcgccatgtggtccagattaccgatatcttacgcacgcggatcttcatgtacgagggacgctgtctgcaagccgtactgcgtgcgcttcccagtatccggcatatcgagcataacgtatccctgcaagagtttctcgatagtgacatgggagaaatacggtgtcaatcaagtctggacggccagcccttaattcgcgccgccttggtcaataaagcatatttcgtagtgacaatgcatcactccatctacgatgcctggtcattatcaaacatgtttagccttcttgagcgaacctacctgacgggtgttccccgtggtaaagatgaatgccagccgactcaatttacgtcttttgtcagaggactaatcgaccagaatcgtgtcgaagccgccgagttttggacgaagtttctctctggcatagttacaaggccgttggcccgaacggatggagactctatacactacggcttgttgcgccgtagaaccgaaattcctggggccgccgctgccgctgcaacgcacagcgccagtacatatgcagagatggtctatgctgccatagccctagctttgtaccgtcagcaacagacacccgacacgttactccggctcatttctacggggcgcacagcgcgatgggtcctagacatagcagagctagtcgccccaacagcgactcgggtaccgctacggatccatcacggtggtcgggttgatgagtacctggcgcatgtgcgcacaacactacgacaaatagtgcggttcgagcatttcgatttcgacgacagctctatcgatgtcgaccgcctgtgttacgccgcgccgcagatagttgttaacctgcgcgactatcacacagagcaatatgctgcagagataggccttcatcggcatgagctacagtcctacatgacagatggagcaccgttcacaatcgacgtgtcgttagagactcaaggcaaccttctccaggcaatcgaggtgcgcctcgtattcgatggcagtgctgtggatgaggccccgctgcgtcggctgatcaccgactttgacgtcgttatccgtcgcatcatttcgggcgcgttttgggacaaggatacagatgcgctgttcgatgacaatgctgaggaggtagcgatggagtacaaatcaacacattga

SEQ ID NO: 24135 - protein, 3086 aa, Muscodor strobelii
  misc_feature: SGI Peptide ID NO. 568224
  misc_feature (2017)..(2420): Pfam Id: PF00501 Pfam Desc: AMP-binding enzyme
  misc_feature (870)..(1285): Pfam Id: PF00501 Pfam Desc: AMP-binding enzyme
  misc_feature (1539)..(1823): Pfam Id: PF00668 Pfam Desc: Condensation domain
  misc_feature (2655)..(2936): Pfam Id: PF00668 Pfam Desc: Condensation domain
  misc_feature (139)..(437): Pfam Id: PF00668 Pfam Desc: Condensation domain
  misc_feature (1423)..(1489): Pfam Id: PF00550 Pfam Desc: Phosphopantetheine attachment site
  misc_feature (28)..(93): Pfam Id: PF00550 Pfam Desc: Phosphopantetheine attachment site
  misc_feature (2540)..(2605): Pfam Id: PF00550 Pfam Desc: Phosphopantetheine attachment site
  misc_feature (1539)..(1598): Pfam Id: PF00668 Pfam Desc: Condensation domain
  misc_feature (1660)..(1823): Pfam Id: PF00668 Pfam Desc: Condensation domain
  misc_feature (381)..(437): Pfam Id: PF00668 Pfam Desc: Condensation domain
  misc_feature (139)..(216): Pfam Id: PF00668 Pfam Desc: Condensation domain
  misc_feature (635)..(660): Pfam Id: PF00668 Pfam Desc: Condensation domain
  misc_feature (28)..(76): Pfam Id: PF00550 Pfam Desc: Phosphopantetheine attachment site
  misc_feature (2540)..(2596): Pfam Id: PF00550 Pfam Desc: Phosphopantetheine attachment site
  misc_feature (630)..(2325): NCBI GI: 119487700 Blast Desc: nonribosomal peptide synthase, [Neosartorya fischeri NRRL 181] gi|119410738|gb|EAW20684.1| nonribosomal peptide synthase, [Neosartorya fischeri NRRL 181]
  misc_feature (1344)..(2965): NCBI GI: 119487700 Blast Desc: nonribosomal peptide synthase, [Neosartorya fischeri NRRL 181] gi|119410738|gb|EAW20684.1| nonribosomal peptide synthase, [Neosartorya fischeri NRRL 181]
  misc_feature (593)..(2980): NCBI GI: 242780348 Blast Desc: nonribosomal peptide synthase, [Talaromyces stipitatus ATCC 10500] gi|218719723|gb|EED19142.1| nonribosomal peptide synthase, [Talaromyces stipitatus ATCC 10500]
  misc_feature (762)..(2963): NCBI GI: 242780348 Blast Desc: nonribosomal peptide synthase, [Talaromyces stipitatus ATCC 10500] gi|218719723|gb|EED19142.1| nonribosomal peptide synthase, [Talaromyces stipitatus ATCC 10500]
  misc_feature (621)..(3057): NCBI GI: 242780348 Blast Desc: nonribosomal peptide synthase, [Talaromyces stipitatus ATCC 10500] gi|218719723|gb|EED19142.1| nonribosomal peptide synthase, [Talaromyces stipitatus ATCC 10500]
  misc_feature (639)..(2976): NCBI GI: 242780348 Blast Desc: nonribosomal peptide synthase, [Talaromyces stipitatus ATCC 10500] gi|218719723|gb|EED19142.1| nonribosomal peptide synthase, [Talaromyces stipitatus ATCC 10500]
  misc_feature (760)..(2614): NCBI GI: 240108806 Blast Desc: nonribosomal peptide synthetase, [Coccidioides posadasii C735 delta SOWgp]
  misc_feature (633)..(2605): NCBI GI: 240108806 Blast Desc: nonribosomal peptide synthetase, [Coccidioides posadasii C735 delta SOWgp]
  misc_feature (592)..(2963): NCBI GI: 110290107 Blast Desc: peptide synthetase [Hypocrea lixii]
  misc_feature (637)..(2589): NCBI GI: 110290107 Blast Desc: peptide synthetase [Hypocrea lixii]
  misc_feature (627)..(2634): SWISSPROT Homolog: EC 5.1.1.13 Aspartate racemase
  misc_feature (627)..(2634): SWISSPROT Homolog: EC 5.1.1.11 Phenylalanine racemase (ATP-hydrolyzing)
MLVTTHSTTSPPYRPCQEEELPYRELEDALREAWADVLDIDPDDVVADSHFFKLGGDSIAAAELAVLAEQRGLSLTRPMIFREPVFTAMVALVSVSNQPWKATAVAAASQPLPFSLVSKEEAALAIEQCHLSPEDAAIVQDVYPATPLQSGLMAHSISQPGTYVSSWVFRLSKKSGLDPEWLCAILSRVAQKLPILRTAMATSAEHGFVQVVLARPSPITIVRFASMRDLDPNTRRPPVAIGKPLVNIKVAVNEDGGDQLAILWHTHHAVYDMATFALIAEHISDIALGLNRIPEPPPFASFVSYVLDQIHYSSEWRHFWSEHLRDSPISRFPYNMYKSKVTDQDLEKRIAQPIDAEITYRTDALYTHTLSCANTNQSGFTLANVFKATWAYLLSYYEHSDNVVFGVTSSGRHAPVPGCSDMVAPTVATTPMHVKLDKVDPMATIVDLLQHVTMLAAESSVWEQVGLPQIRKLGADERRACTFRTMVNVQTTDALNSVSEVSDMLVQTPMGEKQVEPVGYVLVLELCARQGDTAPFCLSYDSRVLQSDQVVQIAEQFEKTFSLFLESPSQTLDSIQTISSMPDERIEDSFDTFWANKLLSYVGTAFPEIPKEHKPLTDAYMNSEIGLIVDQEVMVTTVLQAAWALTLSQYCENSDVVFGIDLHSNCDDHNSVIGPAVAHALPQRIVIDKPDALVVELLTEVQALTHEVAINAQFDLSRIRDLNSSSSAAADFQNVLIIHSAIPADIDNLTTTKVRQAYSFGLVVEITPIPQSSTLKICINFDSAMIEQAQVRRLIEHYEHVLGQISNMSSLPGLRVKDINHLPDAHRDELFTWNSDVPAPLERLVHAMFEEQVSLQPDAPAICARDGEWTYAELDRDAEKLARWLRSLGTGPGKFVLLLFEKCGLAAVVMLGILKAGGTSSALDPETPPEQLRSLIKTFGDACAVIISSAKNRDLALNLQTGKRTEFVDTKSLERISTGAPCPFRITEGPDIHDKAAPSDIAFVQFTSGSTGAPKGILVPHKAFASSIRARSHVMRYSTGAGSRNYQFAAYTSDVSTSDIFTSLAVGSCVCVPSEWDRINNLAGSMRDLKVNRAFFTPSVATLLEPVEVPLLRTLLLGGETASPENIQTWGPALHLINCYGPTECSVLTHCTSRPMMPGDAGSNVGYGVGCATWIVDPTNYHQLRPIGAVGEILIEGPNVTDGYLNEPAKTADAFVLDPAWKPPNRHGLMRLYRTGDLARYLPNGMVQFLGRCDSQVKRNGLMIDLVEIEHQIRRLLPDDMLVAVELVTPRGTGVRPQQLLSAFVALKKLPVAQRRSDADVNTMRVANAADLTYLLLQSSTPRMEESLQGLETAIEAVLPRHMVPSAYVPLSRMPLTASLGKTDRRVLKQLASMLSAEELMQIRGSAAGQQETLQETRTVMEHLLARLWATTLGLHKETSFSVRDNFFKIGGDSLAAMRLVSLARRDNVRLSVEQIFTLPILQDMAEAALLLEQPQQISPAVYHEAASEQMTGFSMLGEATMNALHSASEQLGMSKADIEDVYPCIPLQEGLLALSQDSQGSYVAQMVHELPSNVDLKRFELAWNIVIEHWPILRTRFFEWHEPDGTSRLMQAVIKESTVNWLRSNCLADYLDLDRCDHMQLGSYMVRLALFRDETLDARPVYFVVTAHHAVYDGWMLGLLLDSVRHAYAGLAPVETIPYRAFIAHLESRDTEQSRLFWKNYIGDAPRLVWPELPKLGFRPRPTSVSRRTLILPTGSVEQANGFTSTAWIRAAFAILLSAYSDSNDMVFASTVYGRAAMLRQGSAERVAGPTLATVPVRIRVLQEQSLRELIASVQSDAAAMLVHEQEGMQNIRKLNLEALATIDAQALLVIQIDSGVITENKDGVAPELVLESRPVDGLVDGFLTSVLVLEATVYSDRVHLKATHDPRVITSRHAERFLRQLSHIMLQLYGIGTQATADQRVADLELIPPEDFDEMMAWNASVPAPAQRLVHELFSAQAIEQPSAEALVSREGSLTYQELDKLSDELAAHLWTQHSLRGGVHVLLVFEKSMWAVVAMLAIVKIGAAFAAMNPADGPEKLQELAAAIDARFVVCSEKHQAVGCQIGLPALCIGPSIRLPGRLHGCNGEYGTITPAHTAFLLFTSGSTGQPKAIVIDHEAFCSSIKGHGETLCYQRGSRNLQFTAYTSDVSMGEIFTSLSRGATVCIPSDQERMDDIAGAIRRMQVDWAFLTPSVASLLHPDQVPSLKTLLFGGETATVVNVKTWASKLHLVNSFGPAETSIWCHAHPHFQETDDGSDIGWSMGCATWIVDPENFTRLMPIGAIGELVVEGPNVAAGYYNNPVKTQAAFLKGEQLLWLPAERQSNRVFRLGDLARWMPDGRVQFLGRRDTQVKLRGFKVDVGEVENSIRATLEDNMAEVAVEIVRSSEEAEISRLVGFISCTPANLPQDREHPAIVEDEKTLQDFALRTANLRTHLTTRLAAFKVPSFFVPLTAMPLSASAKTDRKLLRALLTGPGGFSRLACFTIHSRNEMGPPTTQMEKAIHDIWSVVMVMDPKDLDVGADFFECGGDSIIAMKMASIARASGVSLSVHDIYDHPRLCTLARVLAQRSSLEHDTDEVQAESIAPFSILGTPFQARIDELTGKAAEVCRVLPTDILDIYPCTPMQRFIINRSMAHPAVWWLPIVFDVSAEVDLALFEATWRHVVQITDILRTRIFMYEGRCLQAVLRALPSIRHIEHNVSLQEFLDSDMGEIRCQSSLDGQPLIRAALVNKAYFVVTMHHSIYDAWSLSNMFSLLERTYLTGVPRGKDECQPTQFTSFVRGLIDQNRVEAAEFWTKFLSGIVTRPLARTDGDSIHYGLLRRRTEIPGAAAAAATHSASTYAEMVYAAIALALYRQQQTPDTLLRLISTGRTARWVLDIAELVAPTATRVPLRIHHGGRVDEYLAHVRTTLRQIVRFEHFDFDDSSIDVDRLCYAAPQIVVNLRDYHTEQYAAEIGLHRHELQSYMTDGAPFTIDVSLETQGNLLQAIEVRLVFDGSAVDEAPLRRLITDFDVVIRRIISGAFWDKDTDALFDDNAEEVAMEYKSTH

SEQ ID NO: 24136 - DNA, 912 bp, Muscodor strobelii
  misc_feature: SGI cDNA ID NO. 568225
  misc_feature: Encodes the peptide sequence at SEQ ID NO 24137
atgtcgcaagacctatcccacgtactcccagacggtcggacgctcagttataccgcctacggaacaatcattgcacctgaccagccgacagtcttctacttccacggcattccggggacccaccatgaaggactgctggtgcatgagacggcatcgaagcgcggtatcgtcgtgattggggtgacgcgcccgggcttcggcgggtcatcaccccatccggaccggaccctgttgtcgtttgcctctgacctgctccatctggctgaccatctgggcgtacagcgatttgccgtcatgggcatttctggtggtggaccatatgtgctcgcttgcttgcacgccctgccagctacgcgcctgctcggtggcttcatcgcgtcgggcatatatcccgcgactctcggcttagcaggcatgaagttgctcaaccgtgtcttcgtccaccttgccgtgtggacccctcgcctggtagcctggcttgttgatcggttcatgggccgtacagcgcgagacaggcccgagttattcgcgcgtctcatgactgatggtttcgctagctggcccgccgaggaccgcgaagttgtgttcgccgacgacggtcgctttcttcaggtcttgattcgcagcaacgccgaggcgttccgccacggagccgacggcttcgccagagaaatctggctatttgggacaccgtgggattttacactggaggatctgcggatagatcacggccgattagtgctatggcatggcaccaaggatgtcaatatacctgtacgaatggcagaagaatctggccaattgatcccagacgctgaatttcgtgaattcgaggatgaagcgcacattagcctatgtgttaaccgcatgaacgagattatagatatcctagtcgacatcttaaagctctaa

SEQ ID NO: 24137 - protein, 303 aa, Muscodor strobelii
  misc_feature: SGI Peptide ID NO. 568225
  misc_feature (56)..(295): Pfam Id: PF00561 Pfam Desc: alpha/beta hydrolase fold
  misc_feature (3)..(301): NCBI GI: 256733373 Blast Desc: NECHADRAFT_35689 [Nectria haematococca mpVI 77-13-4]
  misc_feature (3)..(302): NCBI GI: 46127753 Blast Desc: FG08254.1 [Gibberella zeae PH-1]
  misc_feature (9)..(302): NCBI GI: 39966483 Blast Desc: MGG_01903 [Magnaporthe grisea 70-15] gi|145009600|gb|EDJ94256.1| MGG_01903 [Magnaporthe grisea 70-15]
  misc_feature (8)..(234): NCBI GI: 256722790 Blast Desc: NECHADRAFT_18750 [Nectria haematococca mpVI 77-13-4]
  misc_feature (2)..(298): NCBI GI: 189211733 Blast Desc: alpha/beta hydrolase fold domain containing protein [Pyrenophora tritici-repentis Pt-1C-BFP] gi|187979394|gb|EDU46020.1| alpha/beta hydrolase fold domain
  misc_feature (8)..(298): NCBI GI: 39974049 Blast Desc: MGG_00829 [Magnaporthe grisea 70-15] gi|145018232|gb|EDK02511.1| MGG_00829 [Magnaporthe grisea 70-15]
  misc_feature (3)..(299): NCBI GI: 169609935 Blast Desc: SNOG_08059 [Phaeosphaeria nodorum SN15] gi|111063215|gb|EAT84335.1| SNOG_08059 [Phaeosphaeria nodorum SN15]
  misc_feature (8)..(234): NCBI GI: 116178782 Blast Desc: CHGG_00019 [Chaetomium globosum CBS 148.51] gi|88184316|gb|EAQ91784.1| CHGG_00019 [Chaetomium globosum CBS 148.51]
  misc_feature (4)..(298): NCBI GI: 238839490 Blast Desc: hydrolase [Microsporum canis CBS 113480]
  misc_feature (9)..(299): NCBI GI: 261352794 Blast Desc: hydrolase [Verticillium albo-atrum VaMs.102]
MSQDLSHVLPDGRTLSYTAYGTIIAPDQPTVFYFHGIPGTHHEGLLVHETASKRGIVVIGVTRPGFGGSSPHPDRTLLSFASDLLHLADHLGVQRFAVMGISGGGPYVLACLHALPATRLLGGFIASGIYPATLGLAGMKLLNRVFVHLAVWTPRLVAWLVDRFMGRTARDRPELFARLMTDGFASWPAEDREVVFADDGRFLQVLIRSNAEAFRHGADGFAREIWLFGTPWDFTLEDLRIDHGRLVLWHGTKDVNIPVRMAEESGQLIPDAEFREFEDEAHISLCVNRMNEIIDILVDILKL

SEQ ID NO: 24138 - DNA, 7838 bp, Muscodor strobelii
  misc_feature: SGI EST ID NO. CUFF.56911.0
  misc_feature: Variant of the nucleotide sequence at SEQ ID NO 24136
gtccgcttgtgccacatcttcacattctggccaacgcgtctcaccacaagtacctaactgacatatgtacccagtgaaagtactagctataattatggaagaaatgatgataaggaagcccaggaaggatgaagggatcagaaagagctcaataagtcgatcacaaaattttgccattgttttgcatgtttagtttcttggactgagcatttctgcttcctcctccccaatgcagtgcactcaccaccaaacccacacaatgtgaacagtggcaacactcaaaagccactgcctttaaaccctgacatgcatgattccctaataatatcctgatttggatttcccctttgagccgtagcaaatatgtcaaatatgactggctagtgcagcatgtcaattacatgagacagtgcacaaatcccgacttaatcttgtaaccgagtctatggtacctttcttttaatttgagctgtggtaaaagcttcacaattagttgttcacttgttatacaagatcatagcagctgatatggcggcggccatgcctgatgctaaagatgcctcttcaacggtccgtcttggaggcgacacgccagtcctcgccatttggggtggtgtaggcttcagtcggcgtccgcttagagatctacgtgatctctactctctccatggggacattctagcggacttcattgaccactgtagcggcattctccaatcacttacggatcatgatatgcctttcgatgaagggggcagtactagtcaatctgagggatttagggtgcagcaagacctcgccggttggcttgctaatccccctgtccgccgcataccaacgcttccacaacctgttgtcgctgttctcaccattattctccagatatcgccctatgttgtgctagctaagtgtctcggcaaagatccaggcgagttggcgcgatgcttcacagcttttgcaggtcactcgtccggcatggtagtggctgtcgccatggcagcggcggacacgtggtcttcgctctacgaggtgactgagaaggccctgagagagatatatcacgcagaccacatctcgggctcgtgctgggaccagagtgtaccaattccttccgcagccgcggccgagtgcgttcaacggggcgagggaaatccaacaccgatgctgtctattaccggcatgccacggagcaaggttgtgtcagaaatggccaacattaatagaactgttcctccagagcgcaagttatacttggcagtcgttaacgatgttgacgcatttgtggtggcaggcggccccgaggttttagttcggctctgcgctcgtctcagaacaccttctcatccttttgcacaggagcagcaggatgagacgtgctcactccaatttgtgccgtcaaccgctcccttccactctccgcacatgaaagcagcggcatcaatactgtcgaagcacttgatgacacacgctaccggaaagagagaacaggtacaagtaccggtctggggcctagacgaactcttaaacaaggatgatgctgcgtcgacagacactctaggcgtcaatatcaccaacctgattctgctgcgagaagtggatttgcctgagattttgaaacctatgactgggcgctggcaagtcctcgatttcggacccggtggtctcaatggcatcagtatattcgttcaaaagatcaaggccgcatctcaacctaagatttacactgtttgccctgcgggcatctggggacaaagcagaacccaagactctaaaaacagtcaatttccatctcgagcagtgtctctgctatcttctacgacagaagatccccagagctacacgcatgttaggttagagccgtaccacatatttactggtgacgaacgacgtacagcctcaagatttacagaggccttggggctgccccgtgtgcttgtggctgccacaattcctagtacctccgacatcgatctcgtagcagctgtcatgaatgcaggcttctatgccgagttcgcgactggcgaatacggtgaagggtcgcttttagccgtagcattaagacagctagctggtatgattcccgaggggcgcatgatcgtgataaatattgattattcggataagcaaggcatcgcatggattataccgcagctagcgacgcttgtgcaagagggatgccctattggtggccttgtcatcagcagcggtgtaccagacaaaagcgtcgtggcagaatatgtcgacatgctgcaagtatgctatctcggattcaagcctactactatcgcggagattcatagtgttttggacatcgctagagaacattctactctgcccgtgttgctgcagtggactggcggccaggtcgccgagtttgacgcgccacaagatttgtatctgcctatattagaaacgtatcaagccgcaagagagataaataatgttatcctagtggcgggcagcggtattggcgatgcccatagcgcgtggcactatctatcaggcgaatgggcgcagcattttggccgacccttaatgccatttgatgccgtcctggttgggacctgcattatgacgacgaaggaagcgaagataagcctcgctgccaagacatcaattgttaactgttccagcgttcaacagatgggccggatggctactagatctacatcagaagatgcaggtggtgtcatttcgatcatgtcttcgcgtggcgagccagtgcatgtggtggccactcgcggtatgcaactatgggctgagcttgacaaaaccctgttcaataaggataagcacgttatggtcgaggcgatccagtcatcacgcaagtatctgattgaccatatgaacgccgactatcaaaaggtttggtttggttgggattacgctcaaggtgggccgaccaatgatcttggggacatgacatacttaggagttttacgccgcctagtcgagttgatgtattcattaactaagggtgattgggcgcatccatcatactgtagcctatttactgattttacactgcgcactttcgaacgcttcggtggctgcggctcctttgcagatctcgtcgcatcctcaagtccagtcgagcagcttgacgctatagtacacaaactgcctgagtgtgacgattacttcttgacagtcgaggacaccgattacttcgtcaccatctgcagattgcttggagaaaagtcggtccccttcataccggtcttagatgctgatttccctgtgtggttcaaagatgactcattttgggcagctgaaaatcttgagagcaccacccacaacgatgtcgatcgtgtgtacatccctgttgatcctgtggctgttcagtattgccgaaaggccaatattcctgtaaatgagctcttgtgcggcatcgatcatggcatccaggacctcgagactgaagccgggctgttgcccccgacattccatcccaaagcacctctgcacggggaaaatgaattgattcactcaatggggggtgaatcacacctcatcatcggccacgacacactagaaatcgccacaagcgcctcgttgaaggtactggataatgacaaatggcttcttttgcttggttctcggctgggaagatggggcattcacgctttcggtgcgaagaaactagtttccggcggaaagacgaaggagaatcctatacggcgcttgtttgcagcccggcccggtctttcggtgcgtgtctctgacatgattagcgacggtggttatgccaaggccgagatgtgcgataacgttggcagtgtgcgaatatggataaatgccggtgcaattacggtcatcttgggtagccgctatacggtcgatagaatgcagcaggagtatgttctcaagttcgcgtatgacgagtctcgcccttatgcacctctgtccgaaatcacggtcgaccatcaagatcgcacaaggaacttttattggctgatgttgttcggacgcctaaagcggccagaagttagcaatcctattcgcttggtatatccattaccagcaataacgcaggaccatattatagcttggctggaagctactaatggccatagaatagatggcagcttatccgatcatatcggacatactagcgtggtacctctagagttcgcgactatcctggctatagaggtggtatggtatcatcttctccagtgggatgtggatgtctcgaagcttctacaccggggaacatcagtcacgctacgtgagggcaagaaggttctgaccatcggagacagcgtaacgatgagatctcagatgatcaccctttttaacagtaagtcgaaccttgagatcagctttcgaataacagtcgttcgtaatggcatggatgtcatcgatatggaccatgaatttgtgttccttgaccatcaggtggccaacgcacaatgcttcaagtccgcaggtcccacatggttctccctgaacctcagtaatatgacagatgtccagttactccatgcaaggtcatggttccgaccagccacagacattgatatagaagatgttgctggcgaaacgctcttgcttgagatatggaatgagaccttctggcaaaatgacaatcacatgaccaacactcgtggtaatatctggcttagcaaaagcagcagcgacagcaaagtgaggcacaagatattatacggtcacatcgaacagactggtcttgaagctgaccttgccaaaccactggccaatctgaacataaacgcagtgtccatgagtgatcgagtgcggctgtcgtccgagagaacgctgaagactgtcagagttgtgacgccagacaatagcactgattatgcggtcgctagtcacgacctgaaccccatacacacactacctgctttcgcccgccttgttagcttccctggccctgtgtatcacggcagccacacagtcagcctcgcgctgcaggccatctggcgcagcattccatgggcgagcgcggctgctgtgcgacattttgactgcaaattcatttctgttgtctggccaggcgatgttttgatcattacgatcaagcatataggcatggacaagggcggtgctgtattaggctatgcggtgcgccgtgaggccggagatggggtcccggtcctgaccggaaaagtcgttctagaggcatctcccaccgccttcctattcaccggccaaggcagtcagttcatggggatgggcttagacttggctaacgaaagtcgtgcaagtcgcaggatatggagcgaggcggacgcatattttgaagagaactggggcttctcggtcacagacatcgtcaagcgcaacccgacccatttgactgtacatttttcgggtgcacggggccaacatgtcaggcaaagctacttagacgcccagaaaatgctactctcctttgcgccagagtgtaagagcgagcttttcaaggccctaagtgcacaatcacggtcctatacggtctcccacgtggatggcctactcagcatgacccagttcgcacaaccagcgcttgtagtcgttgagtgcgctacctttgcgcacctacggcagcttggtcatgcgccacccgggtcgcaattcgcaggtcactcactgggcgaatttgctgctctatcggcaatgacggatgctttgcccctcaaagcagcgctcgaaaccgtcttcatccgcggcatgttaatgcaagcggcggtggcgagggatgacagcggtcgcagtgagtttggtatggttgctattgatccctcgcgtattggcaaaggtgtgttggcttcatttcatgtcccccaacttcgactggctatggatctagctgctaacacacgtcttgggtctgttaggttgccaagagggacacttacgagagatgatcacagcaatcgtggcgcgcttgcgactaccgctcgagatggtcaatttcaacgtcaagggccagcaatacgtgtgcgctggtgataagcggtgcctagacctccttcagcgaacagcagatgcgctacacggggacctcgacgcgtcgcttgggcgtatcgccgatttggtgaatgagcagcgagccccaaatgccacgggtgccacagcaagcggcatggtactgacacggggtaaggggacagtgcctctcaagggcattgatgtgccctttcactcaaggctaatggcctgcatggccacggccttcagacacacactcatgaaaagcatccagagagagtccgtccatcttgaagagcttgttgggaagtggatcccaaatgttaccggagagccgttttcagtcgaccgtgaatacgtccagctcgtgtcaaacctcacatcatcgcctcgacttgaggctttattagcggtaatgaactaaagactatttactaagacggtcacttgatacttgtccaagccctgcatcagttgaaccaacgatcattgagaagtactagatagattcacgggataaagtaccattgattccgccatgacaagaacttgatagcatttgattggctacagctgtattttccttatagtcggcaagcaaggtctctagcagcctagttccctgaaagtaatacagtagtgcgcataacgacccctagaattgccatgtatgccgcctgacagctggtatcagcacaatgctcgaccacggtggcaccacgacgtgattaggatgggtcggtgagcaacctgacctctctggaaaatctattgactgcctacctctatagaaattatgacttcgattcatacgagtttgtgcgctcttaatttgaatcgtagggacgctgtgtacttggggatccttcagccgctcatccaaacttaggacaattaagacgtagtgcagagaacggaccggcaaatgctacgccagcataagggcgaacttcttacgggaactcatgtcgcaagacctatcccacgtactcccagacggtcggacgctcagttataccgcctacggaacaatcattgcacctgaccagccgacagtcttctacttccacggcattccggggacccaccatgaaggactgctggtgcatgagacggcatcgaagcgcggtatcgtcgtgattggggtgacgcgcccgggcttcggcgggtcatcaccccatccggaccggaccctgttgtcgtttgcctctgacctgctccatctggctgaccatctgggcgtacagcgatttgccgtcatgggcatttctggtggtggaccatatgtgctcgcttgcttgcacgccctgccagctacgcgcctgctcggtggcttcatcgcgtcgggcatatatcccgcgactctcggcttagcaggcatgaagttgctcaaccgtgtcttcgtccaccttgccgtgtggacccctcgcctggtagcctggcttgttgatcggttcatgggccgtacagcgcgagacaggcccgagttattcgcgcgtctcatgactgatggtttcgctagctggcccgccgaggaccgcgaagttgtgttcgccgacgacggtcgctttcttcaggtcttgattcgcagcaacgccgaggcgttccgccacggagccgacggcttcgccagagaaatctggctatttgggacaccgtgggattttacactggaggatctgcggatagatcacggccgattagtgctatggcatggcaccaaggatgtcaatatacctgtacgaatggcagaagaatctggccaattgatcccagacgctgaatttcgtgaattcgaggatgaagcgcacattagcctatgtgttaaccgcatgaacgagattatagatatcctagtcgacatcttaaagctctaatattctcgtgttagaaagtcg

SEQ ID NO: 24139 - DNA, 5757 bp, Muscodor strobelii
  misc_feature: SGI cDNA ID NO. 568226
  misc_feature: Encodes the peptide sequence at SEQ ID NO 24140
atggcggcggccatgcctgatgctaaagatgcctcttcaacggtccgtcttggaggcgacacgccagtcctcgccatttggggtggtgtaggcttcagtcggcgtccgcttagagatctacgtgatctctactctctccatggggacattctagcggacttcattgaccactgtagcggcattctccaatcacttacggatcatgatatgcctttcgatgaagggggcagtactagtcaatctgagggatttagggtgcagcaagacctcgccggttggcttgctaatccccctgtccgccgcataccaacgcttccacaacctgttgtcgctgttctcaccattattctccagatatcgccctatgttgtgctagctaagtgtctcggcaaagatccaggcgagttggcgcgatgcttcacagcttttgcaggtcactcgtccggcatggtagtggctgtcgccatggcagcggcggacacgtggtcttcgctctacgaggtgactgagaaggccctgagagagatatatcacgcagaccacatctcgggctcgtgctgggaccagagtgtaccaattccttccgcagccgcggccgagtgcgttcaacggggcgagggaaatccaacaccgatgctgtctattaccggcatgccacggagcaaggttgtgtcagaaatggccaacattaatagaactgttcctccagagcgcaagttatacttggcagtcgttaacgatgttgacgcatttgtggtggcaggcggccccgaggttttagttcggctctgcgctcgtctcagaacaccttctcatccttttgcacaggagcagcaggatgagacgtgctcactccaatttgtgccgtcaaccgctcccttccactctccgcacatgaaagcagcggcatcaatactgtcgaagcacttgatgacacacgctaccggaaagagagaacaggtacaagtaccggtctggggcctagacgaactcttaaacaaggatgatgctgcgtcgacagacactctaggcgtcaatatcaccaacctgattctgctgcgagaagtggatttgcctgagattttgaaacctatgactgggcgctggcaagtcctcgatttcggacccggtggtctcaatggcatcagtatattcgttcaaaagatcaaggccgcatctcaacctaagatttacactgtttgccctgcgggcatctggggacaaagcagaacccaagactctaaaaacagtcaatttccatctcgagcagtgtctctgctatcttctacgacagaagatccccagagctacacgcatgttaggttagagccgtaccacatatttactggtgacgaacgacgtacagcctcaagatttacagaggccttggggctgccccgtgtgcttgtggctgccacaattcctagtacctccgacatcgatctcgtagcagctgtcatgaatgcaggcttctatgccgagttcgcgactggcgaatacggtgaagggtcgcttttagccgtagcattaagacagctagctggtatgattcccgaggggcgcatgatcgtgataaatattgattattcggataagcaaggcatcgcatggattataccgcagctagcgacgcttgtgcaagagggatgccctattggtggccttgtcatcagcagcggtgtaccagacaaaagcgtcgtggcagaatatgtcgacatgctgcaagtatgctatctcggattcaagcctactactatcgcggagattcatagtgttttggacatcgctagagaacattctactctgcccgtgttgctgcagtggactggcggccaggtcgccgagtttgacgcgccacaagatttgtatctgcctatattagaaacgtatcaagccgcaagagagataaataatgttatcctagtggcgggcagcggtattggcgatgcccatagcgcgtggcactatctatcaggcgaatgggcgcagcattttggccgacccttaatgccatttgatgccgtcctggttgggacctgcattatgacgacgaaggaagcgaagataagcctcgctgccaagacatcaattgttaactgttccagcgttcaacagatgggccggatggctactagatctacatcagaagatgcaggtggtgtcatttcgatcatgtcttcgcgtggcgagccagtgcatgtggtggccactcgcggtatgcaactatgggctgagcttgacaaaaccctgttcaataaggataagcacgttatggtcgaggcgatccagtcatcacgcaagtatctgattgaccatatgaacgccgactatcaaaaggtttggtttggttgggattacgctcaaggtgggccgaccaatgatcttggggacatgacatacttaggagttttacgccgcctagtcgagttgatgtattcattaactaagggtgattgggcgcatccatcatactgtagcctatttactgattttacactgcgcactttcgaacgcttcggtggctgcggctcctttgcagatctcgtcgcatcctcaagtccagtcgagcagcttgacgctatagtacacaaactgcctgagtgtgacgattacttcttgacagtcgaggacaccgattacttcgtcaccatctgcagattgcttggagaaaagtcggtccccttcataccggtcttagatgctgatttccctgtgtggttcaaagatgactcattttgggcagctgaaaatcttgagagcaccacccacaacgatgtcgatcgtgtgtacatccctgttgatcctgtggctgttcagtattgccgaaaggccaatattcctgtaaatgagctcttgtgcggcatcgatcatggcatccaggacctcgagactgaagccgggctgttgcccccgacattccatcccaaagcacctctgcacggggaaaatgaattgattcactcaatggggggtgaatcacacctcatcatcggccacgacacactagaaatcgccacaagcgcctcgttgaaggtactggataatgacaaatggcttcttttgcttggttctcggctgggaagatggggcattcacgctttcggtgcgaagaaactagtttccggcggaaagacgaaggagaatcctatacggcgcttgtttgcagcccggcccggtctttcggtgcgtgtctctgacatgattagcgacggtggttatgccaaggccgagatgtgcgataacgttggcagtgtgcgaatatggataaatgccggtgcaattacggtcatcttgggtagccgctatacggtcgatagaatgcagcaggagtatgttctcaagttcgcgtatgacgagtctcgcccttatgcacctctgtccgaaatcacggtcgaccatcaagatcgcacaaggaacttttattggctgatgttgttcggacgcctaaagcggccagaagttagcaatcctattcgcttggtatatccattaccagcaataacgcaggaccatattatagcttggctggaagctactaatggccatagaatagatggcagcttatccgatcatatcggacatactagcgtggtacctctagagttcgcgactatcctggctatagaggtggtatggtatcatcttctccagtgggatgtggatgtctcgaagcttctacaccggggaacatcagtcacgctacgtgagggcaagaaggttctgaccatcggagacagcgtaacgatgagatctcagatgatcaccctttttaacagtaagtcgaaccttgagatcagctttcgaataacagtcgttcgtaatggcatggatgtcatcgatatggaccatgaatttgtgttccttgaccatcaggtggccaacgcacaatgcttcaagtccgcaggtcccacatggttctccctgaacctcagtaatatgacagatgtccagttactccatgcaaggtcatggttccgaccagccacagacattgatatagaagatgttgctggcgaaacgctcttgcttgagatatggaatgagaccttctggcaaaatgacaatcacatgaccaacactcgtggtaatatctggcttagcaaaagcagcagcgacagcaaagtgaggcacaagatattatacggtcacatcgaacagactggtcttgaagctgaccttgccaaaccactggccaatctgaacataaacgcagtgtccatgagtgatcgagtgcggctgtcgtccgagagaacgctgaagactgtcagagttgtgacgccagacaatagcactgattatgcggtcgctagtcacgacctgaaccccatacacacactacctgctttcgcccgccttgttagcttccctggccctgtgtatcacggcagccacacagtcagcctcgcgctgcaggccatctggcgcagcattccatgggcgagcgcggctgctgtgcgacattttgactgcaaattcatttctgttgtctggccaggcgatgttttgatcattacgatcaagcatataggcatggacaagggcggtgctgtattaggctatgcggtgcgccgtgaggccggagatggggtcccggtcctgaccggaaaagtcgttctagaggcatctcccaccgccttcctattcaccggccaaggcagtcagttcatggggatgggcttagacttggctaacgaaagtcgtgcaagtcgcaggatatggagcgaggcggacgcatattttgaagagaactggggcttctcggtcacagacatcgtcaagcgcaacccgacccatttgactgtacatttttcgggtgcacggggccaacatgtcaggcaaagctacttagacgcccagaaaatgctactctcctttgcgccagagtgtaagagcgagcttttcaaggccctaagtgcacaatcacggtcctatacggtctcccacgtggatggcctactcagcatgacccagttcgcacaaccagcgcttgtagtcgttgagtgcgctacctttgcgcacctacggcagcttggtcatgcgccacccgggtcgcaattcgcaggtcactcactgggcgaatttgctgctctatcggcaatgacggatgctttgcccctcaaagcagcgctcgaaaccgtcttcatccgcggcatgttaatgcaagcggcggtggcgagggatgacagcggtcgcagtgagtttggtatggttgctattgatccctcgcgtattggcaaaggttgccaagagggacacttacgagagatgatcacagcaatcgtggcgcgcttgcgactaccgctcgagatggtcaatttcaacgtcaagggccagcaatacgtgtgcgctggtgataagcggtgcctagacctccttcagcgaacagcagatgcgctacacggggacctcgacgcgtcgcttgggcgtatcgccgatttggtgaatgagcagcgagccccaaatgccacgggtgccacagcaagcggcatggtactgacacggggtaaggggacagtgcctctcaagggcattgatgtgccctttcactcaaggctaatggcctgcatggccacggccttcagacacacactcatgaaaagcatccagagagagtccgtccatcttgaagagcttgttgggaagtggatcccaaatgttaccggagagccgttttcagtcgaccgtgaatacgtccagctcgtgtcaaacctcacatcatcgcctcgacttgaggctttattagcggtaatgaactaa

SEQ ID NO: 24140 - protein, 1918 aa, Muscodor strobelii
  misc_feature: SGI Peptide ID NO. 568226
  misc_feature (1545)..(1909): Pfam Id: PF00698 Pfam Desc: Acyl transferase domain
  misc_feature (891)..(952): Pfam Id: PF08354 Pfam Desc: Domain of function (DUF1729)
  misc_feature (1410)..(1530): Pfam Id: PF01575 Pfam Desc: MaoC like domain
  misc_feature (1545)..(1791): Pfam Id: PF00698 Pfam Desc: Acyl transferase domain
  misc_feature (2)..(1915): NCBI GI: 225555129 Blast Desc: fatty acid synthase beta subunit dehydratase [Ajellomyces capsulatus G186AR]
  misc_feature (19)..(1915): NCBI GI: 239609120 Blast Desc: fatty acid synthase beta subunit dehydratase [Ajellomyces dermatitidis ER-3]
  misc_feature (12)..(1915): NCBI GI: 85107903 Blast Desc: fatty acid synthase beta subunit dehydratase [Neurospora crassa OR74A] gi|28924072|gb|EAA33229.1| fatty acid synthase beta subunit dehydratase [Neurospora crassa OR74A]
  misc_feature (19)..(1915): NCBI GI: 261188173 Blast Desc: fatty acid synthase beta subunit dehydratase [Ajellomyces dermatitidis SLH14081] gi|239593378|gb|EEQ75959.1| fatty acid synthase beta subunit dehydratase [Ajellomyces
  misc_feature (2)..(1915): NCBI GI: 154272952 Blast Desc: fatty acid synthase beta subunit dehydratase [Ajellomyces capsulatus NAm1] gi|150415840|gb|EDN11184.1| fatty acid synthase beta subunit dehydratase [Ajellomyces capsulatus
  misc_feature (19)..(1915): NCBI GI: 119179468 Blast Desc: CIMG_08479 [Coccidioides immitis RS]
  misc_feature (19)..(1915): NCBI GI: 258577713 Blast Desc: fatty acid synthase beta subunit dehydratase [Uncinocarpus reesii 1704] gi|237903304|gb|EEP77705.1| fatty acid synthase beta subunit dehydratase [Uncinocarpus reesii 1704]
  misc_feature (19)..(1915): NCBI GI: 240110114 Blast Desc: Fatty acid synthase subunit beta, [Coccidioides posadasii C735 delta SOWgp]
  misc_feature (23)..(1914): NCBI GI: 7339668 Blast Desc: fatty acid synthetase beta subunit [Pichia angusta]
  misc_feature (20)..(1915): NCBI GI: 116194708 Blast Desc: conserved [Chaetomium globosum CBS 148.51] gi|88179865|gb|EAQ87333.1| conserved [Chaetomium globosum CBS 148.51]
  misc_feature (20)..(1914): SWISSPROT Homolog: EC 2.3.1.86 Fatty-acyl-CoA synthase
  misc_feature (20)..(1914): SWISSPROT Homolog: EC 2.3.1.39 [Acyl-carrier-protein] S-malonyltransferase
  misc_feature (20)..(1914): SWISSPROT Homolog: EC 2.3.1.38 [Acyl-carrier-protein] S-acetyltransferase
  misc_feature (20)..(1914): SWISSPROT Homolog: EC 3.1.2.14 Oleoyl-[acyl-carrier-protein] hydrolase
  misc_feature (20)..(1914): SWISSPROT Homolog: EC 4.2.1.61 3-hydroxypalmitoyl-[acyl-carrier-protein] dehydratase
  misc_feature (20)..(1914): SWISSPROT Homolog: EC 1.3.1.9 Enoyl-[acyl-carrier-protein] reductase (NADH)
  misc_feature: Useful for fungicidal and/or biocontrol applications
MAAAMPDAKDASSTVRLGGDTPVLAIWGGVGFSRRPLRDLRDLYSLHGDILADFIDHCSGILQSLTDHDMPFDEGGSTSQSEGFRVQQDLAGWLANPPVRRIPTLPQPVVAVLTIILQISPYVVLAKCLGKDPGELARCFTAFAGHSSGMVVAVAMAAADTWSSLYEVTEKALREIYHADHISGSCWDQSVPIPSAAAAECVQRGEGNPTPMLSITGMPRSKVVSEMANINRTVPPERKLYLAVVNDVDAFVVAGGPEVLVRLCARLRTPSHPFAQEQQDETCSLQFVPSTAPFHSPHMKAAASILSKHLMTHATGKREQVQVPVWGLDELLNKDDAASTDTLGVNITNLILLREVDLPEILKPMTGRWQVLDFGPGGLNGISIFVQKIKAASQPKIYTVCPAGIWGQSRTQDSKNSQFPSRAVSLLSSTTEDPQSYTHVRLEPYHIFTGDERRTASRFTEALGLPRVLVAATIPSTSDIDLVAAVMNAGFYAEFATGEYGEGSLLAVALRQLAGMIPEGRMIVINIDYSDKQGIAWIIPQLATLVQEGCPIGGLVISSGVPDKSVVAEYVDMLQVCYLGFKPTTIAEIHSVLDIAREHSTLPVLLQWTGGQVAEFDAPQDLYLPILETYQAAREINNVILVAGSGIGDAHSAWHYLSGEWAQHFGRPLMPFDAVLVGTCIMTTKEAKISLAAKTSIVNCSSVQQMGRMATRSTSEDAGGVISIMSSRGEPVHVVATRGMQLWAELDKTLFNKDKHVMVEAIQSSRKYLIDHMNADYQKVWFGWDYAQGGPTNDLGDMTYLGVLRRLVELMYSLTKGDWAHPSYCSLFTDFTLRTFERFGGCGSFADLVASSSPVEQLDAIVHKLPECDDYFLTVEDTDYFVTICRLLGEKSVPFIPVLDADFPVWFKDDSFWAAENLESTTHNDVDRVYIPVDPVAVQYCRKANIPVNELLCGIDHGIQDLETEAGLLPPTFHPKAPLHGENELIHSMGGESHLIIGHDTLEIATSASLKVLDNDKWLLLLGSRLGRWGIHAFGAKKLVSGGKTKENPIRRLFAARPGLSVRVSDMISDGGYAKAEMCDNVGSVRIWINAGAITVILGSRYTVDRMQQEYVLKFAYDESRPYAPLSEITVDHQDRTRNFYWLMLFGRLKRPEVSNPIRLVYPLPAITQDHIIAWLEATNGHRIDGSLSDHIGHTSVVPLEFATILAIEVVWYHLLQWDVDVSKLLHRGTSVTLREGKKVLTIGDSVTMRSQMITLFNSKSNLEISFRITVVRNGMDVIDMDHEFVFLDHQVANAQCFKSAGPTWFSLNLSNMTDVQLLHARSWFRPATDIDIEDVAGETLLLEIWNETFWQNDNHMTNTRGNIWLSKSSSDSKVRHKILYGHIEQTGLEADLAKPLANLNINAVSMSDRVRLSSERTLKTVRVVTPDNSTDYAVASHDLNPIHTLPAFARLVSFPGPVYHGSHTVSLALQAIWRSIPWASAAAVRHFDCKFISVVWPGDVLIITIKHIGMDKGGAVLGYAVRREAGDGVPVLTGKVVLEASPTAFLFTGQGSQFMGMGLDLANESRASRRIWSEADAYFEENWGFSVTDIVKRNPTHLTVHFSGARGQHVRQSYLDAQKMLLSFAPECKSELFKALSAQSRSYTVSHVDGLLSMTQFAQPALVVVECATFAHLRQLGHAPPGSQFAGHSLGEFAALSAMTDALPLKAALETVFIRGMLMQAAVARDDSGRSEFGMVAIDPSRIGKGCQEGHLREMITAIVARLRLPLEMVNFNVKGQQYVCAGDKRCLDLLQRTADALHGDLDASLGRIADLVNEQRAPNATGATASGMVLTRGKGTVPLKGIDVPFHSRLMACMATAFRHTLMKSIQRESVHLEELVGKWIPNVTGEPFSVDREYVQLVSNLTSSPRLEALLAVMN

SEQ ID NO: 24141 - DNA, 7838 bp, Muscodor strobelii; identical to SEQ ID NO: 24138
  misc_feature: SGI EST ID NO. CUFF.56911.0
  misc_feature: Variant of the nucleotide sequence at SEQ ID NO 24139

SEQ ID NO: 24142 - DNA, 1080 bp, Muscodor strobelii
  misc_feature: SGI cDNA ID NO. 568227
  misc_feature: Encodes the peptide sequence at SEQ ID NO 24143
atgacgtctaagttgttaccttcatctgatatccctagccgaagggatcgcctccgcgcgtccttgcaggctcttctaaacgacgatattgaattagatccgttcaagccaggtacttctttgtcgtcgccgataagcccaagctcgccagataatgaacaggaaccaaatacgttctacccggcggataatacgagcaagattcacatggccatcgatcctcgtctttcgatagggacgtcgttagttgcacgcaatcccgaccagtctatcctttcacctagcctgagacaacagagcatcatgtcaggcagtagcagcaacgacaacatccagatagatcactcgtcagtctacacgcataagcgctactcaactcgagcagccacgcatagagaagctgcacagaccagacgtactcgtagcaccttttatcaagacagtcctattcaggaagggcggactcccgatccctgtcttctagtcgacgatgatctggtcatagattacagctgcgagctgacgccaccggagatggacatgcgaaaacgatcgagggatgaggacaatcctttctcattatctcaagaaatcgacttttcctacggaggcggctgggaccagtcgccggtcacatcaccggatcagatgcagtcatcgtccttgtctacagaccgcggcatatgcgacgttgtccagcgcccggagaaacggcagcgccagcactacgcggtcgagcagcgctaccgggcaggtcttaatgagcgtttcaacgcgctgcgcgactgcattgaagctcgaagcaagatggagtcccaacatgagcataggcagtcgcgtcgatcgacaggcgcctttgattcgagggatagcgctgcgagcggcgccaccgggcgatcaacaaaaatgaacaaagctgacgttctacataaagcggtcgtgtacatccaagacttggaagaggaaaatgaagtggtcctggagcaattgaagcttcttgtgcaacgattacggaatgccaagatagctctcggagtcatggagccaaaacaagtagggtcgaaaaggaaggacgcttaa

SEQ ID NO: 24143 - protein, 359 aa, Muscodor strobelii
  misc_feature: SGI Peptide ID NO. 568227
  misc_feature (238)..(320): Pfam Id: PF00010 Pfam Desc: Helix-loop-helix DNA-binding domain
  misc_feature (233)..(344): NCBI GI: 46102674 Blast Desc: FG00041.1 [Gibberella zeae PH-1]
  misc_feature (212)..(338): NCBI GI: 226291769 Blast Desc: conserved [Paracoccidioides brasiliensis Pb18]
  misc_feature (212)..(338): NCBI GI: 226286305 Blast Desc: conserved [Paracoccidioides brasiliensis Pb01]
  misc_feature (223)..(338): NCBI GI: 67901348 Blast Desc: AN7661.2 [Aspergillus nidulans FGSC A4] gi|40742657|gb|EAA61847.1| AN7661.2 [Aspergillus nidulans FGSC A4] gi|259484000|tpe|CBF79851.1| TPA: bHLH transcription factor
  misc_feature (172)..(338): NCBI GI: 225679991 Blast Desc: dihydrodipicolinate synthase [Paracoccidioides brasiliensis Pb03]
  misc_feature (238)..(338): NCBI GI: 119191568 Blast Desc: CIMG_00161 [Coccidioides immitis RS]
  misc_feature (238)..(338): NCBI GI: 240106420 Blast Desc: bHLH family transcription factor [Coccidioides posadasii C735 delta SOWgp]
  misc_feature (223)..(344): NCBI GI: 145235499 Blast Desc: An03g05170 [Aspergillus niger] gi|134058083|emb|CAK49169.1| protein product [Aspergillus niger]
  misc_feature (238)..(352): NCBI GI: 171683017 Blast Desc: protein product [Podospora anserina] gi|170941468|emb|CAP67119.1| protein product [Podospora anserina]
  misc_feature (238)..(338): NCBI GI: 212527302 Blast Desc: HLH transcription factor, [Penicillium marneffei ATCC 18224] gi|210073206|gb|EEA27293.1| HLH transcription factor, [Penicillium marneffei ATCC 18224]
MTSKLLPSSDIPSRRDRLRASLQALLNDDIELDPFKPGTSLSSPISPSSPDNEQEPNTFYPADNTSKIHMAIDPRLSIGTSLVARNPDQSILSPSLRQQSIMSGSSSNDNIQIDHSSVYTHKRYSTRAATHREAAQTRRTRSTFYQDSPIQEGRTPDPCLLVDDDLVIDYSCELTPPEMDMRKRSRDEDNPFSLSQEIDFSYGGGWDQSPVTSPDQMQSSSLSTDRGICDVVQRPEKRQRQHYAVEQRYRAGLNERFNALRDCIEARSKMESQHEHRQSRRSTGAFDSRDSAASGATGRSTKMNKADVLHKAVVYIQDLEEENEVVLEQLKLLVQRLRNAKIALGVMEPKQVGSKRKDA

SEQ ID NO: 24144 - DNA, 1683 bp, Muscodor strobelii
  misc_feature: SGI EST ID NO. CUFF.56877.0
  misc_feature: Variant of the nucleotide sequence at SEQ ID NO 24142
agatgcactgataatctagcctttctaatgaaggcggaagacgactatgccatactgcccctgtgtagatacgaggtggcgcactcgcgtgaattattttgagctatccgcaagaagcggggattgctcgcggctcgtggccggccgtacggcaaagaggcatcagtcagttagcgagatatcatgagacgatactattcttctccggtcctccattgctctcgaactctgcaacgacccatgggtaccccgcagagagcacgtagcaacggtgagaaaaactatggcagctagcacttgacggtatactttatatcgtggaatgcaatatgtgcttggagttagggctattgttagcttaactgaagacatagttagattctcgcttctcctcccagcttaagttgtagctcgtccagaaaccatgacgtctaagttgttaccttcatctgatatccctagccgaagggatcgcctccgcgcgtccttgcaggctcttctaaacgacgatattgaattagatccgttcaagccaggtacttctttgtcgtcgccgataagcccaagctcgccagataatgaacaggaaccaaatacgttctacccggcggataatacgagcaagattcacatggccatcgatcctcgtctttcgatagggacgtcgttagttgcacgcaatcccgaccagtctatcctttcacctagcctgagacaacagagcatcatgtcaggcagtagcagcaacgacaacatccagatagatcactcgtcagtctacacgcataagcgctactcaactcgagcagccacgcatagagaagctgcacagaccagacgtactcgtagcaccttttatcaagacagtcctattcaggaagggcggactcccgatccctgtcttctagtcgacgatgatctggtcatagattacagctgcgagctgacgccaccggagatggacatgcgaaaacgatcgagggatgaggacaatcctttctcattatctcaagaaatcgacttttcctacggaggcggctgggaccagtcgccggtcacatcaccggatcagatgcagtcatcgtccttgtctacagaccgcggcatatgcgacgttgtccagcgcccggagaaacggcagcgccagcactacgcggtcgagcagcgctaccgggcaggtcttaatgagcgtttcaacgcgctgcgcgactgcattgaagctcgaagcaagatggagtcccaacatgagcataggcagtcgcgtcgatcgacaggcgcctttgattcgagggatagcgctgcgagcggcgccaccgggcgatcaacaaaaatgaacaaagctgacgttctacataaagcggtcgtgtacatccaagacttggaagaggaaaatgaagtggtcctggagcaattgaagcttcttgtgcaacgattacggaatgccaagatagctctcggagtcatggagccaaaacaagtagggtcgaaaaggaaggacgcttaatgcctcttgtatcccggtgctgtagtatgttgtgtagccattgtatttatgtggcggctttgtcagccttaaccgaagccgagctgcatattaattaaaaaggcttatggtacaaggctgtgccaatcttgaggtcacacagagcatacaggaaggatcaataaaccagtattcctcgg

SEQ ID NO: 24145 - DNA, 1176 bp, Muscodor strobelii
  misc_feature: SGI cDNA ID NO. 568228
  misc_feature: Encodes the peptide sequence at SEQ ID NO 24146
atgaatacttttactatcgagaaaatcttgatggccggtgctcgatgcaagagtgaagaaagccgcagccgtctggaagctctgccagcagagatcaagctcctcatcattgagcatctttcggacatcaagtccattatcgacctagccctttcgggaccatctctctacatcctcgtggcaaacaaggagtccgagatcgcggctaagatattcatgacaagcatcccgcaaccgttcctcggagtagccgatcttgtctcatccttctcacattcctcgattgacggcaacaaacctactgagaatgttgccaatgctttgatcgcccacataggcaaagatctcaaggataaggcctatcattggacttcgtacaaacatctcagcatcaagaatgtccagatgtccgtccaactctatacttcactacggcattatgcgtgggctttagcacaagaagcccttaagaaagcgcccaggaagcaaaatgacccacatctatcggaccacgaactcaatcgcttcatcaaagcactttacgtcatagaggccatttccaaaggatttcctaaggcatttagtactctacgtttcaatgtcatcgatcgagagttatacaacagcatggtcgaaggagactatttctgcgtcgacctatctcatgacaatatagccgcacttatgatgagcgtgggactcggagctctttttcgactgcagcatcgcggtgaattaattcaagcattcatcccgtttacgaaaagcgacaaacgccgccgcctccggctgcttgctcatgaccgtcgacacgatgctctgtggctcaacgagaacgaattaggccgattcagtctcgatgcgcaccacatctttcagaggtacccggaagatgatatgagcgcggccactgcctggtaccacactcttctgatgccacacgtagaagaggatgatctcttcactggcccatatttaggaccaaagtgtgaattctgtatcgaggagtgggttccttgtatgtgggatattgagcgcctgaatgtggccagacgaacccctctgcccactattcaggaactagaaaaggctgcattcggccacgccgttgacgaagacgatcttctccgcaactctatcggacgtggtcttatctcagaatgtcaaaggatatga

SEQ ID NO: 24146 - protein, 391 aa, Muscodor strobelii
  misc_feature: SGI Peptide ID NO. 568228
MNTFTIEKILMAGARCKSEESRSRLEALPAEIKLLIIEHLSDIKSIIDLALSGPSLYILVANKESEIAAKIFMTSIPQPFLGVADLVSSFSHSSIDGNKPTENVANALIAHIGKDLKDKAYHWTSYKHLSIKNVQMSVQLYTSLRHYAWALAQEALKKAPRKQNDPHLSDHELNRFIKALYVIEAISKGFPKAFSTLRFNVIDRELYNSMVEGDYFCVDLSHDNIAALMMSVGLGALFRLQHRGELIQAFIPFTKSDKRRRLRLLAHDRRHDALWLNENELGRFSLDAHHIFQRYPEDDMSAATAWYHTLLMPHVEEDDLFTGPYLGPKCEFCIEEWVPCMWDIERLNVARRTPLPTIQELEKAAFGHAVDEDDLLRNSIGRGLISECQRI

SEQ ID NO: 24147 - DNA, 2400 bp, Muscodor strobelii
  misc_feature: SGI cDNA ID NO. 568229
  misc_feature: Encodes the peptide sequence at SEQ ID NO 24148
atgcgcttgctttggtatgccggggcctcgacggcgctggccactggggtggtggcatatgccttcaaccaacgcgccaacttctactctgccatggtctacctcgcccagaacaaccttagcctcatgattcttgtcaacctcgtcctcctcatccatgcctccttcgtctggggccttcagcgactctgctacggccccctccgccccgtcgagatcgagcagctgtacgagaaggcctggttcgccgtcaccgagacatgcctcgccatgaccatcttccgcgaggaggttggccattacttcatcgtcatgttcactgccttggtcaccggaaaggtctgggagtggataggcgagggccgcgtcgaggttctcgaacagcaacctcccaccaaccccaccctcttccacacgcggctgagcatctcccttctgctcagtatcgtctatgacgcctggttgttctactatgcagtcactgctgtcattcagcaggcacgccccaacatgatggttatgttcctcttcgagttcgccattctgggcacctgttcattccgcacctctatgcgatatatcctcagtaggatagaggccaatatcgtgaggaagcagactcagactcgactggatgaccggcgtcggcaggccagggagcagcgcgcggatattcttcgacggcgagagtccgacgacgccaccgaggccgaagctgcccagcaagaagaattgcccgatgaggaagacatcgacgagatggacatagaagtccctgggtgggaatctaaaggccattgggttttgagccttgatctcatgactgacttcgtgaagctcgccatctattcggctttctttgctattctcatgatgttctacggattgccaattcatattatgcgtgatctcttcatgactgcccgctcgttcgtcaagcgtcttggcgctctactacggtatcgcaaggctctccaagatatgaacaaatatcccgatgctacgtcagaggacctagaaagagaggacacttgtattatatgcagagaagaaatgcggccatgggagccagctgctgcaggagctgtcgagcggtctcgacccaagaagctcccctgtggacatatcctacatttcggttgtctcaaggggtggttggagagacaacaagtatgtccgacgtgtcggcgctcagttgtcatcgatgggcccaaccagaatggtgccgctggtcctgctcagccgggtgcgaatggaggaggtcagcctccggctcccggccaacccgctcccggcggaggagcacctgaaaatcccggcccaaaccccgcgagaggagccaatatgcgcgttttccaactgggtcccatccggctgggttttgcgcaaggaaatgcacagaatatgcaggaattggctgcgagacttcagcttccacttgacggtcagaatgctcccgtaattccagctgctgtaccgtcacctacacctgttgctcccaccaccagtgctaacggctcatccaacaacatggcggcgattcaagcacagcttcaggatatttcgaaccggatacaacaggagatgtatgccttgcaagtgagccagtctgaactcatgactctgtatgcgcttacggccgagttgaaccggttgcgccagctgccaccgcaattccaatctggcttgccgagccaacctggccaaacgtcgacaaccgtgcaagttggtttgcctccaccgcaggtcttgtcacagtcaactcaaatcacttacacacatgggcctaccgttactagacatggcggtgcatcgctctctgctgctataccagcaggcagtcaagaacttccagaaggcgtagttatccctcctggctggtcccttctacccctcgagcgactggatgctccacttccacctcaggctccaggagttcagcctggttcaacgacacagttgcacgatcaacagagtcaacagaccccgcccgctggcccatctaccagaagcaatggagtactcgatcctaactcccccgcaaggtccatggttactcccgcccattctcctgtgccagacgttcatattgagagaaacggcagtgacgaaccttcctcatcacagggacaacaacaaagggagtctcccgatgttgctgcgcccactccgtctctgccgaattggggcggtgtctctcaactctttgccaaccaaaacagtagtgggaattctaacactgccgcacctgctgaaagtaacacagttgagagcaactctgactctgattctcatgatgacgacacgagcagcgaggatgatggcgatgcagataatgcatctggaaaaggcaaaggcaaagccacgactgtcgaggatgccgactcggaaagtgattag

SEQ ID NO: 24148 - protein, 799 aa, Muscodor strobelii
  misc_feature: SGI Peptide ID NO. 568229
  misc_feature (345)..(395): Pfam Id: PF00097 Pfam Desc: Zinc finger, C3HC4 type (RING finger)
  misc_feature (9)..(795): NCBI GI: 145605549 Blast Desc: MGG_09205 [Magnaporthe grisea 70-15] gi|145013362|gb|EDJ98003.1| MGG_09205 [Magnaporthe grisea 70-15]
  misc_feature (1)..(799): NCBI GI: 116198299 Blast Desc: CHGG_07305 [Chaetomium globosum CBS 148.51] gi|88178584|gb|EAQ86052.1| CHGG_07305 [Chaetomium globosum CBS 148.51]
  misc_feature (1)..(679): NCBI GI: 85091998 Blast Desc: NCU04633 [Neurospora crassa OR74A] gi|21622300|emb|CAD37003.1| conserved [Neurospora crassa] gi|28920578|gb|EAA29940.1| [Neurospora crassa OR74A]
  misc_feature (1)..(799): NCBI GI: 46109998 Blast Desc: FG01881.1 [Gibberella zeae PH-1]
  misc_feature (22)..(799): NCBI GI: 171694173 Blast Desc: protein product [Podospora anserina] gi|170947035|emb|CAP73840.1| protein product [Podospora anserina]
  misc_feature (1)..(797): NCBI GI: 256728665 Blast Desc: NECHADRAFT_21215 [Nectria haematococca mpVI 77-13-4]
  misc_feature (2)..(799): NCBI GI: 154309754 Blast Desc: BC1G_07347 [Botryotinia fuckeliana B05.10] gi|150851808|gb|EDN27001.1| BC1G_07347 [Botryotinia fuckeliana B05.10]
  misc_feature (2)..(793): NCBI GI: 156052036 Blast Desc: SS1G_07426 [Sclerotinia sclerotiorum 1980] gi|154705203|gb|EDO04942.1| SS1G_07426 [Sclerotinia sclerotiorum 1980]
  misc_feature (1)..(799): NCBI GI: 242799282 Blast Desc: RING finger protein [Talaromyces stipitatus ATCC 10500] gi|218716691|gb|EED16112.1| RING finger protein [Talaromyces stipitatus ATCC 10500]
  misc_feature (1)..(797): NCBI GI: 70983526 Blast Desc: RING finger protein [Aspergillus fumigatus Af293] gi|66844916|gb|EAL85252.1| RING finger protein [Aspergillus fumigatus Af293] gi|159123704|gb|EDP48823.1| RING finger protein
MRLLWYAGASTALATGVVAYAFNQRANFYSAMVYLAQNNLSLMILVNLVLLIHASFVWGLQRLCYGPLRPVEIEQLYEKAWFAVTETCLAMTIFREEVGHYFIVMFTALVTGKVWEWIGEGRVEVLEQQPPTNPTLFHTRLSISLLLSIVYDAWLFYYAVTAVIQQARPNMMVMFLFEFAILGTCSFRTSMRYILSRIEANIVRKQTQTRLDDRRRQAREQRADILRRRESDDATEAEAAQQEELPDEEDIDEMDIEVPGWESKGHWVLSLDLMTDFVKLAIYSAFFAILMMFYGLPIHIMRDLFMTARSFVKRLGALLRYRKALQDMNKYPDATSEDLEREDTCIICREEMRPWEPAAAGAVERSRPKKLPCGHILHFGCLKGWLERQQVCPTCRRSVVIDGPNQNGAAGPAQPGANGGGQPPAPGQPAPGGGAPENPGPNPARGANMRVFQLGPIRLGFAQGNAQNMQELAARLQLPLDGQNAPVIPAAVPSPTPVAPTTSANGSSNNMAAIQAQLQDISNRIQQEMYALQVSQSELMTLYALTAELNRLRQLPPQFQSGLPSQPGQTSTTVQVGLPPPQVLSQSTQITYTHGPTVTRHGGASLSAAIPAGSQELPEGVVIPPGWSLLPLERLDAPLPPQAPGVQPGSTTQLHDQQSQQTPPAGPSTRSNGVLDPNSPARSMVTPAHSPVPDVHIERNGSDEPSSSQGQQQRESPDVAAPTPSLPNWGGVSQLFANQNSSGNSNTAAPAESNTVESNSDSDSHDDDTSSEDDGDADNASGKGKGKATTVEDADSESD

SEQ ID NO: 24149 - DNA, 2797 bp, Muscodor strobelii
  misc_feature: SGI EST ID NO. CUFF.56971.0
  misc_feature: Variant of the nucleotide sequence at SEQ ID NO 24147
caattacaataggtggcatcaaaagcacatagtgatacaagcatccctctcagactctcacaacctacaagctcatttgtgacgagccgtttgcacctgagctgtgctcaacctgtttccgctctctccggaagatggacatctagctgcctccttgcagctacatcaagaaacacccgccaattccttcatcactatctttgtatattggtgttcagagcagccgtagcagagatgcgcttgctttggtatgccggggcctcgacggcgctggccactggggtggtggcatatgccttcaaccaacgcgccaacttctactctgccatggtctacctcgcccagaacaaccttagcctcatgattcttgtcaacctcgtcctcctcatccatgcctccttcgtctggggccttcagcgactctgctacggccccctccgccccgtcgagatcgagcagctgtacgagaaggcctggttcgccgtcaccgagacatgcctcgccatgaccatcttccgcgaggaggttggccattacttcatcgtcatgttcactgccttggtcaccggaaaggtctgggagtggataggcgagggccgcgtcgaggttctcgaacagcaacctcccaccaaccccaccctcttccacacgcggctgagcatctcccttctgctcagtatcgtctatgacgcctggttgttctactatgcagtcactgctgtcattcagcaggcacgccccaacatgatggttatgttcctcttcgagttcgccattctgggcacctgttcattccgcacctctatgcgatatatcctcagtaggatagaggccaatatcgtgaggaagcagactcagactcgactggatgaccggcgtcggcaggccagggagcagcgcgcggatattcttcgacggcgagagtccgacgacgccaccgaggccgaagctgcccagcaagaagaattgcccgatgaggaagacatcgacgagatggacatagaagtccctgggtgggaatctaaaggccattgggttttgagccttgatctcatgactgacttcgtgaagctcgccatctattcggctttctttgctattctcatgatgttctacggattgccaattcatattatgcgtgatctcttcatgactgcccgctcgttcgtcaagcgtcttggcgctctactacggtatcgcaaggctctccaagatatgaacaaatatcccgatgctacgtcagaggacctagaaagagaggacacttgtattatatgcagagaagaaatgcggccatgggagccagctgctgcaggagctgtcgagcggtctcgacccaagaagctcccctgtggacatatcctacatttcggttgtctcaaggggtggttggagagacaacaagtatgtccgacgtgtcggcgctcagttgtcatcgatgggcccaaccagaatggtgccgctggtcctgctcagccgggtgcgaatggaggaggtcagcctccggctcccggccaacccgctcccggcggaggagcacctgaaaatcccggcccaaaccccgcgagaggagccaatatgcgcgttttccaactgggtcccatccggctgggttttgcgcaaggaaatgcacagaatatgcaggaattggctgcgagacttcagcttccacttgacggtcagaatgctcccgtaattccagctgctgtaccgtcacctacacctgttgctcccaccaccagtgctaacggctcatccaacaacatggcggcgattcaagcacagcttcaggatatttcgaaccggatacaacaggagatgtatgccttgcaagtgagccagtctgaactcatgactctgtatgcgcttacggccgagttgaaccggttgcgccagctgccaccgcaattccaatctggcttgccgagccaacctggccaaacgtcgacaaccgtgcaagttggtttgcctccaccgcaggtcttgtcacagtcaactcaaatcacttacacacatgggcctaccgttactagacatggcggtgcatcgctctctgctgctataccagcaggcagtcaagaacttccagaaggcgtagttatccctcctggctggtcccttctacccctcgagcgactggatgctccacttccacctcaggctccaggagttcagcctggttcaacgacacagttgcacgatcaacagagtcaacagaccccgcccgctggcccatctaccagaagcaatggagtactcgatcctaactcccccgcaaggtccatggttactcccgcccattctcctgtgccagacgttcatattgagagaaacggcagtgacgaaccttcctcatcacagggacaacaacaaagggagtctcccgatgttgctgcgcccactccgtctctgccgaattggggcggtgtctctcaactctttgccaaccaaaacagtagtgggaattctaacactgccgcacctgctgaaagtaacacagttgagagcaactctgactctgattctcatgatgacgacacgagcagcgaggatgatggcgatgcagataatgcatctggaaaaggcaaaggcaaagccacgactgtcgaggatgccgactcggaaagtgattagagctgtagacgcgagtttgtatttacataaggattgcatgcatcaggctaggcgttggtggcgtttcactgtacatttagacttgataccatgatacgagataggtatcgcgctcaactattatacatctacagaatcatcaacagaataaaatatggtgaaa

SEQ ID NO: 24150 - DNA, 1815 bp, Muscodor strobelii
  misc_feature: SGI cDNA ID NO. 568230
  misc_feature: Encodes the peptide sequence at SEQ ID NO 24151
atggcgattcgtcgcgtccgcatcctacttctaatcgtcatcttctgggtgctggcatcctggtactacaacacctctacctctagtaccaccggtctctttggttccttcaccggtccttccaaggtcaatggcgactaccggtgggagaagcacgcggccaaatatcctgtcggccaacttacccaactcccgaccaacaagcccgcccaaccgatcccggcaatccaagcgaccaagcccagagaagatgccgccgcaaaggaggagcggctagctcgacttgcggcagttaaggatagcttcagacatagttgggaaggctacaaaggccatgcttgggcccacgacgagatcaagcccatctcgggcgagttcaaggacccattcggtggctgggccgcgactctggttgattcgcttgatacgttgtggttgatgggcctcaaagatgatttcgagattgccgtcgcggcatgcgacaagatcgacttcaccacgaccaaatctcgcgacatcaacgtctttgaaacaaccattcgctatctcggcggtttcctcgccgcctacgagctgagcgaccagcaatacccggtgctgctcaataaatcaaccgaaatagcaagtctcctgatgacagccttcgacacgccgaaccacatgcccatagcccgttttaattggagggactatgtaagaggtcggccccagagagcgtcggtaacaacgttactagccgagatcggctcactcagcctcgagttcaccaagatgtctcagattaccggtgacatgcagtactatgatgccatacaacgcatttacgacgagatggagaaagcacaggccaccacgaggctcccgggcatgtggcctgtcgtcgtagatgcctcgacaacgccgatggacttttctggcgatggctttacgcttggtggcatgagtgacagtgcattcgagtacttgccaaaacagtatttactgctcggaggtgctattgagcaaccaaaaaggatgtatgaaaaattcatcgaccctgccaaaaaacatctctcccgtcgagcgttacacccaggtaaccaacctgtcgcattctttggtgatgcgcacatctctaaaacacccgatggcgataagatggtcgtcacgacgccccgagcgcagcatttgacatgcttcaccggtggtatggtaggcctgggcgccaagattttcgaccgtccaaaggacctcgaacttgctacacagctcaccaacgggtgtacttggtcatacagcgctacggcgtctggtatcgggcccgagatcttctttttcatcccctgcgatccaaacgacaggacggacgactgccaatggagcgaggacagatgggttaaatcgctcagcaagcactgggttgtcaatcccaacaaggaggagggtttcgacgtacagaagaaagtcgctgagataatcgacgtgagaagattaccgaaaggtatggtcgatgtcagcgatcgacggtacatccttcgtcctgaagcgatcgagtccgtcttctacatgtacagatttaccggagacgtcaagtatatggaagtcgcatgggacatgtttgtggcgatagaaaaggccacacggtctacatacgcatcggccgcattgcacgatgtgacgtacaagaaaccagaacaggtcgatagcatggagagcttctggctcgcagagacgctgaaatacttttatctgatattcggcgagtgggatgcattcgacctggataaatgggtcttgaataccgaggctcatccgttacggcgcgcagacgcttag

SEQ ID NO: 24151 - protein, 604 aa, Muscodor strobelii
  misc_feature: SGI Peptide ID NO. 568230
  misc_feature (101)..(601): Pfam Id: PF01532 Pfam Desc: Glycosyl hydrolase family 47
  misc_feature (101)..(439): Pfam Id: PF01532 Pfam Desc: Glycosyl hydrolase family 47
  misc_feature (496)..(601): Pfam Id: PF01532 Pfam Desc: Glycosyl hydrolase family 47
  misc_feature (3)..(603): NCBI GI: 256728661 Blast Desc: NECHADRAFT_123234 [Nectria haematococca mpVI 77-13-4]
  misc_feature (3)..(603): NCBI GI: 46110020 Blast Desc: FG01892.1 [Gibberella zeae PH-1]
  misc_feature (3)..(601): NCBI GI: 154303430 Blast Desc: BC1G_09286 [Botryotinia fuckeliana B05.10] gi|150854597|gb|EDN29789.1| BC1G_09286 [Botryotinia fuckeliana B05.10]
  misc_feature (49)..(601): NCBI GI: 145605746 Blast Desc: MGG_11802 [Magnaporthe grisea 70-15] gi|145013547|gb|EDJ98188.1| MGG_11802 [Magnaporthe grisea 70-15]
  misc_feature (49)..(601): NCBI GI: 242807212 Blast Desc: class I alpha-mannosidase [Talaromyces stipitatus ATCC 10500] gi|218715533|gb|EED14955.1| class I alpha-mannosidase [Talaromyces stipitatus ATCC 10500]
  misc_feature (43)..(601): NCBI GI: 212538213 Blast Desc: class I alpha-mannosidase [Penicillium marneffei ATCC 18224] gi|210069004|gb|EEA23095.1| class I alpha-mannosidase [Penicillium marneffei ATCC 18224]
  misc_feature (3)..(553): NCBI GI: 156044965 Blast Desc: SS1G_09671 [Sclerotinia sclerotiorum 1980] gi|154694066|gb|EDN93804.1| SS1G_09671 [Sclerotinia sclerotiorum 1980]
  misc_feature (60)..(601): NCBI GI: 12060542 Blast Desc: AF129495_1 class I alpha-mannosidase [Ophiostoma novo-ulmi]
  misc_feature (1)..(601): NCBI GI: 258566834 Blast Desc: UREG_04850 [Uncinocarpus reesii 1704] gi|237905607|gb|EEP80008.1| UREG_04850 [Uncinocarpus reesii 1704]
  misc_feature (42)..(604): NCBI GI: 169771661 Blast Desc: [Aspergillus oryzae RIB40] gi|83768159|dbj|BAE58298.1| protein product [Aspergillus oryzae]
  misc_feature (42)..(599): SWISSPROT Homolog: EC 3.2.1.113 Mannosyl-oligosaccharide 1,2-alpha-mannosidase
MAIRRVRILLLIVIFWVLASWYYNTSTSSTTGLFGSFTGPSKVNGDYRWEKHAAKYPVGQLTQLPTNKPAQPIPAIQATKPREDAAAKEERLARLAAVKDSFRHSWEGYKGHAWAHDEIKPISGEFKDPFGGWAATLVDSLDTLWLMGLKDDFEIAVAACDKIDFTTTKSRDINVFETTIRYLGGFLAAYELSDQQYPVLLNKSTEIASLLMTAFDTPNHMPIARFNWRDYVRGRPQRASVTTLLAEIGSLSLEFTKMSQITGDMQYYDAIQRIYDEMEKAQATTRLPGMWPVVVDASTTPMDFSGDGFTLGGMSDSAFEYLPKQYLLLGGAIEQPKRMYEKFIDPAKKHLSRRALHPGNQPVAFFGDAHISKTPDGDKMVVTTPRAQHLTCFTGGMVGLGAKIFDRPKDLELATQLTNGCTWSYSATASGIGPEIFFFIPCDPNDRTDDCQWSEDRWVKSLSKHWVVNPNKEEGFDVQKKVAEIIDVRRLPKGMVDVSDRRYILRPEAIESVFYMYRFTGDVKYMEVAWDMFVAIEKATRSTYASAALHDVTYKKPEQVDSMESFWLAETLKYFYLIFGEWDAFDLDKWVLNTEAHPLRRADA

SEQ ID NO: 24152 - DNA, 2322 bp, Muscodor strobelii
  misc_feature: SGI EST ID NO. CUFF.56907.0
  misc_feature: Variant of the nucleotide sequence at SEQ ID NO 24150
tggaaacacaagccgttggaggttgaacaaatccatcctcagcaatttgttcatcttttcattatagactgtatatgatacctcattgtactaagctaagggagaatacgtgtgtctctgttacacgacttcgtcaatcattacatcattcaactaccagctattgtatctctaatacttaatccactaagacttatactaaaatcgtcaaatctttccccattaccgctccggcccctaaactattaccacctccaagttgggtcgccttgactatttgcgacccgtgattgtagaatcgcaacactgcgattcttgtcgctaatgctggtcgacccgaacagagatggaaagtagtatcttatcctgatattgaactcagccgatcctcggctccatccggtccaacatggcgattcgtcgcgtccgcatcctacttctaatcgtcatcttctgggtgctggcatcctggtactacaacacctctacctctagtaccaccggtctctttggttccttcaccggtccttccaaggtcaatggcgactaccggtgggagaagcacgcggccaaatatcctgtcggccaacttacccaactcccgaccaacaagcccgcccaaccgatcccggcaatccaagcgaccaagcccagagaagatgccgccgcaaaggaggagcggctagctcgacttgcggcagttaaggatagcttcagacatagttgggaaggctacaaaggccatgcttgggcccacgacgagatcaagcccatctcgggcgagttcaaggacccattcggtggctgggccgcgactctggttgattcgcttgatacgttgtggttgatgggcctcaaagatgatttcgagattgccgtcgcggcatgcgacaagatcgacttcaccacgaccaaatctcgcgacatcaacgtctttgaaacaaccattcgctatctcggcggtttcctcgccgcctacgagctgagcgaccagcaatacccggtgctgctcaataaatcaaccgaaatagcaagtctcctgatgacagccttcgacacgccgaaccacatgcccatagcccgttttaattggagggactatgtaagaggtcggccccagagagcgtcggtaacaacgttactagccgagatcggctcactcagcctcgagttcaccaagatgtctcagattaccggtgacatgcagtactatgatgccatacaacgcatttacgacgagatggagaaagcacaggccaccacgaggctcccgggcatgtggcctgtcgtcgtagatgcctcgacaacgccgatggacttttctggcgatggctttacgcttggtggcatgagtgacagtgcattcgagtacttgccaaaacagtatttactgctcggaggtgctattgagcaaccaaaaaggatgtatgaaaaattcatcgaccctgccaaaaaacatctctcccgtcgagcgttacacccaggtaaccaacctgtcgcattctttggtgatgcgcacatctctaaaacacccgatggcgataagatggtcgtcacgacgccccgagcgcagcatttgacatgcttcaccggtggtatggtaggcctgggcgccaagattttcgaccgtccaaaggacctcgaacttgctacacagctcaccaacgggtgtacttggtcatacagcgctacggcgtctggtatcgggcccgagatcttctttttcatcccctgcgatccaaacgacaggacggacgactgccaatggagcgaggacagatgggttaaatcgctcagcaagcactgggttgtcaatcccaacaaggaggagggtttcgacgtacagaagaaagtcgctgagataatcgacgtgagaagattaccgaaaggtatggtcgatgtcagcgatcgacggtacatccttcgtcctgaagcgatcgagtccgtcttctacatgtacagatttaccggagacgtcaagtatatggaagtcgcatgggacatgtttgtggcgatagaaaaggccacacggtctacatacgcatcggccgcattgcacgatgtgacgtacaagaaaccagaacaggtcgatagcatggagagcttctggctcgcagagacgctgaaatacttttatctgatattcggcgagtgggatgcattcgacctggataaatgggtcttgaataccgaggctcatccgttacggcgcgcagacgcttaggataaacgttgaggagatgttgtgaataccttatataaacgttgcctacatgatagagctgtacacatactgcaaatcataccaaattttcaaaattg

SEQ ID NO: 24153 - DNA, 1062 bp, Muscodor strobelii
  misc_feature: SGI cDNA ID NO. 568231
  misc_feature: Encodes the peptide sequence at SEQ ID NO 24154
atgtccctaacaacccgcataacacctctccgcacctcaacatccacccaagactcgtcggaagacatattcggcgcctctctaggcgtcctctacaagggacaagacataacagcccaacacggagacaacgaccacacatccctactctacacctcaccccatctacctcactccctaaatatcgccctagcagatcccgaagatgagaacgaaagaaggttgcggagtcattacctctgcaactctagtttgctgctcgctgagtttattgaagccgggtctttggggttggattatgatgttgggggtcctactttaagtgaaggtgaagggggagttgagggtgagggtgaggatgaggctgaaggtgaagatggagatagagataaaggagagaagaaaaggggaagggacgaattctcaatatcacatttcaacataacacacctccgaaccctagagctcggctccggcacagcactccccagcatccttgcttctcttctgggtgctcggagcgtaatcgcaacagactatccatcgccctccgtcctctcaactttacagcgaaacatcgcagtaaattgccagaccaaaaactcaccactcggtagtgtgtcctcggtgtcggtggcaggccatgcatggggcgatataagcgatgaccacgagttcgcaagaaagaataagggaacattcgatagagtgttcgtctgtgattgtctatggatgccgtggctgcactataatttgctgaaatctattgcgtattttcttaagccatccactgttcacgccttatctcatcacagtgaagacagagaggcccgtgcctgggtaataggcgctttccacacaggacgtgcgaacattaggagtttcttcgacgaagcgagtctgacgcggcatggacttgtagttgagcggatttgggaacgggattgtgatggagttgaacgggcttggaagggtgacaggggcgtggaggatttgagtgtgcttaagaggtggttggttattgggattttgaggaggaaaagggggggtgttgaaggatag
